United States Patent Application Publication US 2007/0054278 A1 - sequence listing, part 93

SEQ ID NO: 97118 - DNA, 189663 bp, Homo sapiens
  misc_feature (1)...(189663): n = A,T,C or G
actttcaataaggcctgggatgaggctggtgaaggaagggattttgagcacgaaaatgacaaaaaatcagacctacccctttaaattagattcttgtcccatatttgagcatctttctgacattcccctcctttcaaaacatcaagcactcactgggcagacatcaagatcctgttaacatgcaactcctttcatgactatttgttgttatattttttatttttatttttttgagatggagtctcactctgttgcccaggctgaagtgcagtggtatgatcttggctcactgcaacctctgcctcctgggttcaagcaattctctgcctcggcctcctgagtagctgggattacaggcatccgccaccatgctcagctaatttttgtattttcagtagagatggggtttcaccacattagccaggctggtctcgaactcctgacctcgttacccacccgcctcggcttcccaaagtgctgggattacaggtgtgagccaccgtgccaggcttgttattgtttttaatagctcctatgaggaggaacccaaaggaaagaatctctattagacaaatttcaacccctgtggtcttggagaagagagattgagagtcagtgaagtcttcccaaaacaactcccctccccgcttcctgccaaactgcccagtggatgatggggttagagtgtgcactgccttcttgtagttctgtgacctctggcaggctatctgatctctggagccagcctctatttccttgggagttcctacctcactggctattcctaggattaaagtggatgtcaaaggcctatcacatagtaggggctacacacatgagttcccttgttcctcaggagtgattctcaactctggctgctcaaaggaccttgcctcgtcctcaaattggctgtacattggaatccccttgggaattttaaaacatccatacctgggctccattcccagtgaatctgatttaattgtcctgggctgtcatctggccatcaggctgtttcagagcttcccaggtgattcaaatgtgtggcaacattaagaacactgatctaggaaactttgaaagaaagtacccaggaccaggttctactcctaaacaattcaagaagaacctctggcagaggttggctatggaatttttaaaaatgtatcatgcatgttttattccattatcacataaagacatacagatgcacgtgcatatgtgaatgggtgtgtgtggatggattttgttagtgtttgttttacagaagcaggatcacataacacatacttttctggatcttactatgaagacaataatttctgcagaaatccctccaggtcaatgaatattattctaattcattcttttttcttttaattttttattttgacataatttcagacttatagaaatgttgcaagaatagtacaaagatatctcatttccccttcattagatttcccaaatgttaccccattatggtatttgcttcaagcttgggttttgttttttttttgtttgttttgttttgttttttaattgagacaagttctcgttctgtcatccaggctggagtgcaatggtgtgaacacatctcactgcagacttgacatcctgcactcaagcgatcctctcacctcagcctcctgagtagctgggactgtaggcacatgccatcacagctgtctaattttttgtacagatgcggtcccactatgttgcccaggctggtcttgagctcctaggctcaggtgatcctcccacctcagcttcccaaagtgcttggattatacatgtgagccaccgtgcctagccaagcttaggtatgttttaaaagctcctcaggtgagtctaatgcacagccacgttgctctgtggggcctcccagttagccatgagacttaaggcagtgtttgtgaaacttctgaccttcgagaggggtctttgcattagaggcagttatctgaagtggttaagacagtgggctcgaagtcatgctgctatgtttgaattctagctcttttgcttcctccctcctgacccaccttctgtgcctcagtttcttcatctgtaaaataaggataatcgaagtgctaactcctaaggctttgtgaggattgagtgagattacttaagatagtacttggcacacagtaagtatacactaaaggttagttatttgtatatttatcattaccatagctcatctatgaaacaaaattggcttaagctcgccctggtcacctataaacagaattctttctgatcgagtcattaaattctttagacaaattcgggagttatcagcatataaaagttcccatttagaaacaggccccttttgaaaatgaaattagcgaggatcaattaaaaatatctgtcacattgactcaccctaagagatgttttgtatgtgttttgtggatggcaggctgaaaaatgccgaaatataaccctaatgtccagaatgtgtcactggggcaggaaaccaatgaaaggtgatgaactgattagtagcaaggctgaaggggggtggcggggagcgtaaagagcaagttctccccccacggaccagctgtcccccaggcctaggccaggtgggaatgtgagccctgaattgccacatgttcctatcttcctggaagtgctgaaactttgttccttgaggtgaagtttcccaacttctaaatatttttagatttcccaattttttatttttttttttttagattttccaattttaaaaactcctctgcaggccagtttgtagcttccaatcatgggagtcaaatagcggggttggaagatccgaaaggggaaagaagtcataatattttgtatttctccaggactgtttgaggaagagaggctgtatctgatggttctaggtcgccaagacattgtgtctgctctctagtggggtaggaacctggttgggttccattcctgagacatttcttgagcacctgctttgtaccaaaccacgcctgtcctcccaggagcatccaatctcctttgctttgtttatgtgctcccaagctgcctgctgactactaatttgacttctgcagtgccttgatatggagaactgggctctcaggggaacagatatccctgctgcaagttataaaccaagactgtccaggacctgatctccctctcattaacagtatttctggggcttagctctttctgtaccatataagcatgatgagaaaaatatatattttataagtaagataagggtctggtcagagtagcaataaaagagcatgaaaaagatattagtttagaaaaccttaagtttacataccatatgaagcaattcagaaatatatctggttatttcgaatccatcagaggcatctgagtttacctaaaagtgtaaaatattatacattacacaaaacccaacatttcatcatgtaaacaacaaaaacgggacaccctattgtcgcagaggcagattctataacctgaaacccctcctgccatagccacgtagacacagttggtaaaatgtaatcagaatctctttaaatatatgcagagccagtctaaaagaagggaagtccccaacagccagaaacaaaggagaatctgaaaacaaggaaagaatgtatgacagctggccaggcacaatggctcacgcctgtaatcccagtactttgggaggccgaggcgggtagatcatctgaggtcaggagttcgagaccagcctgaccaacatggaggctgaggcaggagaatcgcttgaacctgagaggtggaggttgcagtgagccgagatcgcgctactgctctccagcctgggtgacagagtgaggccctgtctcaaaaaaaaaaaaaaaaaaaaaaaattgccaggtgtcactcccactttcctgcatctgggaacacttttccagcctccctttcaaggagttctcatgagagacaagggcctggtggtcaggcccagggaaaaaggccacaagagaggtatgctttggcaaacattgctaaagttggggtatttggggcattgaaatttaagcatgtggcaggaaagctagaccaagtgtccactgggctaaggccccttatcccaggagttcaggaggctgggtaaaagagagacctggggcatggaagtcagaaaaccagggttggattccttccaacagtgcaacaaggaccagaatgataatttccttcaagtagacataatacgtataaaatgcccagaatgcacacagtagaccctcagcaatgtgcctgggacagcacaccaatgttacagaagtgaaatggggccagggctggacctgagccttggcctcatccctgcttcttctgttgataagatttatcgaatgattacttatgagatgccaggtaccacttgaagtgctttcatcgatcagctcatgtaatgttcagaacagccctatcaggtagaagccatcattatccccatttacagatggatgaggaaactgaggcccagaaaggttaagtaacatacccaaaggcatacagttagtaggttgtgaactggagtttgaatccaggcaatctggctctacaagcagtcatcttgatagttagaataccaatagtattaaaatcacaataatgattggcagcaaacgatgtgtcaagcacccgttattggcaaggtgaagatgagtcggatgcattcgaacgcccttggggacaggatccagcaggggtgatcaagagatcagttacttcctgaaggtaacacccttccgggtgatttcggggagacggatggggaaggtgggttgcagttaagagttgggcagagtgatccaggggaacattatcttctgcagctgtgctgtgtaactccatgcatccctttgatccataaagttttcaaagccagaccttttcccattacggagtgaatctgacacaagtgtacagaattttgcacttggtttcttttggccccactccccccagtcttttcttttgttatgttttgtgcttcaaatggttagctcaagggttaaaggaactgtccggagttaggtgcctatgtcttaatatcttttaaaagttgctcatttgattctcctccctctggcccatttggcgttcatctgaatgagggctcctggttatgcagataggcagtggagctgtgaaaatggaccactaggccccaaatcaacctgggcacatttgcgctctgcaggttcaacctcccaggagggctccctgcggttataccaacgctggctgctctcagtgggcctgaaaaccatcaaccgtccaagtcataggcaatcagcaatctcgatagactgatggatcgtggacagaagctctaacgctgtttccattcatttagcaacagcaaatcaatccactttcccagcatcctgcaactttatcgaactcggcatcccattgcaggatacgcccccgaactctccttaattatatatttcgctatttgcaatcaggactcggcgatgcagtcctgacatcagagaatgggcgtcttctcagaaggccgcagtagcggcagcagctttcccgccctactgagcgctcactacaagcgggctctgggctaggcgcgccacccgtgcaagtccccggggagcggcggtgcaccctccgtcccgcgcgctcgcagccattgtagggtgggcgctcgccaggcagggtgccgacacgccctctccgcgctgcgacgggcggccgggggaggagagggtgcgctgtgcgcaccggagggagaggctccggcccagcgccgcctgcccgccagcagaccagcaggctcctctttgcggcgggtgccccacgcgcctctcgggcgcgcgctcccagccccgcccgcgtgcggcggccgcacggccgcgagagcgcgcctccgcttggcgggcacggccgcgagcgcgcgtgcgcccctccgaacgtccccgggagcccagccagagcgagcgccggggccgggcgcgcaggagtgaaaaggaggcggcggccgcagctgcgagcaacagatccggacgccgcgagctgacccgctctgctgttgggcgatttttttttaattgcagaaaaatttattaaattggaaaatcttgcgtttttcaatggcgctggccccgggtcagcgggcgattttctctgcatcaagatgggctttgccgtttccgtagtgggcaccagtggtggcctgattgtcagtcttctcccggcatttttaaggccaggagccgagcgctgcttgtaggcgaataccctacagagcggtttggctttttaaattactgttattattttgggcagagaacagtcggtctggtgcaccccgtcctcgctgcagaagaggctgcgagtccgaggtgggtctctcggaaggtgaaattccttctggggtgagcgagccccggccccgcgcgcagtccagcggccccgcgtgtgtgccctcgccctgccggagccgggaaaatggaggctgtgattgagaaggaatgcagcgcgctcggaggcctcttccagaccatcatcagcgacatgaaggtaggacgccgggggtgcggctgcggcgccggccgccgcgctctgacctcgccgccgcgcttcgcctccaccccgggccgggcacccggcccttccctgcagtgtggccaccggccacctgcgggagctcccggccggagtgtcacctgctcacccggggcgctgctccgggctctgcggggtcactgggcgggtggcttctctggggggtgtctgctgtcccacgccatctcccccgctcattgtcccagggggcggcaccatttctttccctcgggggctcaaggcactggctgcaagttttcccattgtctgtccctgaagtaagtgtctgggacccgcgggggctggatgcccgggaggacacctgattccyccgggcacggggtgggggcgcctggcgcggtggtggggaggaagtgggggctctgcccgctcgcaggaaggagtcccctagcctaggagactgagagggaaagccagtccctccttggctgtcaggtctacttggagtggggtatctgagcaaattagttattaattgggccgttccgaagctggtaaaggtgtgcgtgccctctcttagccctcccgcggggcgcggggccgaagttcccgggcagccttgcaggggccccgccttctcccagctgagcctaaaggcaagattggggcccccgaaataactgtatcctgccctcccagacccaaacggacacacactctaggttttctcttggaagggttgtgaagatggtgtgtgtgtgcgcgcgtgcatgtgtgtgtgcgcgcgcgcgcgtgggggcggggaacaacaccctggttttttcctgcaaagggtgggactggggataacctgatcctcggatgtggattttctggtgcctagagatagaccagggccccgtgttattcatccagaggaaataaaaccagccgcgcgagctggctggaggtgggaattgggagcggtgggggaaattatttttttaatgtgtatttagggagcttctctttggctctggcccagccccagtttgcctcaacagatccagatccggggaggtggtgtttaattaaaagctcgcttccaaaacgagtgggcaggtttggaaagctgtgcaccgagtgggtgtggacagcccctcttcagccgctgcctgggcgcctggaggagcttttgtctgatgaagtgtaaggtttagagaggcttcgtgcctcggagatggtctttgggaaggaatgctcagctgtcatggcctgcttccacctttcagaaccaactgccacctcacccagggtgaactttatcaagctgcctctgtcctggttttgtccattttgaaatctttctacagctctcgtgccttttgtcacaaattgtccttagcatagcataatctgcagccagactctgcttgcccaggaatgcttatagtccaggcacttggaattagatggattattccctgttgaaagacagcccctttcattctgttgcccccagtgcacactgacggatctgtccactgyagtcctggagtgatcacatctggagttttttctctttgttctttaatccagaatccaggctcggttcttcccattcactgtttgaatcgaaagccgttcagaaggtgacctgcccaaagggtgggctgtcctgctttccacctgccatcctgtggctgcgtggcactatgccctggctggggactcacgggtgccaaggtggtgttttttcccctgcatggttccagttaaaaataaagacattttctttaatgcccagtcacggcggaatctagagtttgtgtatcctgacttctttcggtttgagtttagtaggtttgttcagtatcctatgggaaatcatttattttaaagttttktttttttggtttgtttgttttggcagtaaaattttaaaagcaaggtggaatggaagactaaaacatgccttgggttctgcagagttttagacttttggagactcgagagatgaagagagagggaatgtctgatttccaagattgtttatgcataagacaattcttgaatattttcttggactttgcttcttaaaagacttcatcatggattagatgacagtgacattttaaatggaaattaaaaatttttaaatttgaacagatctgataagcagtatatagtgtgcagatgcatgaagtcaccagcaacaaaagtcagtttttaatatctgaaatcaactgactttctaatgacctgcttatcctcttgttctcttctttaaactcccataatgggtttataatgcctttggtctcctatctgtttgctctgagggaaaagcgtaaatgtcggaaacccatttggaatgccatcttgataaaaatttttaggttattttctcagaagtgatgttaggctgggtgagaaaaggataaggaaaatggttttattagtagcatttgattcttcaaaatgtacagcagcacaggaagggagtcaatttcctctttggagaaaaaaagaaaacaataaaaggaataatttcaaggcctggcaccctccatcttctgaaaccagagaacctcaagacatggaaaagcaagagagagaggattctttgtgctttcctctaaagatgcttcatctaagtcctcggctggctgtcagggcatgggttttatccttttcaggcagtaaggtgtggaagaaatcctgactttttctccactggggaacagcaccatgtaaagcaagcagcagctagtaaacaacatatcgattccttgacgagaggaagcctggtggtttgtttcccgtttattctaccctgctgtggtggtggtcgctaatgaacggtgttgtgcaaaatcacctactggctgcctttcctcccatccatgcaaattagtaaatcgctgatcaaattggctggtgtgagttggttccagaggaaaggggagacaagatattcacgtggctggagggaagggcccatagctggtttgtctggggaacagtagtctggaagtgatgttgactgccttccgatgtgtagacgatcttgactgcatcaaggaggtcctggaatctttttggagtttctatccaagctctgggaagggagggctccatgtctcaaacagcagctttgtgcctttgcttttgagtcattgaaccggcatcgattttggtgatgtctggggagttcttaagaccaggagactttgctggccaaaattgaggacagctcactctgcggatgtctttcttcttttaataattaacttgggttaaaaaaacaaagttggatgtctgaaatcaaatattttcttcacccttgttgctcaagaatcagcatgtcgagagctgaactgggcctgctgcggggagaactttgtacgaggttaggagtatagaatgtgactggcgcaagacaaccccaaccacacctggttcctccaccccatgtgtcactttagacaggggtgtcctgttaccagcacctgtgctgagcagaatagaggccttgttcagttcctccccaccgccccccacctgtgtttgccatcactatcctctttcctaagttctgcctaaaattagaactgctaaagggacttcttgaattccatggaaatctttttgtggttcgaagccatgtcgtgatattttccctcycatatcataggatggagaatgtgggtagtgggtccaacactggatagtgatttcaggattttttttttacccctcactgctttgttttggggttcccatcagaagagagatacacttccttgctgtttatggagggcaattgtgtagaaggccttttgctaggctctgcccttggagagctccttgtcctgtgggctgtaaacaggtaatatgaatccaatatggtggtcatgaaggaagggctgtggttcagcctagagaagagcatcagtctctgcaggagttcccttggaggcctcaaaaaaaragttttctccaggacagcactgaaaacccaaccaaggcctcagccaggtgctctgagggaggtgggctgctccctataaacggtgacagccaccaaaggcaggacaagcagagcacttgtaaaggacacatgggccccatgttggcttttctcttagcaaatggttgtatttggccagggttttacagcttcctcgttttgggcccatgggagaagaaggtgaagtaaagatgtcataaaatcgacagcaggaactgcctgggatgggtgcccagagatttaggacctcttctatgtagagtcatctttttggttttttgggtgccaattttgttgtttggaaatcgtttctatactggtttgagtgtttctttgtgaaaacccctccctatttagtttttgtgaaaaccctttactatttagtcaaaytttttggaacttctagcttgatgctgtgaacctttatgttctgaaattccgcagtttgtaatgctccaaatcaagagaagtcattcctaggtcctggtttgcatagaaggtaagctgagtttggattttgcctggttcagccattgcccagttcttactagagtaacatatactcattccgtagtatttattgagcatcagtggtgtttcaggcaccaaacgtggcataatgatttcagcaagtaaaaacgtagggtttcccattaaatttgcatttcagatatactaaaaaattgttcactatttaagtttgttccctgtgtgctatgtgttctcagttgctgacctcttgccctttgaactcttcttttgcacctcagccacagggaaaaggaaaaaagctaaaatgatgtctgtcaatttggctagcttacttaaggctgttaaaatgcttggagggtgaaaaggttgaaactattgattcattagatgctttatctccaatttgcatctcggctttttccatcttcacgggcatgggtggcgatagctggcaagattccttctgtagtgagaccatttagatgttcgaattgggtatggacaaatgaggtcactttgagttccccattacttctcggaactgccttcaggacacttaccccaaaaacccacacctctgcaaaaacaaagaaatacctcactccagaccaaacaaaagccagaggacagatttagctgcctaggatgtcagacaagaaatttgggggccatttaaagggaactaactgatgctgtgagccgtttaactcagatttggagatagcactgctgatatggccttattaagtagcaaacaggagaggaaaatgaaattgaggagtaaattaattggctgagcattaaggaagcccattgtcacgattgctgaggttctcccttgaattagcagtagactgcaggtttcatctgagtatgagccaccaaggcaaatcagaaacaaccgaacaaccaaaaacttaaaagtagcaattcccagtgcagaatccactccagagcagtccccgtctcaacacctggaagtcctaggcttggggctctctcatctcgcctgcttcccgatttgtttggaggtgacagtgtttttacctactgagcaaatgggaggatttgggttgtttaagattctctgggggctggacaagggcccttgtaagtctgtgtttgaagaagtggatgggctcaccaacaaaactccttcctgtgctgcctcttggcgtatctggccttggtcataggttctaagttgtttttcttttcctgtctaatgtaagtgggtgaaaaaaaaaaatcaattgagttgagtgccttttgaactgtgtgtctttttatttgcttgctttctctcaaagcagtagaaagtttcagctcactcagcaccagcagcttcctgggcatggaggtgggcagcaggttttgcctgggtcccctctgctgcctactatgcgacaggggctccaagggccgtgggaatgggtctcaccagaaggcgaggttctaggcaggtgtacctcatttggctgcatgcgtgtggttacagagcagggtccattgggttccctgggagcttggagatgctgctgcctgggccagggctctgatcagtgccttggggtacattcatggcattaagattttgaaaagcaccccaggtaattctggtgatgtccaaggctgagaatcactgagctgtgtaagtcttccctcaaagccttttctggtagggcgaggtgcctcacacctgtaatcccatcactctgggaggccaagatgggtggatcacctgaggtccaggagtttgagacgagcctggccaacatggtgaaaccccatctctgcaaaaaatacaaaatttagcccagcgtgatcatgcacacctctagtcccagctactcagtaggctgaggcaggagaattgcttgaacccgggaggcagaggttgcaatgagctgagatcacgccactgcactccagcctggcgacagaatgagactgtctcaaaaaaaaaaaaaaaaaaaaattagagttaaatgttaaataaactgaaacataaaaataaacagcaacaaaggattttagaatactttgccatgatttattgattctgtccgttgtgatttttttttttgcgaygatggaaattgttaaatacrtgagccactagccacgtgtgactattgagtacgtgaggtgtggctagtgcagtcaaggaattgactttatttttagtcacttttcatttgtttaaatttaaatagccgtgtatggctagtrgctaccstacggaacagttgcagatctgtaacatatcatctagagaattagagtgtgcctgcgttgcaacacagctttctatcttctaccttctgctggctacaacactgcccctaaacccctccatagaaattctggagctagagttgaccttgaagttaaaggaatctgactcaaatcccatgggcgagttatttaatctctgtaagtcttggtttcctcttccgcaaaatgggtctgatgaacctgataagagttgttggaggattctgargtgaaacattgcttgtgaaggttttcacacattgcctggcgaacgtccactcaaatgttagaagcagttactattctgtcttgtagatttgggaatgaggwattttgaagtcttaraatcagtggagtaattatctccaccacttcttaggcagacactgccccacccttatggagctgtatttagagcttgcagtgaagttgcaggaaatggagaagttgagtttttttcttgctaagtaaatcgcccctgagttcattacraaggtcagctggcccagcaggacctatttgcattctgtatttgcaaaccctactgtttgtttattagggaaggagagggtggggtccttggctaggacatttgtaagtcagatacattgaggcctgggggagggaaagttgctttattagggkcatcttttcccatctacatcctttgagtttcctcctttttctggggcaaccaccaaaagtggccatcctgtgcctctagtctgccctgtggcagcagcttcccaagtcttggccacatctgggttcttcccatgggccgaatgtggcagtcctgccttaaccttttgtgtgaggacacctgtgatttggccccagctaagtggcccgctatgtgtccagygctccctaactcggactcccaggcttccttgacacagcctgtgctcctcacttttgttgtttgtcctgtcctgtctctgccattgctgcctactgaaatctttctcatccttaggccccattagacagtgaccttattctctggtgcctccttttccctcaaagctcgataaccctaaagccatttttcacattctttgtgacattctacctagtattgattatatcctaccttaaaaagtggttatccttgggctttgaagcccggctctagcgtttcctagctctattgctctgagcaagttaagtttactgagccttgattttcttacctgtaaaatgggagaagaggtgaataatccttccctcttaaagttgttgagtattaaataagtaaaagtcgagggcttagcatgaaataagtgctaaataaatgctcgtatctatttgagccaccctagtaattcctggcagarcctcctgctgatagtggcactcagatgtttcaaagaatagaagcaacctatgccttcagtttgataatgcagtagagacaagtgcagtgcttttcaacattcaacatataagtaatttgagaggacacagtacatgtattcgtcaaatacgatggcatgtctactgcatgtcaggtgctgctggggggtggaggaacacctgtggacagtatagacagtcattgccctgaagtgctcagtctaggagacaggcaggcaggtaattagagttcagtgtaatccacaccaccatagagatcagcccaagattgtgtgggggctctggggagggcctctgattcccatttarggtgggagtacagagtccaggaaggcttttgatytgggtgacacyctcgctcggaactgagttttattttgcttattttaaaagcatttatatgcaaaccaggcactatgctaagtgcttgacacaaacttatttaatcttccaaccacccagcgaggtagtcttagtaactaktataattcccattttacagatggggaaactgaggtgctgcgcggttaagccatttgcccatgtcatacagctagtgagaagcatagctgggagttagttgagtccaggcagtctggctccagggtctgtgtgcctctccacaggactgggctctctctcgcttttgcagcctagcattttagattctgtaacaggtgtatttcattcatgtccttgatcgctctrtttgtaccattaggactcaggatgagacagataaraacacacaaaaatctagactcacctctgagtttcttccagaagctcaaggggtctccctctaattaagaggaatatgccctggccacggacatgaagttgttgggccaggccagtgcagtttttgggagcagctgagctgtgagatcgaagtgtgcaatagggttgtctaaggtggcagccacacgacacatgtttgttttgctggaggagcccctctgtcaagggtcgctccagtaaccactctgcaccccgagtgattgagtgcagagcaggaagcgggcagatatttgcagaaggaggctgggagagctcagggattagttcccagggagacctcccttttgaggccggactcctctcctgcagccgagcacgcagccattaaggaagtctttgagtttggtttaatggcccctctttgttttgaagtggctgtttactgaaccttcaaagcccgctcggcagcaggatgtgatcgagggcctgaataattggatgaggcaccccaataggaaacagggagcggggagcagagccaggactagccgacagccaagccctctgtctgagcctccgctggagggactgaggtcatcctgcaaccagaagttgacctggagcgggggtcccctggaacctggcctctttgatgttgtgctggccttaattaggaacaccctaattaagtcactgaggaggaagcttttttcttaaaaaaaaaaaattagcagatgttttgagagcatttcatgagggattacttctcaaagattatgtaagtaacgtaaagttaatggaagaaaaactagaaacttcagttaagtaaaaaataagtcacccacaagcgcttgatgagaaagtgggttatgttcacactcacaagrgctcgcacattttcagcaaagggtcagggagccaagactgtgtcagaaacttctttcttcacttagcggcctggcgtccttgcctttccgtgtgtgtagttgttagcagtgccattgttaatggctgtgtggtgttgyactgctttgtatttctctaattaattcatttggtcaaaacatayttgagaagctactagtaccaggttctaagtgctgggctctagcagtgaacacaatggacacaaatccctgccctcctggaacttacattctagtggagtgaggtgcagttgaaggagacacatggaataagtcaattctcttgtatagtaggattatgtgcaatggggaaaaagcactgttgctgtttttctttttaatttttatttatatatatattttttgagatggagtcttgctctgtcccccagaccggagtatgcagtggcgcgatctcagctcactgcaacctctgcctcccaggttcaagtgattctcctgcctcagcctcccgagtatctgtcccccaggccggagtgtgcagtggtgcaatcttggctcgctgccacctctgcctcccaggttcaagtgattctcctgcctcagcctcccgagtatctgtcccccaggccggagtgtgcagtggtgcaatcttggctcrctgcmacctctgcctcccaggttcaagagattctcctgcctcagcctcccaagtagctaggactatagacatgcaccaccacacccggcttttttttttttgtatctttagtaaagatggggttttgtcatgttggccaggctggtctcgaactcctaatctcaagtgatctgcccgccttggcctcccaaagtgctgggattacaggcatgagccaccatgcccagtctggtgctgtttttaagtagagtggttaggggcgggcctcgcagaggaggtggcgttagagcaacaacttaagaaccgtgaagatgtgggcagggggtgagggcagtgttcagtgcaagggaagagagcatgtgcagaagccctgargcagaagccagtacctccctcatttgtgtttaggttgcgtccagtttttttttttttttttactaattataagcaaccctacaacaagtacatccttgtgactagacattgatttacatcagtgatttcccccgaaggactttttatccttggtcaaaatgtgtgtttttttcaaggcttttgaaacccattacccaaagcctaccaaaaaacatgtctcagttcccaattcccatgtttgagggctcaccaccgtggattacatctaaaggagctagatgtggacactgggacctagctggcacccctgcttccaagggcgcaaagggacatgtggcatcttatctagtgcagtgattctcaaatcttgctgtgtgtaatttttaatgagcaaaagtgtccctggagaatgggttaaaatgcagattccctggctccatcccaggagactttttgttgatctgggggtggggcttagaacctgtagtgttagcaaacacttcaggtcattctctgataggtcttgctgggattccaccaggagtaggtggaagtgggagtgccccctgggtcacctgagccactgagagcttcctctgcagctcttgaagtatgtagggagctatctcccgcacatgtgtccccatccccgactccaccacagatatacttggaatgcgatcaggcagacgaaatgagttctgtgcctagrcagagcatgatctcgacttcctttcatttgcyaattctgtcttttgcagggaacgcttcctccctctttgtttcatttctctttgccaagaaaattcccatttatcctctgagaccgaggtgaggcattgcctcactctgggaaccgcactgtccagcactttatatctcgagtatgctgcccttggggctttgggatctgcagttccacatcagctttactgctagactgygttcctcaaygctttggtctctttctgtctatggcccacccctcactcagtgcctgcgcatagtaggtgcccattcrtggcccagtcagggtgattggcatcgtacattgagtcatcaaagcagagttgaattctacttgctagtcacccttctaaacacttgttgttttccccatcatcctacaaccatcatttgaggcagggactgccatcagtgtcctttacagatgaagacagggcagcaccaggtgattaaattacttgcccagggtcacccagtgagcacatctggaattggcaggctgactctagagtcatgctcttaaccactaggccacacaaggcttttcaggctctggaatatggctacacctcagcgccctctcgccaggcaagaaaaatgacattcaatggaaagacacttaaaaaaaaaatggctatggaaatgacaaacacagttatcactgtgacactggtggcctttgactctttactggctaccagggcatcgttcctagcagcctggggtgggagttgaggtcacagaggaggtgctatctgtctccgttccaaaggggaaatctgcttcgtggaagatggcagagcacactaagcgtgtatagcgcagcaaggccagtgcttgccccagggtggatgtgacaagttcatcatgctgcccttggctgcggagaggtctcagtttaaaagggaatatggattaaaaaaagtaaggaaaagaaaacaaattaaacaacaaaaattaaaaaaaaagaagaaagagaaaaagaaaagaacataaaaaagggaatatggaatgaatacagaggtatgtgtgtatttaggggagcaaaacctcaaacatgatcctctctagggtagagggtgtttgtgtgtctgttcagggtattggagagattggccccaagaggaactaatccctaaaatgcagaagcagttttggagttgggtagaggcaggtcagagcggacacttccagggaaaagaaatgggtgagtgtaaatggaccaacgtgaagtcacgcttagaaggtctaacatttcatagggtgtgcaagccactaggtgttttgctcaggttcaatatctaatgtggacatttatagacaggaataaacacatggagcaatagctttggcctctggataggaggacaaaggttagagggtagatatgtattattctggggaggattaagcttatacaaatgctaggtaaaagcagccagcccctgtattaggtggttaaatattgagttcccaggtttccagatgtggagaatcagtcagtcttaggtgaacccattatacaattttattttaaaaagaactgggcaggctgggagtggtggctcatgcctgtaatcaatcccagcactttaggaggctgaggtaggtggatcacttgaggtcaggagttcaaggccagcctgtccaacatagtgaaaccccatctctactaaaaatacaaaaaattagctgaacatgatggcacactcctgtagtcccagctacacagaggctggggcaggaagatcacttgaaccctggaggcggaggttgcagtgagccaagacagcaccactgcactccagcctgggcaacacggcaagactccatctcaaaacaaaaacaaaaacaaaaacaactgagcaaactcaggagcaattaaccattgcttaggagcaaataacagttaatgcagttaaccgggcgtgagggcaagcccttccctgactttgggcaaattacttactctttctgtgcccgattttcctatggttagtagggaagtgttaaatgcctgttctaccagctgccctttcagtggtgttttgaaagacctctgtactctcgaatacagcatacatgtgaggcggtgccttcagtgcccatcatgacgtcagtttagattcccacatggcaggttttcacctttgaaaacttggccatacaaatgtcaggtggctgctgatgcaggcagtgactaaccataaacctcttcctctctcttttgatgggaggaactatctgaaatcataaaggaaatgtcatggccgtaatggccatggctcttgcttgtaatcccagcacattgggaggccaaggcaggcagatgacttgaatccaggagttcgagaccagcctgggcaacatggcaaaacccatctctactaaaaatrcaaaaattagtcgggtgtggtagtgtttccctgttgtcccagctacttgggggactgaggcaggaggatcgcttgggcctgggaagtcgaggcagcaatgaggggcctgggaagtcgaggctgcagtgagctgatattgtgccactgcactccagccttggtgacaaagtgagaccctgtctcaaaacaagaaaacaggcagggcgcagtggctcatacctgtaatcccagctctttgggaggctgaggcgggcagatcatctgaggtcaggagttcgaaaccagcctggccaacatggcaaaaccctgtctctactaaaaatacaaaaattagccagacgtggtggtgcatgcctataatcccagctacttgggaggctgaggcaggagaatctcttgaacctcatagtcggaggttgcagtgagccaagatcacatcactgcacctccagcctgagtgacagagcaagactgtctcaaaacaaacccaaaattggggaatgagttgaatttaggggatgaaaaaggagagggattctatttttcaagaaatgtggagcatggaacacatacatacattttacagtggttaaaaaatagaaccaaaaacctagctgtggttgtagagcaccctaagatagtgaagcccttaggggtgccgttgtggtggggtggccattgctgtccaatagaactttctgcagtggtagagatgttctgtgtccatgctgtccagtacggtatccactagccactgcagagcacttgaggtgtggctagtgggctgaaaaactgaattttaaattttatttaatcatactttaaataacctcatgtggggctcccctgttggacagctcaggatagacaaaggaatacttcctggtggaaaacttaagaaaatgacttggaagatatggttgacatatttgtttggttatttttattttaagtggagacacccagatgtcagaaaacagcccgggcatccaacctagtaatgcgggaggaggaaaagcttgatatccttgatttgtttggttagggtgttaatagttacaaatggagcagtttgtaaggggagatggacggatggacagagggagcaccttttgtggttcagtcttccttttcataggcatatttattgctggtgtgcttgggcaagtgggtgagggtgggcgggcgaggaagcaaccattgattatccccaaggctgtcatccgcttgatggacagggataattagtggattaggcaacccccaatcagagaataaaagcccaggaatggtatttatgatggatgggcttacccagtgcctttcatctgaggatcttaggagcccttcatcttgcaggattgggtggggaagggtggttttggggacaaagctatgacaggcattcatgggccctgtctgtcatcccacacgcccacttctggaagctgagcggattcttgcctcatgcttgaagaagcagggaggccagagccactccagcgtaggtcagaaggtgccagcctcctctggaagctgcgtaaagcagcttcagggtaacctgaaggctgagctcatccagggtatacccagcggaagaagaggaaggatgctgttggctatgttcctcacactcgccctgctgaggtctccgcagacctgggaaggggtcatggtggcaggggtggctgtggcagctggagatttaaaagcccctcccagattgactctactgatctcctggtagaagaagaccagtttgtgtgttcacagaaaaccaagatgagataaaattatccataatcataccacaagtgccaacagctatgaacctcttggtgcatttctaccaggcatttttctacccactctttgttgtgtgtttcatgttttcttcctttttttttttttttctgagacagtctcgctctgtcacctaggctggagtgcagtggcgtgatctcggctcattgtaacctctgcctcctgggctttagcgattttcatgccttagcctcctgagtaactgggattgcagacgtgtgctaccatgctgcactaattttttgcatttttagtagagacagggttttgtcatgttccccaggctggtctcgaactcctgagctcaggtgatccatctgcctcagccttccaaagtgctaggwttayaggagtgaggcactgcgcccagcctcgtgctttctttttcatgtggttgggggtcctgaccatttccagggtggtattacaatccctctgggccatctgcagttgtaatcaggtgccatgtgtgcagggcacccttgtcctcttctgctctaccttgtctgggctcttataggacccacatgtaaagcgcgacccaacctgctgtctaagccactctttgcagccctggggctgggctgggctggaggctggctctgttcatgtggttacttgcacttcccagaatcagggaacacttgggctgcaaagtcagatctggcatcctattgcaacctggagctctctgctccaacctctctgggcatcagtttcctcagctctaaaataacagcagcacctgcctgcctgggctgctgtgagcatgcagtgagaatgcaggatcaagctgggctccttagagagtggtctgtggaccaggagcagcagcacctcagattaaacggccccacctccaccaagcaaatcagaacctgcctgtctgcaagctccccagatgatggatatgtaaattacagcttgggaagggccagtatatatacctggcacctggcaactctttagaaagtggtgatgcttcatgatgatggtgatgacagtgatgcttgtcaaggtgaacagagatacttgggaagttacctggctggtcatataccccacggcttgatttctcagccagatccactggtgagccagcctctgtctggcaccttttgggcagaacaaaggcctttgagctggaaccccactctctagagcctctgccctcctggttcctacttgattctcccctgaactgaattcttcctcctcacgtaagtcctccccagctctgtggctcctcccaagttgccctttctctggcagttcccggcccctgtgttccttgtgtgrcagcgtggtgttgaattccctcagctgtcccagtggcgctgggctgggagaggcagttgctgcattatttatggagcaccggtcaccagccgtgctgatgagctacacacagttattctctgcaccatgtgtgggatgccgtcctgggcctctgttcaataggaaacaaaacgaagccaaacaaccctaagccagaatggctgttggccgattgctgtgccttgctttgtgttaggcaaatggcctgccatgggtcctggctctagggaaagtggaggaagaggaggaagatgaggagaggcactcggcggtgtctcctaagctccactttgagggtggggtggggagaccaacttgtggatttgtttaggtggccaccaaactcttcagttgaaggagatttaggaggcctttttcctaaaaactaagaaaatgacttcattattttcctctctctcccaggaactagagtgatgccaggtatgtgaccattagccaggttctcccatcacctgtctggtctggaatttatgtcactcactgtctgaatgaaggccaccccggtcttcctcacctgtcccaagtccccaccctgggtcttgccctggaaggctgcccttgcccacctgggccacttcgcccatgtcctgcctggaggagtggccagcataaatgtgtcactccagtgtcccttggagagagctggtcagtgttccctgcctccttttgtgtcagctgcaccccctaccagaagtacttttccttcctcccttcatttctcagtccttgttccacagtccaaaggggaagccctcaggcttatagacagcaaactgtatgatgtgataagttggggagtaggtgcagctaaaccagagggtaggtgggaagggggtgtgtcagagaatgttccagaagaagtgtcacagctgggtagtgacagctgaataggagttttcaatattgctgaatccccctggagatttgaagagaagcagccacagggtgtggtgtgtgtggggagtgtgggtgagatcacgtgttcagggaagccccatctctcacccaaggaagtgatggagggagtcctctttacacgcttgtaaacaaactggctttctcttcccgtttctttaatagggaccttttcctttcttagaacccagtgtaatctgagttgtattttcaacgaacgcactgccaagggctccagaaactcctggctctcctctctgaagaaattcagggggctcctggaggaggtgcgccttctcattttgccttgtgactttggacttggcagaagccggggcgtggcgggagttttgttttctttgatttgggtctgtctggaacgttgtgaagcctttatgtgttctcaggtgaaatccacagtggggtctgtgttgaattgttttcacggctctgggagtgcattccgagggatttcctcaaatggggacagagctcagccagcaacctcaggaatgaactttctggggacttcttggtgggtggatgcagatgcaaaaaccaaggacagttggggaattgctttctaaagggctctaagagcttccagtgtcttgggttgcgggtttcttttgaaacttgagtatggtctcctttatgtagtcttgctgtccaaaaggcaggactttttctctgctgyctttcaatctttctagttaccttcttcctcctttcttacttcctctaagcttgaattattatagtaaaactgctctcaggtgggtagaaacttcttttttccttgaaagaaacttacaaaaatatctggaacaacccaacatcactttgcctttaaattttaatgacatttactcactttttttttttttcatttctcaacaaggaggtttttgtcttctgttcttagaagttgattttttttctttttttagaatctattaaattayatattgcctaaaacaggtgggcctgactctctctgatagactgtcaagtgtcattaagtcagcagcaagctactttgggcaaccttctggctgggtggatgttcgtaggtggggagctgttagctgtaccccttgactagaaaggggacccctccttttgttgctaatttggtaaagactgaaatgacgctccaagtgggggcagataagaagtttcttcagtggtttgagtagtcgtctttttcaggcacactcatctcagggttgagtactccaccctgccatttgcttagcagcagcagagaaattgtctggcactgaacacccagctgcctttgccttggtctgtttctgcctaaccctggtttactaatagggagatgcagatgcttcccatgttggctggttccacaccaggtactctaaaaggggggttccagtctggatggacagtctgacttagactttacagtctgtcccccacacatcctaaaggagattactgagagcctgtggccacttggatccctcatatcaaatgtttgttgagcacttccagtgtgctgggcactgcaccgagcactttctgtatatgacctcattcgttcctcctctcagccctgtgaagatgtgacttaaacccatgcagaggtcaaataacttgcccagtgtcgcatagcaaatgggagagctaaggttcaatccaagagattgggcttctgtacgtgcaatctttattcatctccttcattctttcaatgttcaataattgatggtattggtaatggtgatggaattatttgttttggttatcatcattataagggaatgatccctgagaagtgaaatgatttcccctagtccatgactggcagggctgtgactagacctcaggacccagtgctccctgcccaggccactggccagttctgcatgttctcgatgaacatgcctcaccttttcctttggctttgtttctttgagacagggtcttgctctgttgcccaggctggagtgcggtggcacaatcacagctcactgcagcttcgatctcccgggctcaagggattctcccacctcagcctcctgagtagctaggactacaggcatgtgccacagcacccagctaggtttttttttttttcttttgagatggagtctcgctctttcgcctaggctggagtgcagtggtgcgatctcggctcaatgcaacctccactttccgggttcaagcaattctctgcttcagcctcccgagtagctgggattacaggtgcctgctaccacgcccagctaatttttgtatttttagtagagatgggtttcaccatcttggccaggctggtcttgaactcctgacctcctcatccacctgcctcctaaaatgctgggattacaggcgtgagctaccgtgcctggcctggtgttttttttttktttgtttgtttgtttgtttktttttttgtatttttagtagaaatggggtctcgccatgttgtctgggctggtcttgaactcctgggctcaagtgatcctcctgcctcagcttcccaaagtgctaggattacaggtgtgagccactgcccctggcccacctttttcttaagaaatactttgatcgtcttaataatatttctccagggctccctggatgggagtgtttggtgtttgggagaggagggtctggctctttggtccttcttccttgtgtagccgagagatggtggcacctttgcctagaagtaggtgagcagtgtttctgaatgctcagatttctcagaaagcttttcatcgtgtcttgtggctcagaaagagaaggaatggtcggacgaagctgctattggttggttgagcctttgtgttcttagaggtgccaactgctgtccctctggacagagatctccagtggccatcctgaggactctgatcttggccctcatctctttaattggatgtaggtgtacaaggggtgttcttatctggactggattaaaaaaatggtatgtatgttgggtgtcataattggagtccccactatgtcttgatgggccttgaatgatagcctgagctctcacaagttttcatttgacataaattaatatacagttctgctcttgggtggaagtaacccccagggcacacacttgggatggaggtcatgtcgtgacaagaccctcacacaggtgttggttgacagtagctcaggtgtagctgccaaagggcctctgccaggagccagccagacacgattcttgcccggctgttgcttagtttcccataggggcaaattgccacttagaggaataaatccagaaacctgtgcttgagccaagcaggtctccaatgcatgaaggcagaactgatgaatgtggtgtagcagcatgcgtgaaacagactttagagttcgggtggattgtaaattcatggtgctgttgttgccagaacctctaatttgatcttacgttttaaaaaatgcaatgactttattgttttcattaaaatgatacatgacccttataaagaaaactcacaagactccagccataaaggaaagtacaaaggagraagcaatacattggtccagattttaactcccagaagtaacccgtattaatattttatagacaactttccagatatctcttatgtacattttcagacagaattgacagctagggaagtatataaatagacgattctataacaaggtgttccttgttataatgagtgctccttgttataatgagtgctatgcatgatcttttgaaaaaatatacttaattgtactttcatttaacagaagaaaatgaaactgaagtaatactgtaattgtttcttcaccactttctttaagttgatttctcagatgtgcctttaaggcagtggttcttgactgggcgtgatttttgtcccctaggggccatctggcaatgtcccatttttggttgtcccaaatagggggtgggggaacgctggcatctagtgaatggaagatagcgatactgctaaacatcttaaatgtgcaggacagccccccacgacaaagaattatctggcctcaaatgtccatagtgttgaggctgagaacctgctctaagggtaagaaaaaatgatgtttaataccattaggaaggtaaaactgttaatgttttagctgggttgcagttttagacagttttaattgggcttctgtcatgaaagatgagttgattaacctcattataattttttcctcctttcctgaacaagaaaatcaagaggtagcatatgttgtttttaccttgtcagggttcataacatttacrctctgttctgcaaaaataatccccaggtgtttagtcttagttttgttttgttttattttattttatattattttattttttgagacrgastgttgctctgttgcccagtctggagtgcagtggtgcgatctcagctcaccgtaacctccatctcccaggctcaagtgattctcatgcctcagcctcctgagtagctgggactacaagcatgcgccaccatgcctggctaatttttgtatttttagtagagatggggattyaccacrttggccaggctgatctcgatctcctggcctcaagatgtctgcccaccttggcctcccaaagtgctggaattacagctgtgagccatggcgcccggcccttagttctgtacttaaatgatcaatgccaaataccacttctcagcccattgtttccccctttctgtgttgattttgagtcacctcttggttggtgggctgtgtgatcttaatataaatttaacatgtgtaggaagggagacgtcggtccctgcctgctttgccctgtcagacttgcacctgcagatttgagtttgtgtctatgcaccacacttagaggaagagtagagagacacgmtgagtgtctctgggatgcagtcagggtgtgaagcagggtcccggggagaagtggggttggatgtgaaactggattttgaaaagacttccatgtggaagcaggattattgatcttaactgagggctcccagaggttagaactagaactacatgaacatcaaggacagggtggctgataataggctgggaaggtgatgagttccctgttagccgaagtgtgttggggaaccacctgttgctatactgtccctaggtgttgggcttaagccatcagctgagctgctgcattaggtaatttttcaatcttgagattctgatagtctaattaatgctttctgtaaccacctgtcctggggaagagccccagtcactctggttccctgcttggtgttgtttggggcaagtgggagaacagccagggccatgtttcatgaacaagtggttcagggtggagctttaaatgttctgtacaccttaaatttggacccaccatctaccaactcaaaagtgtatgtgtcagattctgccaaactagttcagttgatgtttgtagtatttacaagattataggaactgagcacattctaaactgattcctgagccaatacatgtatatagaatccgggaaacgtattgcagacctgcaaaggaagagaacatacacagattgttccctgcatgattggaattgggtgctctgttaatgtagtaatcagatgtctatcgcagtgtgacttactgatgtctttgatgtgttgcaggggagctatccagtttgggaagatttcataaacaaagcaggaaagctgcagtcccagcttcggtaagtagaagcacatgttctacaggaaaaggacaacatcctcagacaaggatggagtgggacagaccaaaatgcagattgattagggttgattcaggaagtgctgcagatagggaagccygtgctgggttctgattggagcatgatcacctatagccatatatcctgggccctgattgccatatgtaaaatgggactcattcatgtctgctttcctccttccataggaattttgagagtcaaatgaggtaggtactgtatgtaaggtagcaacgggtaacatttatgtattgctcactatgtgccaggcatttgttaacttgtttaaatctcataaccccacaaggtacataccattattatccccattttactgatgaggaaactgaggcacagcgaagttaaataacttatccatagtcacatcactactaaatggcagagcaaggatttgaacttaggctctctggctccagagtccatgttctcctccattctgcttactgcctctccacaaatagagtttaaaacctcctgttggctgggtgtggtggctcacacctgtaatcccagtactttgggaggcccaggcaggcagatcacaaggtcaggagttcaagaccagtctggccaacatggcgaaatcccatctctactaaaaatacaaaaattagctgggcatggtgacgagtgcctgtaatcccagctacttgggaggctgagacaggagaatcgcttgaatacaggaggtagaggttgcagtgagccgagattgtgccattgcactctagcctgggcgacaagagcaagagtccacctcaaaagaaaataataataataaaataaaataaaaccttgtgttgactattgtataattccatttacatgaactatctagcaaaagcatatctttagagagatgttgatcattggttgcttggggatagggtgaaaaaggagagtgagaagtgggtaagacagatcttttggggtggtggaaatgttctaaaattggattgcggtgatgattgtgcaactccaaatttactaaaaatcattgactcataccctgaaaaagggtgtattttatggtatgtaaattatgcctccgtaaagctgcctaaacaagatccagtgctgagctctaaggggctgtgattgcctagtctcgtgcttgttcatatatcatgtgatatgaaatagaaaatacgttggcatcttcttattaaagctctacccttttaaatcattgtggtgaagggatacaatttcacttagtgggtgcttcatgaaggataggacattttaaaaaggaattattttgatggccctggttcatggcatgtaggggatgtcattggttggtttggatggagkaagatggttcagagagcggggcaggcaggggttttccaggatawagagccatgtggacgacagagaggtgggagagggatgatgtgatgctctcgggcctttgcctgtggacaccaggggtcactgcccagagtgttagccataggactagagtgtccatggtgccctatrgactaaagaacttgggaaaggtgggccttttttctttcattccttcagctttgtttggagcctgggatttccatccatgaactgcagcctcagatggacagtgaacttggaatactgcaccttccccagttgtcaagtcctgtacttaagccctgcttaagctcttgtaattactttctactggatcagatcccacctcccctgctcaggattcagggctcctcacctgagtccttcaccagcctcaccttatttagccatatctactcccacctccatgtctgccatgattaccatttattttaggtagcttcatctttatcctgtgggaggtctcctcctatagtaatacagtaaaacatttaagtacatttcccctacttttttaagattcagcctcatttaaccgtctggcagtctttcagrgtagaccaagaaaattgttatcttccccttttatcagtgaggatcttgaagcttaaagtaatgaacagatcagctgtcttaaacatataaagtaaaatttaaagtaatcttaacctgtccttactggtacaggatacattttatattattaaacaatgttttgtcctgaaggcagggaccatttctttattattttgttaaactaatagtacagggctgagagcaatataggggcctcatgcacatagtttaattttgtgtgttagagaaaggatgaagtttagattgcagaagaggcatagaagccttagtttatttaagctgaatcactcctctgtgtttctgttggtyacaagtttgctctgccccatcaaagagggccaagatgtcttgtgactacagcggacagtgaaatatgactgccatttaaaagcctcaaacttgatcacccgcctaattttcagtggagccctggtgactgtgtaatatgcaagacacctctgcagctggttcattaaatttggatgattggcattgagttggatgagaataaatccagccattgtgtcagatattaattgtaaatcagaacaagctatttataartcccaagaagtttgataaagctaatttttccagggtttgtgtttgwtgtcaactctttaaaaaatatgcttcaaagtggttttgtgtacatgtatgtcattatttttaaaaattttgagcagaatgttttcttgccctactggaaaataacaggcctcattttgaagtttggctgtaagggactgttgcctagattttcccaggaactacttccagcaccttgcaggaaccttttgtttcaaaactactgttgctgatgtttaaaggccattcctttccctttttctttcttttttcttttctctttctttttgagagagggtattgctctgtcacctaggctggagtacagtagtgcagccatggctcactgcacccttgacctcctgggctcaagtggtcatcccgtctcagcctcctgagtagctgggactacaggcatgcaccactgtgcccggctaatttaaaaacaatttttttgtgtgtagagaatggagtcttagtatgttgcccaggctggtctcaaactcctgagctcaagtgatcctcccacctcagctttccaaagtgctgggattacaggatgagccactacagctggtttcatttttctctattttgaaatcttccctttctagtccttattgttattcttcttcagcaactttgcatccttaggaacgctcagtaaaggctgagttatataagaaatacttgaaaattaacacttagttacaagtttgattgtaaagtccttgaattctagttctggggcttgtttgtgtggaatccatggccctggcttggagtgttgactacgctgaatgatgccttaggtcatgactcttggaaccagtagaccacagagggctcaaggcatcctatggtgtccaaaaaaatattaagaacccagaataatttctaggacataagtgactatagtaccttctccccattctcaccttgtaggaatttggaagattcagttgaaatagtgtcctaaggttgaaacagtagtatctcagtttcattataactaggatctagggagaaaagtcacactgccaggatcttgtcttatagtgggtcaagcccaagcctgtgagtcatgaggctgggatacttgtcccagctctagtatgaactagggctatgtttgtggcctcgtatttgtggcctcagttctcctattcctaaaatgaattgtttgaactacatgatctttctaccagattccttcccccaactgatgtgcatatatatatattgctttcctactccaaaattaatttcacctctaccacttatattttttaatgttttatttttccttttaggtagaaatgcctctgttttcctcctgtataaaaytttgcctggtagtaggtgtttcttttttctttttttttttgaggcagagtcttgctctgtcacctaggctggagtgcagtggtgcgatcttggctcaccgcaacctctgcctcctggtctcaagcgattcttctgcctcagcctcccaagtagctgggattataggtgcataccaccacgcctggctaattttttgtagacacggggtttcaccatcttggccaggttggtctcgaactcttgatctcaagtgatccacccacctcagcctcccaaagtgccaggaatacaggcgtgagccaccatgcctggccctggtaatggttttatacagtcagatgaaatggaatgggaagggctactagcatttattgattagcaccgaatgagctggatattattcgggtggagtacttggaaaaaagtgggttcagcaagacagtggttgtccatgctcagttgagttatttctggaggaaggttacatgtacyccttagcagaggttttaggccttgagctgtaatgaatttgctaggragagacattccttatgcttttgttatctgtttgcattttaggacaacagtagtagcagcagctgccttcttggacgcctttcagaaagtggctgacatggccaccaacacacgtggtaagcagatggaggctgactcccagtgttaactgcattctgcacgtggactcttccccttgggtggctgcacaagaagatgcagcttaagttatcagagctgagctgactcgtattttcccattttttaaaactctgtgggattccacatattagaagttgcaactagttttctggataataaagcacatgtgaagaagaatgaaaaaggaagaaaatgaaccactgtttctgcacragttggcttgatgggttctttgatcactttaatgacgtgctggttgttgaaccttgagctgtgcctttggttgcaatttgcgttttcctccttacgtgggttttccttgtttccttgtggaatgggaagcagtagggatgattggatagaccatttttctgagtttccataaaatgaagaacccttttaaaataaggatctcattgggttgtatctatttatgygtccctcatatttgactgcaaacctgttgagatacagactatgacttattcatgtctgaagccccaaaacgtagtgcctagaacataggagatgtttaaagtatgtttattaaatcaatgaaaaaaatttaatggcttcagcaagtactgaatcatataaaagttattcataacatgtgaaaagtataaaaagaaaatgaatacccccgtatgcctgaccgtctttagaaatgcaacattatggtcaggcgcggtgggtcatgcctgtaatcccagcactttgggaggccaaggcaagagatccgaggtggatcacttgaggtcaggagtttgagaccagcctggccaacatggcgaaaccccatgtctactaaaaatacaaaaattagccaggcgtggtggcacgtgcctgtaattccagctatttgggaggctgaggcatgacagttgcttgaatccgggaggcagaggttgcagtgagcccagatcgcgccactgcactccagcctgggcaacggtgagttgggactctgtctcaaaaaaaaaaaaaaaaaaaagaaaagcaacacatgcaacattaccagtaacagacaattaccctattcaaagggaggagggtgatttccttttcattgcaatgcagctactctcttctgcctcttactttgccttgtctttctgggtcttcttgttgtactggcagctataggcctgttcttttcattgtcgtggtgacattggaaaatttgggttgtagggcaagtgttggggactgctcccaggcacatgaaagtttctccgaaccacctgatgggtaccttcagtgcaatgatactcattcatcacaggtgcttaaaagtatttgaatgaatttgcagcaagaacccttctcattcattgaacaaactccttttatttcaggcactatcatgggaccacaaaaagcaatatgactctccttgtcctggagcggcttacaattgagtggggaaaatgagaagtataaataaagaatttcaacatagaaactatatgtttggtatggtaatagttgtagaacaaagtgctaggggaatatagaaaagtgagcaattaactcagggagtgaaggagtttttcctaggggaggtaatatttctcctcatttccgggatgccagcagggttttacagcattcccttggagaatgtgacacagaaactagaagcatggtttcttcatccagtatgtcagcttggtgtggatcttaaccagtatctttttaaaagtsctttaaaaaaattactccatagcttatgtgtgtctgttatagaaacttgagaaaatacaaccgtagagaagaacttaatatgcaaaccattgcagggcctatagtattgcattttatattttcttctacttcagcagtatctggaactggacttggcagccatatttttatctttctgtaatagccatcagtatagggttttttttttgtttgtttgttttttgtttttttttgagacagaatctcgctctgtctctcagactggagtgcaatggcgcaatcttggctcactgcaacctctgcctccccacattcaagcaattctcctgcctcagcctcccgtgtagctgggattacaggcatgtgccaccacgcccgactaatttttgtatttttagtagagatggggtttcaccatgttagccaggctagtctccaactccttacctcaggtgatctgcccgcctcagcctcccatagtgctgggattacaggcgtgagccaccgtgcctggcccagaatatgtctttttttttttttaagctgctctactgttttaaggaacttagatatctggcattgcatgtttgaggctctgtgataataatgtttttatattttaatgtttaattcttggatggatcctgtagatggactggaaagagattcccagattgtccataagttcctgtagtgggaacctgggattctgaagatgctgctcccagaatggttcttggcgggacactgcagggcctggaaattgtcatctttgaagggaagaaaaacagccattatttgtgcaaaaagaaaccaaagagcctcactgcagaagtgatgggggtagagtaggagtttggaggtgatgtatttcaccaaaggcaaataatctcatagtgaacaaactcctgctttgacatttttttttctttttttttttttgagacggactcttgctcttgtcacccaggctggaatgcagtggcacaatctcagctcactgyaaccttcccctctagggttcaagtgattctcctgcctcagcctcccaagtagctgggattacaggcgcccaccatcacgcccagctaatttttgtatttttagtagagacagggtttcgtcatgttggccagactggtctcgaactcctgacctcatgatctacctgcctcggccttccaaagtactgggattacaggcgggagccaccgcatctggctgctttgacatatttttagaccatgggatttcagatcatttttagtgatgccaggatactttctgtttaaaatccatacgtgctactattttcattgaatgtgggagtgtgagaactctcaaataacctaaaagtatatgggtgatagaaagaaggtatattttacagagataagagaaactcgaatgtccttcttagtaagtgtcagaagtgacttttattaatttttacttaaaaatttaaaaaataggacatgctctttagtttaaaaaattgaaataagtaggctgggcgcagtggctcacacctgtaatcccagcatttgggaggccgaggcaggtggattacctgagatcagaagttcaagactaccctgaccaacatgttgaaatcctgtctctactaaaagtataaaaattagccaggcagaggagtgggcacctgtaatcccagctacttgggaggctgaggcaggagaatcgcttgaactcgggaggtggaggttgcagtgagctgagattgcgccactgcactccagcctgggtgacagagcaagactctgtgtccaaaaaaaaaattgaaataaatatataaactaaaatttatcctccccacttccccgcccctcccgggaattgggtttagtgtcatttacagatgtttttgcatatataaacaaacatgctgggaggaaaaaaaaaaaacaacactagttttccacaatatgtggaatgacacatggaataaaatatamctgtgtgacctttttcagaaggtagcccctaagaaacattgttctgtgctttttactgcatagtatattatagttatctttccagtacctataagtccaccttattctttctagcggccaaatggaatttctgaatgtagcactgtctgaatatagcacaactgagtcattattctcttgatagatatttaggttatctccaggtatttgctactacaagctctgctgcaattaatgcccatgtatatatccttttggagtcctacmagtgatctatttttaatgatgtatggatcaccaaggaaatgataatctgtaaaragtgcttcaagctgttttggtcagcagcaaatagatttgggcttagggttggtgtaggccrtgactctaacagagtttgtggtttgatatctaccttctccagaaagaatatccttggttactcccttgcttacagcctttacatgtatttttttttttttatccctcttgatggaagtggtaggagggaatkgcagttatyattaagtgcatctcttctgggcaagtgcycagcatttcaagctagcaggtcgctctggtttccaaaatattagcatctcatattgtttccaaaagggaacagctctgagtggtctttgtcctttataggaaatcttttgcactagctattaataaaatttacttaggaaaaactttgaatactagtcactataagagcaaaatcaatctagttgttatgtacctattgttaaacagaatgtggaaatatgttagaacttaattgctttcattttttttaaatgaaagtgtataagtggatattataatgtgtatatttgggttaataattaaactataatggaatttcagtttattagcactaggcgcagttccatattttgttgattttagactctggatgaatatacaatttgttttaaatatgaaagtaygattttctgtattattgaacacaaagaattggtttctaggtatctggtagacttggaacccgaggctttgtggagcagggtctctgcttccttcacatccataatggaccagcacgtggctattacaggagctgagaaatatttgaactgagtggcatgcatttgtctgggctacttaaaaaaataagaaaaggaaaattaaggaaattaagaaaaagatgrtaagtacctaccacataggctgtggtgagaacaaaaagacttaatacacatraaccactcagaacagagcccagcccatggtacacattcaataaagcctagctatcctgattttcagtcttaaaatcatgcctactttttagggtaacaaatttaagattctggacattaaagatgatctagtctgcctgggatccatttccttccttctgagaatctgaaatgccttcctcaggcattggatgtattaycatctaaacttccctgagatggttgttcaaaaccatraaagtaattacagaggcagatgaaaatgagagtcacacaacactgctcttcaaaggcccttgctgacacaagcagatggcacagtggccgggatgggccagtgctgactaagagggagtgtgtcgtccgctctgtactccgcgcaagtccctgatgtgtaagggcacaggcttacaggcgtacgaattttattccccattttgatcccattttgattctgaatgcattaaaaaaaatctgtgtagcacaaaaaataatctatgttgttgaaataacaaaagtctatatgcggtagktagaataacaactagcttgggatctgggatrcgtaggtttgacttcgtgcctttgcagctatgtgaccttgagtaaatatttcccttctctgggcttccattttcccacctataaagggcctaggagcctagatcatcacaagtaatttttttttggctctaatattctatgatttaaaatcttgccttggttctyattagctatgaatgaagtgtaaatttccttttctatattatctttagagcttccaatttttgctctgagtacaaaggaagtggaggaagcaagattaagccaaagataatggagagagaaggttagaagagaaaagrgaaaattacagatgggcatttgggttgaggycccctctcagacttggagtgtgtgtaggaggaaggcaggtggacgccggaccttctaggacaggcatcraaggctggtccatcagacatgcgctttaatcagtgagtctggatcgccgaggttggtgaagcatgttggtgaagaaaattgctgatggcttagttcttacaaatgtgttacacatttgcagtacagattttggtaaatgccatggtctccagatctggcattaggcatcacagtcactcaagaagttcactttaagggacagatttcaaggccctgccactcccatggaatcagaataactgggtgagacccaggaatctccrattttgaaaagctttccaggagatgttgctctccattgaggtatgtttgtgctgtcctgtaaagcctcttgccatcttgccataacccacctgtccgatgacatctccccacccatggccggcaactgcacccacaaagaactgctcactgttttctgaaacccttaaaacccttgatccctatcygctggcacatgtgcattccaggcccagaatgtcctttccagccctccccttcttcaccctgtttgtatgcttgaggatctgctgcttgtctcccaggagtttaagagctgtatcacttgtgagacctttgtcttccctcaggaagtaaactgggtccttgctcagggcctcgggggacatgctggggtcagaggattcccctagctgtgctgtcactatcttccccaccagattggagacacctctaacaggacctgctccttcctgaggaactcactttcccagatgctgagtatctggccttcagcagggtgcagacccatctgctgaatgaacgactgcgtgcaaacagtagcttccacttttatgcagccctcatggatcctggtgggaagcccgtcagttctcgagcaaggggctgttgggatggggtcttggcaggattcctccctggagttcagaatttgaatcttggtgacccctccctgaggtcaagtctctggtgcaaaggacaactgggtagaaggcactcaccctgcttcatggatggagtggaggaggggagggaatytttcctctgaggggagaaggtgctgggttgtttgggttcccagctgggttgtttcctggctccagccagactgctcttgtttgctcctgagttttattttaaccagattgtttaattgagacttcactagcctttaacttctggattgcctttggtgttcaagcccagaactctttcgtgtaattagagtcttactrtttctacctagcaaacttttttttttkctttttaaaaagattgatgcatccacatgttatgggggcacatatgatactttgataaattgatataatgtgtaaagttcgaatcatttgagaggccgaggtgggtggatcacttgatgtcaggagttagagaccagcctggtcaacatggcgagatcctggctctactaaaaatacaaaaaaattagctgagcttggtggcgggcctctaattccagctactcgggaggctgaggcatgacaatcacttgaactcaggaggcggaggttgcaatgagccaagatcatgccactgcactccagcctgggtaatggagtgagactctgtctcaaaaaaaaaaaaaaaaaatcagggtaattgggatatctatcacctgaaatrtttgtcttcttattactacttaccaaactctttagcctcaaactgaaaacaattttttttcaaattaaaaacatcatataaaaggcccttcttttaggtctggaactgaaaattctttgaatattaccataaaggaatgtagtcaaatttcttcatttgattaaaaataaaaaggtatatcagccggatgcggtggctcacgcctgtaatcccagtgctttgggaggcaggggccggtggatcacttgaggtcagcagttcgagaccagcctggccaatatggtgaaaccccatctctactaaaaatacaaaaattagctgggtgtggtggcgggcatctgtagtcccagctacttgggaggctgagacaggagaatcacttgaacctgggaggcggaggttgcagtgaaccaagatcgtaccattgtactccagcctgggcaacagagcaagacttggtctcaaaaaaaaataaacaactcttgaaaccatctaaactgtatatatgtgtatgtgtttgtgtacatgtatgtacgtatgtgtatccatatactttttatattgagcactttttataatctcaatcttacataaagtacaaataaaatctataaaaatgattgctatttataataataggcaacatagctaaaaactgtggttattatgtaagcatawcttcaagataaattttccagctcctaagccctcctatacacagattttagagctgccattgccctagtgggaggtgatgtaaaaaaaatattgttttaaatgggtttgtaaatgtacagtctgcttttggtctcatcattttggtgtttttccacttcaatttgtcttgcgtcattttaatttgttagcacaatgtatttagtcatatacgtctgctatgaataaaacatctttttaaaaatggcccgggcatgtgaagtttgtcttacgattcyccattttttttaaagctgtcattgtttggggtgtgctttctatgaaacttcagactttgtgttgagcccaggacagtagggtgtcatgcatttttagcatttttacaactcatactatacataagaactagaaataacaaatgaatctgtatatttttaaagagtgtttttattttataaatttaaaaaaataccttgtttttgatgtttttcagttgatggagttatggttgcttatgtgtttgattattttgacgggcaagtacgtatatttaggagatttgtaaccatgagcctagcattactgctgataaaacgaatccctcctttctaatcccattgctcttttcttgatgtaaaaactgatgcctggcgacagcactgttccccatttsacaagtggccttttattattgatctttggttgggtagcagcagttgccagagagaattgttcrttgtggtcaaccagtgctcctgcctcagtcgtgttttgcttttaaccatgtcttcctggaatgacrcttgaaagggcagtcatcatgtgttagcccagaatgaactcaccggaatcccacatttaccaaaacatatcctggatcctcagggcaggatgtcaccagaattctataatcctccagcagggacagtgagggatatcagaattccacacccaagcatgtgtgtctgtcctgctcaggattgtcttacccctaacagagagaaagtcttgctccattcaatggggtttccccattaggctttagtgtatttccccagatgatacttgaattacatcyggatgtgtgtgtgctgttccctgtctaacctcggcagccttcatcaatgccggtgaattatgcgatggtggtggcggcggcgggagcagcagcagtggggaggaaggtccaagcttggagaggatgtgtgtttttatgggtgactgagttgatttgtgtgcagcgtggttatttgtgttgttaggcagtttacataataaagtggtttactcagcagttgcccacttctagctaacagagccaccgtgcattttgtatacaagcactgacaattctcccctcttctcctcccccacctctttccatcctagttcttgcctttgcttcccatagattggctttttgttttggcttaataactaataccccaccccatccccactgccacacacacataccttgtagtcacttttggtaaaatattaacattcatgaaagaatgcagttattttagttcatgcagatgaagcgaagaatttttttttttttttttttttgagatggagtttcactctcgttgcccaggctggastgcaatggtgcgatcttggctcactggaacctccacctcccgggttcaagcgactgtcctgcctcatcctcccgagtagttaggattacaggcatgcgccaccatgcccagctaatttttgtatttttagtagagatggggtttctccatgttggtcaggctggtctcaaactcccgacctcaggtgatccgcctgcctcagcctcccaaagtgctgggattacaggtgtgagccaccacgcccagccaagaatttttttttttttaatgttctcttgtgaagaatcatttgccatagagctatgaacttggtttggtctgctctgcccatcttagataaaaataaccatctggaatgtaaatgtgaacttgaagatacttgaagttgtcaaactagtatttttctaggacgggtctgtttggtcagaccacatagatgcctcctctgtgctccctttgaaaaagtctcagctagaaaacacgcacaaaatgtgaaagctagttggaactaaaattttcactttaacctgcgcttgtgtcctctgctgtaggaaaagtgctgttaccagaaaataactcaaggaatagttatagaatactaaaaaggtcttctgtcaccgagaatttggcagtgaattcttctgactcattttaaagacattagatttgtatacactacttcaagaaagcttaaagtgagaactacttggaagtttttttttttaaaggaactatctggtctttcatttttgagaagatacaggatttttttttttcttctgctcacctaktatctagtgcarcattttcatttttactggagacactgaatctcagtgaagtcacttgtccgaggtcacacagctaggaaggagactggggattctagcgttgggttttctattgcgtgatttcccttaaaaaccacctaagcagttgttggctctgacttcttggtttcatggtgagggagttcaaggaggacacagcataggttgtgaaaaaaatctctgttctgtctctcagcyggtgattgtttacagacattttggtttgcttgtttgttaataagaaacccgtggtcatctggtttccaaagcagctctctgcttccattctggttcttcctttttctgcagaagatatttttgttttcttttagctctttggaaggggggaggctatttttgcttacattttaatcatttgtttcatttgacataagcttcttaactgtaagaataatgaggcttcaattcatttacattgccttcaattcatctacatgcacacatacgtacacacacatacacatatacacatacacacaacatacacatgtacacacgtacaacacacacacacaacacacatacacacagacgtacacatgtacacatacacatacattcacaacatacacgtacacacatatatacacacacatacacatgcacacacacacgcacaacatacacaacatacacatacacacgcatatatacacacaacatacacatatgcacatacatacacacgcacacgtacgcacatacacacaaatacacgttttttgattcccaaatgtttacaattgaaatggaactcttatttctagtaaaagacactgctgtggtaatctgcagcatttcctgctgtgtgtgctagggcccagggacctcggttaccatggaaactaatatccagccgcccgggtggtacttccctttagagccgcatttgagcgcatttcacagttcaatacaatgctgcttcttcctgcctttaaaatcaggaaagggggcaaagctgattgattacaagtaaaatgaaaaaatactgtttctgctaagacagaaagggacytttaatacgcgcccttttaatctgattgtcagaagtaggacagtgcacagtttctcaaagatggccagaggatctgataaaatacaaaagaattgtggaggcgatagtaaacattcttcttcctgtgctgctgatccacaggcttctctttgagaatgactggcctgcaaggctgacaagggtgtttacccgctgactctggtggagtccatttggttcaccagaagggcttgagggcagacaaaagaccttgagctctctgcgtgtgccagtcatcctgtgtttcctgacccctgtctctctcagaacccactcacagaaccagatccgagagcctgggagagcttgcccggatttcagcccttgatttgccacttaagcacgtgattgccatctgtgcttgcttaaaggggatgctgattaggagagtgatacttcatttggataatacgatttaagcccaagtgcaagaggtgttgcttgtgctggaactgcaggaaatatgagccatgtaaacgcaccacccaacctcctgcagtggtccaggtggtcctaccggtcactgactacagtatgtctgtgtgggagatgacagtgatcccaagccctggtttccatgcaggcatatggactcctgcttaatgagattgaaggatagtaattgtctccacccttatttagatgatgcccatcgctctggcgtttgtgttttcaaatgttttggataaagcgagtgccggsagagtgtgctatttagtgagctcagtccagcctcggtcttgagcattgactgtgggtcctctgctgttggggttctcgacttgcccaccagctgccttatctcaggttgagaaaggtagtgggaaccccattttgcaaatggggaaactcttggtgacttgaagtcacctggttaaaatggcacacaactttgaagctgcctgccattttaaccaagtgtgccagacataagtttctggagtgtgtatctcgtctatgtgacactccagtaccaggttcttcccacctcagggatcagtttatggaaacacctcagaattgagaccagggcttctcaatctgtgatttggggctggataaatattagttgtgaggggcgtgttgtgcattgtaggttggttagcagcgttctcggcctctacaccctctcagttgtgaaaaccaaaaatgtgtattgagatcagccctggttgagaatcaccaagctagacctctttgggttttgttgggcaatttaacggaactctggctatgccttttttgaggcagttgtagctagcttggttcattgaagctaggtttgaaatcattcataactaagttatgatgttaggaattcgacagtccatgcattgtttcatctgaaaaacaactactctgccaagttgcacgtatacaactctgtaaagagtccacatcttactaaaaaaagactgcttcctttttaccaaaaggtcmtttcccagagtgaaaatatgcaagtttttttttttgttttcagaagattaagtcaaatgagaataggaatggggtgaacagagcgcttgagttcccgttcgtgttgcgctccctgcgtgatggagagagggctcarggaggcggagcyggatggggaggcggctgcaggccccctctgcctgctcacagctgtgtggccctgggtgggtcagtacagctggacacacctgagtttcgttgtctatgagatgacagtcaggtctgccgtacctgcctgtcagggtgacggtggaagtcaaatgaggtcatagttgtgaaagcattttataaattgtaaacccaggcagctgtgatgagaggtcgtggtgctcctgtgacttgggactttgggggtccctggccaccttccgactgctggctccttggtcacttagagacatggtgctcacttgcgttccgccttcaccccgcgtggcctgtcccctcccacttgtctgtctccaacttctgccgctgtttgggatccagttcagtccttgttttctcctgaatgtcttcttctggcattttaaaagtattttttataattattattttaaacaaatattttaagtatgatgtataattataatgttcaccccattattgtatgttttgtgattagatttgggggatgaatggtgtcttgaatgaatgtggggtttttggctgtctccccagtacatgccccaggtgtgttgaatatgtcattctctcctgcatcacacacactcggaatgccctctcccttccctcacctgcagactctgacttaccttccaaggttatctcaggcggtctctcctccaggacgcctttcctccttgaggggcttaggatccccgctgagagctctgcccagaatctgggcttcgctgtcgtagcactgtactgtacrttacctgttccctggtctggagattctcccaccttggcctcccaaagtgctgggattacaggcatgggtcactgcatccaggctcctttcttttatttttttctcattgaggtgaaattcatataacataaaactaatcatttttaagtaaacagtttagtgacagtttggacatttttgcagtgctgtgtgacaccacctcatctaattccaaaacattttcattaccgtgaaagaaagccccgtaccgggatgatgaaargttctggagatggaggtggtgatggttacattaacaatgtgaatatacttaatgtcacaggattgtatatttagaaatggttaattaaaatagtgaatttcttggtttatattwatttatttatttaccatgagaaaaacacacaaaaatcycatactcattaagcagttactccctgtccccacccttcccagcttctggcagtgttttgtgttttatcattatagccttagcccctaacatagtaggggccaaatacatcttctttgaatgaatggaatgagtttctacttgaacacacatttgtttatctatctaatggctatgtgacaagcaaagttatctttaagaacatttctttgaaatgtttcactagtgttttttcaaggggttttctacttatctaccagcatctccatagacatacctcttaaaccaaacctaactttgtagcttatctgcccccacttcattatctttagttgacatttggggccagtgatggaacccggtggtatctgtctggcacactcacaaasaaagtgttattaaatctctcaaatacatgtagcaggtcaaatatatgccttttcttatgatgttgaagttttcaattactgctgcttttatgagggagaaggaaaatctacccatccttttagaaatgaatgttcctaatctcattgcttccttgaaacatggccgccttgtcattcgttcttttctttatgcttgcaactcacaaaatcttgttcttttctgttgctctataatttataaaaccgtgttgcagttggcttggttagaatttacttaggcatagttgagcctttagattttccttctggcatggacaaaagcgtcattaattatgaatatgaattcctttgcaaaatgacaagattgaacatttcctcatgccagtaacccagctgtctcattctgatgtgcaacaaagactttttagagattgtttttaatggccgtggtatcagacactaaaaaataagaagcttaaaaggaatgcaaagtagcttacagttcattcgtctagaaaaaaagaaataaagaaaggtttttgctatcctgtggctgtctttactctgattgtacatttgcaatctccaagttttggccgtggctgcaaaccaaatggttgtgctgctctgctgttgtcagatacaagattctatttgttcagatgatcagtatttgagaatcctatggcccaggtcactttttcggtctccttggtttgataatggaaatgggagtggtgtcagagcccccaccgcatgtgggtaccggcttgttatggcctcaccaccatccacttggtaacttctcttattgacactggaagaggctgcaactgggctctgattccagagcctggaggcttttaactgctgtattatggggtcttggtcctgagtgtgtctgctcagccattggttgaccatgtcagtaagatggtttctgatgtttccacccgccctgtgtcttgacagatttgcagccagattcagatatggcagtgggctccttcrtgttggaaaggttgtgttgttccactccgtctgtctggatgcttcctagggcgtgtcccacctctggcctccagttgaggttttctagtctggagagacacctgtgtttctgagttcctttccagggtgtcagagaagctggcactcttggaaattccctactaggtttggatccttgcatgtacatatatctgtatatatgtgtacatatctatatgtgtatatacgtatatatctatatatacataaagctagtatttgatagtgtactgcaggctattgtaagactttgtttctgttcacaattccttgaatgaggattttggggtcattktttttcttccattttttaaatttcatttttttaaaattgtgggctgcttcctttttaaccacatgttaaacattacacattaaacgttaaaacatttgtgtataagaaactttttttcttttttttttgcttactttaaatggaagtgctgtcacattaaacatcaggtttaaatcacatggaaataaaatggggccagatagttgaatgtactgtcatttcactactttaggaaacatcaggagaggaaccaagatggtctgaaaaggtcatagactggggaaggaagggctgggatgaccatttgtcagctttcaaaaagcaagacaaaatggttatgcctggttcagatcccagccatttttgttttcttcaagaaagtggttagaaatgtgttttggtttcagaaaagccctggttttctttgatgtttagtataaatttggcttgaaatgccatattccatcattgtcatatgtaggcatgtgctttttgtgtgtgctgtaaggacaatgtctacactgggtcatttccctccccacccagttccccttcgttgaagtaggagctgctgtttcagttagctgccctgagctggccttgcagttagccactggcccattcagcagcctggtctccccttgctgactccaggcttccttctgcatcacgagagccaaaccggccactttagcctcctgtctactgtattcttaccctgcaggaatggaggctgtaggctagagcctgcctgttccgtgaggctcagatccaaaggcttactctcctggaatggggcctctctcctgtctctgtgccgcccctcacacctgtggccttgtgcactgatggattatttgcccgaggtgaagaggaagcgttgaagggatagccgtgttagttttggattccagctactttgctgctgatggttgtgcaacctccagggacctgctatttagcaaatagggccgagcacagcctgggggaggctgccgaagatgggggtgggcacaagttgatgactagtgtccccaccctgctctgacttcacttaaagacaacccccaaaatggctttagcgtaaaatggaaaagatggtaaattattctggygtgagggctaccctgttgttagagttaagaaagtgcatggctgctgtttaagaacctttgatttgagttgaatcccagcctgcactcttttttgcagtgtgacttttgggaagttgccttaacctctgtgtacctgttttctcatctgtaaattggatgtgataacagcacctttgtaggctgtgtgtggagtctttgagaaggtgtataaagagctttcagtgcctggttcatagtagccttcaatcgttagcttatatgaatcaggaaagctagtatttattagcacatacaaatgtgtcaggcactatgctctgggcttcctatcaattatagtaatctttatagaaagcagttttgttttgttttattttgttgagacggcattttttttgctcttgtcactgaggctggagtgcaatggcatgatctcggctcactgcaacctctgcctcccaggttcaagcaattctcctgcctcagcctcctgagtagctgagattacaggcacctgccaccacacccggctaatttttgtatttttggtagagatggggtttcaccatgttggccaggctggtcttgaactcctgacctcaagttatgcacccgccttggcctcccaaagtgctgggattacaggcatgagccactgcgcccagccaggaggcagttttgagagagatactgttgatttaaactaaacagtggtcatgtatttctatcattgaaatatatttgggatggttacatttttatcgtggatatttaaaaagacatacctcaaaacaaaacaaaacagaaactgggaatggcatagaagcagaacctttgctgcttgaaatagctccttcagcataaaacacatgtaggagtcctgaggttggcatttctctctgccgctgggatgctgagtggaagatttgttacttgagttcatcatttgctttttttttttttttttaaatgtcacagcttctctgtgttgtttttgactccatagacacatttgtctaaggttttaaaagttcagcttttcacttaggaggaagctgagctctgtaattttcctttttgcatctgacactaggacattggagtctctttcatgctgggggaccctctctactctgggctataccacttaatcctcaggtggccctgaacagattattaacttgcttaaaggtggttaaggagctcctctcctgcggtctaaagaaatccccactctggccaggagggtcttggtgaccttgccgaaccatcctcccctaggagtagagactggggtaacataaaatgcagagaagcaatgacctcaaagcagctgggtagatgtgacagctcctcaaagccttacctgttttgcctaagaggagtgtccttcattcgtacctatagaaacactacttggcaacagtgaatgttctctgacacatgtaataggttgttaagtttctctatttagagtccattggtagtcaagaccacctgggtgctgtttgcaagacataactatcatggaagtatttaatactatactattkgtatagcaggtacatgatatgctattagtgctgtagaaatgttatgttagagacgggaacctgaagcccctccttgtggcacatagacaacctttgttttttcctataatcctttccaccttttccttggggtaatgcccctccaagtgtgctctcccctgggactcagctgcctaggccttccttcttagccactattagctgagagcagaggcagcagctctggctggcagtggcccctggagctttgacatctggaggggatgaggaccccgttcggatgactcctgcccttccctacccaggctgtttgactcttgatctcgcctagtactttttctcaatatctaattcctgagcctgcgattgagttgtcctgcttggacacagcccttgtgttccacatgtgtggtctgatccagtgacaaagaagttgccatttaaacatctcatcttgaagaaccattctgcctttcatgcttcatgtattgaacactgaaactgataggagtcttagctttccctgtgtgtttccaagggtttaatacatacataatgatcaagagaacctgatttaacattttgctcaccctagtattaaaaaaaaaaattctggagaaggtaataaagactaagtttaaagaatgtcttggcagttgttaaaggaaattttaattaaatcccaaaatagtgggtacatgagaataattccatttgagggtaactgttgggtgtcctcattaaagcctatacaatgcatcgtatgaattttctcctgttgaagagttaggcagctttctatgctgtttctcctagaccttgttgcaaatgcatgcgaaattttgagattcccatatactataagtcttgtgttggcattttctgaagttcattttgggcatggatagggaaggttatgagtcaggtgacaggagtttccatatcacatccacatttgaccatatggcagtttgttccttggtctagccaacatgctctgaacatgttccacagaggactgggctggcttcttagaagggctctagaagcagatcaggcaaggattttggcccagtggggccaactgtccagaatggaagaccgtgcatgcaccttaatatgtataactttctaaaagtcctaatatttgagcctcactctcaggtagactgttttactgatccgagatgggacttgggcatcagtatgttctaaagcttccaagttgagtctaagtatagccagaattagataccactgcctagaccacgagcattggagggtgataacacaagacccttgtgaattttcaaatgctaagcagccactacagtgtgcgactgcagtgaggatggtcatacctacctattagagcagttgcaaggattaaataaaacctttggttaaatgaagagaacaaacccaagttgagatgccagcactaggcttggcttacttcttagctaaaggacttgccctcacaaaacaaccttgcctcctctaggattcggatcttgtcttggccaaaccgtaaattagcacttgctgtggaccagagaacttctgaatagcgccaaccatgagagtttaagccttcgaatgccaaggatctcctgaattcatgctccagagctactcccagacttacaggttaaagtggaactggtagtggggaaagtaaagaagggataggtgttttatagtcgaaggagcatgttaggcatgcctgtgtgtttctgctgaaaatagctaacgaattggtctgcaggttccgtgatggtagagactgggtctaccttgttcatctttgtgctcttgcagcccagtacactgtagtagtaaaacctttgttgaatgagaggatgaattagggcctaccaggctgatagggcttggctgtgtccccacccaaatctcatcttgaactgtagctcctataatccttacgagttgtgggagggacctggtgggaggtaactgaatcacaagggtgggttttcctgtgctgttcttgtgatagtgaataagtctcacaagatctgatggtttgataaagggcagttcctctgtacacgctcttttgcctgccgccatgtaagacgtacctttgctcttcctttgccttctgccatgattgcaaggcctccccagccatgtggaactgtgagtccattaaatctctttttctttataaattacccagtctcgggtatttcttcatagcagtatgaaaatggactaatacacagaccctgcactcaagtggtggggctatttgagaaggatgtttttaggtctcctcttaactggatagagaatttggagaggctgattagtgttccccaggtctcagagctaaagagcagaaccaggatcttaagtctggaattattcctgtgatactatgccagcttccttgccataaatatgtatactatccactggccaaactcatctctaaaatgcattcagtggatgaaaggggatcagctgagatcatggtttgggagggatcagtctcaatttgtcaccttcatactgaagctataacactaaaatctctcggggatcaaaatgtttgggggaaaagatatattttgatgtcctttctttctggcagcatgaccagtactagacacgttagaggcatctagtgagtacttactgatttgattcagaaaataggagtaactatgcttgaatttcttttatcaaagagaaaggaatgaaacatttaacttttagcagtaagcaagcatattttaaaatttgtggtcctctgccaacaggtgactaaaggactctttaaattttcttgagattcacagaacaggggtaggtattttctttctgaaatatgctgttrtaatgtccttgccttgttcttttccggtttatgcagaactttaaacctccctcccctataaataaagaaaaaaaccagatacaccatatcctaaaaagttagcatccatgatttaaagaaggggtaggcagactacagcctctgggccaaatgcagcctgctattggcccatgagctaagaatgactattaaagagttggggaaaaaaatgaaaacagtaatgttttgtgacatgcaaaaatggtatgaatttcaaatgtaagagtgcatccctaaagttttatgggaacacagcccattcatttgggttttgtctgtggttacttttatgctacrgtggcataggtgagtagtcacagcagagaccaaagggccctcaaagcctgacatgtttactaaatgacctttcctggcagaatgtccctgatttcactttaaagcaaagtacccttgggagggaagggctaggggtgtggaggtagaggtagaaaatatatttcctcttaccttttccttgcctttggtaaaatttaagtgttcaagattaatcttaaaaaaaattttctccctgcctcctcctgatttgtgtacccctgaactgagggtcttgattggggaagacaaaagagagaaatgaacaattggtgatcgtggagaccatgagaaggaggactttggtatcattccagccagagaatttgtaggcttagcactcccttttttttctgtgtgcctttaaaattctcaatagtccaattttgttattttttgcatcacatggggaacacagtatgagaatgttcatctgactgactttattatgtatacaatgacgagtattggacatgacacaatgcacagtgccaagtccttttcatcagcgtgtgttttgtgcccgtggctggctgattgatgggactgggtctggcaggcctggctcctaaggtgagattgcattttgccccttcaagtaacctactgtgattgcactcgctttatactgaatttgaagccccaaaccttggattaaaaaagaattcaagggaacggagaccttttcacttgatacttgaagattcttaacacctagagggagttgagactctttgttttgctgagaagttgtcttggaagcagtgacaatattgatgttgacaacattagcctctccattacctgagtttagatttgagcacgttctttcatttgcccagacctgtagcagagcagcagaaggctggccaggttgcctcacatttgcgtctgtccacatgaggttttgagctcagagtctttggatggtcgtgagatcttgacttgataaaaatggctctgttcaaagaaaggtctgagtgttctggtcactaaattagatggcaaagatttggagatgaagagctttgctttggtctttcctgtatcatttttctttccatgtccctgcagtgtctttactttttaaagaatttaatctttaataccatctttgcattttccatgcatgttaggaataatgtccagttttgagacagtcctgttacacattctgagttatgattaatttttaaaaatcaaattattaatcaayacctttttattccttcacaaacgcttcatgtgcccgacttagccttagaagttcttcattgtttttcttattataaaagtggggtgggattagaaagtgatggcttaatgaggaaggaagcacagctcaaatgccattcatatgaccagggtctacctcacatacttgttagaatgaaatgtgaaagtgccttaaaagacgtcacctgctacatgaatgtctaccgcaacattattcgtgataaccaaaaggcggaaacatctcagctgcccattactggatgaatggataaacaaattgcggtatgtacataatggaatattattcaaccgtaaaaagggacgaagtgcagatgctacaacttggatgaacctcaaacgtgttagtgaaagtcaagagacaagaggtctcatatcatataattccacttatggggaatgctcaggataggtaaatccatagagataggaagcagtttccaggttgccagaggttggtgagagtagggaatggggaatgactgcttagtggccatgggggtttattttggggcactgaaaatgtttttgaactaggtagaggtggtcattactcacattgtgaatgcactgaacgcttctgaatcgttcacttcaaagtgattttgtcttatgtcaatttcacttcaaaatataaaacacacacatgcataatctgcatcaatgtcactatatatggtacaccctattcatcaccaggacctgtcagcctggatgtacttggtccccaaccctgtgtcagagggagaaccaaacacacctttacacataggggacccgaacagagctcaagggcaatggaacttgctcaaggccaagtcattgggaagtgacagttgtaggactggctcttgggttttcctgttttctrtgcatctttattcattatttctacatggtgtttgctggcaggggaggctgacacattgggtagactagtgaaagatcagtgttcctcaagaagcttctattctgcccctcggagggcagtcaaagctcctccacatacctgctgtgaagcggaggctagctcagccttgttgtttcctgacttcttggagctggctttctctgtttgaaaacagaaagagcaagaatgttaagagggccggacatggtggctcatgcctgtaatcccagcattttgggaggctgaggtgggtggatcacctgatgtccagagtttgagaccagccagrccaacatggtaaaaccccgtctctactagaaatacaaaaattaaccaggcatggtgacatgcgcctgtaatcccagctaactgggaggctgaggcaggagaattgattgaacctgggaagcagaggttgcagtgcgttgagagtgccactgcactccaactcaggtggcagagcaagactctgactcaaaaaaaaaagaatgataagaggacttacctcataggatttttgggagtttttaaccagattgtgcagtgcctgggagaggtttaataaatgtaatctggccgggcgtggtggcttctgcctataattccagcactttgggaggccgaggggggcggatccctgcggccaggagtttgagaccagcctagccaacatggcaaaaccctgtctttactaaaaatataagaataaccaggtatggtgatgtgtgcctataatcccaggtacttgggaggctgagacaggagaattgcttgcaccaggaggcggaccaagtacatcaaggctgacagctcctggcgatgcgtggggtgtaccatatatagtgacgctgatgcagattatgcatattttataattgaagtgttttttataattgaagtggaattgacataagagaaaattaatcattttaaagtgagtaattcagtgacatttagtgcattcataatgtggggtaatgaccacctctaccaattcaaaacctagttgcagtgagccgagattgtggcactgcactccagcctgggcgacmgagtgaggctccatctcaaaaaataaaaaaataaaataatatattctgtacctgccccttagacagtctggttcattaagtttcttggaaaggttcagggaagagccttgtgccctccgaggtgaccgggtgagatgtggtttggagccccttccaccctggatcatgctgcagcttggatcattgaccctgtctcctgctctctgaggaagaggacccttcctgtgtctggagcaagggccatggatttcacagttgggtggcactgacaaagctgcaaaggctcgatggctttattagcaactcaccttgtgccatttttcaggtagatctggctgttggttccatgaaatatggscacgttggtgaaatactcttaggcttctaaaaaagagaaaggaaaaaaaagaaatagtgctttcctctgctcgacacaccacagttccagcttcaggatgccctaacacaaggcaagagaaacgtgcagctttgaatctgggtctccttctcttcttgtagtaacataaattgacgcggcccatctgtgctgcttcagaacaaacaagaatgaagtcatggtgcttaaaatagcacagggtggagtggctgagagcaactctcactcttccacctcccctggggactttcacgcagggttttggaatggtggctgtgggttcggttcccttggcaccacatctgggtcatgcatgtgcttgtgaccagcttttactccacgtgcaggcagtactcttaaagagtgatttttttttttttttttgtgagacagagtcttgctctgtcacccaggctggagtacagtggtgcgatctaggctcactgcaacctccacctcccgggttcaagcgattctcctgccttagcctcccgagtagctgggattacaggcgcctgctaccattcccagctaaggagtgattttctctgagagggacatttgctgtgaaagtgagtgtggtctcttatttaatgttatgtggctttcccttcttcatatctcctgtgctgtcattatgtgtttcagggccactttaaaacacagctcaccttcctaacatagtgcactagtccagcgagaacatccagaaacttcatttgcaagcttggggttaccctgaaggaaatcctcatggcttgcaagattcagttcctggggcttggctctctttcctggacaataaatgagaggtctcatttcttcttcatcatgccctttttctttctccatatatatgtgtgcatgtgtgtgtgtgcatgtgtgtgtgtatgcatgtgtgtgtgtgcatatgtgtgtgtgtgcatgcatgtgtgtgtgtgcatgtgtgtatttattttargatggggtgttgctgtgtttcccaggctgaaatgcagtggcacaatctcagctcactgcagccttgcctttcctggctcaacagatcctcccacctcagcttcccaagtagctgggactatgggtgcatgccaccacacccagctatttttttttaaattattttgtagagatgaggtttcatcatgttatccagggtggtctcaaattcctgggttcaagcaatcctcccaccttggcctctcagagtgctgggattacatgcatgagccaccatgcccagccctttccttcccatttttcttttttttttttgaggcagagtcttgctctgttgcccaggctggagtgcagtggtatgatcttggctcactgcaacctccatctcccgggttcaagcgattctcctgcttcagcctcccaagtacctgggattgtaggcacatgccaccacacccagctaatttttgtatttttggtagagatggggtttcacaatgttgggcaggctggtcttgaactcctgacctcaagtcatccacccgccttggcctcccaaagtgttgggattacaggcatgagccactgcacctggccccttctccatatttttaagtgaacaaaaataatattaatgtgttaacactgtctttgtatgttttatagtctggatgtatcttattacttcataaatgctgaaaaaattacattcttaattagtattccttcagaaattatgaagctgcattccaactgatatctctgtggatgtagctgctggatttttcttaaaactttcacagagtattacttgctatgcatggaaacatgcaccctttatgtgagtttgtgagttgcattggttgggaaatttcctgatggtcactgaatatggcaaaaattgagcttttgccttgcctgcacaaatagtattgatcatagtgtgtttatggacagagactctcaatctcttctccttattttgataaaggaaatggatgttgatcatggtatgtgtttcctggggcagaatgctgtgttcttaatgaagacacctcttatataagaggcgtctggtgttgttctgttgtcaagatgaagtcaggtgtccagtaaccactgtttgcaaacttgtatcaggacatcttgaactaatttgctgttgccatgaatccttctccaatgtttgagccacccagtgggaataggaatgtcctggaacactctgtctccactttggtcatcttcagaaaagttatctttcctttagagaaactttgggggttgctgtgcacgccatgcaattttagagtagaaggcagccaggagggcgagactagtgaagggggcttcgtgagaaagtcgtgactttcctggcccttgaggacttggcaagtgggtggaaagagggaggacagtctagcaagaggggccccatcattcgaggtatggtgtccagcttggtacccatgcatgactgtgaggagacaggtctctggagtggagaacgggggtagaagcaatgggagaaagaaggttggtgcgggtcatgaggtcaggtgaggatttgattctggaggagggctcagtgggaaaattttggaggtcagaaatcttatggggagaaaagtatttgagggagcctagcctgtcatggtggatgtggaagggaggtcagtttagaaaggcagtggttggagcaatctaccccaatgagcttattggcattggcatgcaaaggcttttcaggaaaaaaagaaaaagaaaaaagaaaaatgttctagaagatcatagccatgatcttgatggcttcatcaggactaatcactatggaaaattaaggatgcccrtttcttatatttaatgcggtagctgtgttttcttttggttgacctggccttttggcactcctgggctctgtatcttaagccattttagagaaattatttgatgtcctcagagggaggagaatgctaaaaccacctcttttaatctgcggtctctggasttttcctctttaaccactttggagacgggatgaattggtttcttagtaattaagagccaggagctctttttattgcttgtccttaacctctgacttcactgccccagtctaaacatccaaatgagatgatgttatgaaagctcttggtaagccctagggtgctgtacaaatggtgtttatctgaagctcacttccttgcttttagtcatgttgctgaaatgatcaatcctaagtgtatcatgtttgctgagctcatacatacatttgtatttaaatttgtagctttttattgattttcgagactcctttgcaagtacgacgacgtcaggagtccctaaccatacctgccaggctgtgtggggtgccgccaggctgtgtggggtgccgccaggctgtgtggggtgccgccaggctgtgtggggtgccgcccgcctgagtgtaatctcctttgccaccactagtcccttttgtttgttcaaccatattggccaaattcctttccatcccaggatcacartatttgctgttccctctgtttggttgctcttctgcagatctttgtgtggtttcagctcaaatataacctcaggagggccttttctgaccgcccagcaaaaataccccatcctcctcccactgcacaccccatttatcctttctgttccttggcagtgttttatggcacttagaattctatgaaattcttatttgttttcatgacctgttttgcctgtttccaccctcccactagcatgtaggctccatgagggcagcactttgtcttgtgttctctgtatccacagtacctggcgctcagtaaatatttattgagtgaatgaaatgaataagaagtttacatgaatgaatgttaaaatagcctgtgcttgcagacacatcctactgcagagatatttggatgctattagtagagcaggagcaagacgcgcgtaccatctgcctttatctagtgtagggagattcctctagtgttctgtagctatccactttcttttaccagtactaaactcaaaagagtaaacattaactttgcttagccaaatgaaaccagcagattttagcacatgatctataaaggtcattgctttgctttgtgtccctgaatgtatatagacaaagacactgaatgttagtagaaagcagccagaaatatgtaggtcactgtctttgactcrtttttggctggaaccttctgcagtggtcctacaaaacaaaccccaaaataaacaaaactaccttcaatatattcactagccagctctcttgtttgccccaagtccaagaaatctggccttcatctaaaggaactgttttcttacttaggatgtcaatcattaaaagtgttcatttcatgtttggagtgagctgtactgtaaatgctgggctgtgtggttgtatcagtttgtgcaaacagtaggagccaaggacgttttattcacccctgagttagcatcatttgtcacactatctcagcggagcgagacggtggacacctacacagtttctcaggctgtgctttctactaattgtttgtttaattagaaaatgagtaattatttatccagaaaatagaatccaaaaccgtggggctgaaatcttctctaattgcaccaygtgatcatgcttttctgaggattgtatttttggtgtgtgtaggtggtaggggagtcttattttgtggctggtgtttactgagagatccatcttttgctcagcacctcaagtggaacaaaatgaagtcagtggcaatcaacctgctttgtaaaaaagtttaaaagccaggtacaatcagaatatctgtctaaacagtgaggtttgtattcattcaatagctttggggacctgctacatgtaggacatcattgaaggtaaactaatgtgtgggaaagggcccctgtgtacaagaaggtggtaatggtggtttgcacttcacgggaacaaagggagtcaaaccttgacaagctttgtggaatttgctgggcaaaagcttgtttggggtgagatcctgtcgatatagctaagaatggagtttgggttctgggtataggtcagctttttgatgggtgaccaaacacactgaggtcttcattgtggctaactgctgatgccgtttcatctttcttttctggtcccgttcagaggtatgaattttcccttcctaatagccgagtctggcatgctgtcgaagagtgtcacgggtaggtgctaagttgaccttgtaggtctgttttccatcctgacacaaaggggctactgggaagtttttagccagctatgatgacagggagggaggagttcacctgtggacctggtaggggcatgaacgagaaaggcgggttttcaaacggagctaggacaggatgaattcctgccgtagatgtgagctgaggtatggaaacctggctttgtctgtctgttggatgaagcagatctggtgacacctcctgtccacagcatcactctccatgaacacacattggtagggttagggcctgaacaaaacatgcctaacaagacagggcacgtggaactgattgtgcctgtgagaaaacaaaaagcgaatcaccaccttcctacagcccacacgtgtggccgcttgcgctgtgtcctcctcagttgctggccgggcctgttggcatcttggttttagagcccagcggtggaggtgaaagccttggagactttttttgtttttgttttgagacagggtggcgtcccccaggctggagtgcagtggcgcgatcatggctcactgcagccttgaccctctgaactcaggtgatcttcccacctcagtggtcccccagacccctgccctagtagctgggactacaggcccacaccaccatgtctggctaatttttttttatagagaaagggtctcgccatattgcccaggctggtcttgaactcctgggctcaagcaatcctcccaccctggcctcccaaagtgttgggattataggtgtgagccactgtgcctggccgcttggagactttgaatcttagctcggagtgcagtagctgtgtgaccttgccaactrcagatgctttttaagtcccagtttcctcacatgtctgaaatgataataatacctcctcccggagttgttgttatttatttattttttattttttgagacggagtttcgcttctgttgcccaggctggagtgcaatggtgtgatctcagctcaccacaacctttgcttcccgggttcaagcaattctcctgcctcagcctcctgagtagctgggattacaggcatgcaccaccatgcccggctaattttgtatttttagtagagatggggtttatccatgttggtcaggatggtctcaaactcccaacctcaggtgatccacccgcctcggcctcccgaagtgctgggattacaggcatgagccaccacgcccggcctattgttattttttttttgtggtaaaatatatgtaacatcaaagttaccattttaaccatttctgtcttggccttctctcagaaacatgtcgcgctttcacagttgccctgagagggtgccagaatccatgcacagccccaggcctggtcccctggtgagctctgcatcctctggggagagcgcctccccatgagggtcatgccttctcctcaaactcaccatctcaaatcaaatcctaagatggggggaaacccagggcgtggccatctcctctcccctccacctgaatcccagcctgcttcttagatctgttcttcttttctttttatataactagtgagactagatttgtcttgggttcatttgaacctttccctgcttcttaaatgggaattttaatttctgtccttattcccgctggcttcttcaactctccccctaaactcctccattgacctcctcctctccctactgctgatggattttctttccttagttcagatctgatcacccctcttccctctttgaaaactccccaggacccccattaatggtcacatgataaagctcactatctgccaactggtatgctaaccctcggccagctgggctcactctgcgctgatgacccctcctcattctccctccaccctccctatcccatgaccaacaccctatcacaggggcccttcatctttttggacctcagaccccttcaaggaacagacagctatggactgcctccctagaaaggtacatagtcactcagttttccattcagtttcaaggggtctgtggatcccggtggcgaacttagccggatgcccatgctagaccatgcattctaagcctctttgtcgtggcttgtgccattttctcttatatctttgttcctttgtctttgttcctgtgtttccatcagtatttttcttcagtgcactttcctgtcagagttaatttttccctctatcgtgcttgtacagcacattaccagaacatctatttagcatttgtattagagttgatagtttgcatggctgccttgcccttgtgttcctgagcacagtgccttgcatgtgttatacacacagtcatgtgtccatttattcattgattcaacagtttcttaagctcttgtgagctagccacagtgcttgtcctggggctgtgctaggaaatatgatccagtccccaccccagggagatcagtttaatggagactgtaaacagataagcagaatgttatcatgcagtgagactattgaacatttactgtgtgctgggtgctaatgagcacattgtattaatatgtgtgttgtctctgaattctcacaacagctttgtgaaatagggtctaatattttatggatgaaacaatggagaccacagctaggttaagtaacttgcccaaaatcgtgagactcatcagcagtagagtggaacttcaacactgtagactgtctctgggggccagatttttttttttttttttttgagaaggagtttcactcgtattgcccaggctggagtgcaatggcacaatctcagctcaccacaacctccgcctccggggttcaagtgattctcctgcctcagcctcctgagtagcttggattacaggcatgcgccaccacgcctggctaattttgtatttttagtagagacggggtttctccatgttggtcaggatggtctcgaactcccaacctcaggtgatccacccgcctcggcctcccaaagtgctgggattacaggcatgagccactgtgcccggccttgggggccagattttttttatagctaggctgtctgagatcagcctggccaagccagggccctgtgagaggccaggagaaagaagagaggagaaaagccaggtggaaatcaccaaagtcttcctggaagagtatgaagaattgggatgaagacaaagtaaccaggggcccaaaggtgagactgagcgagtgggtgaactgtggatgaaatgttacgaactcaggtctgcggagatggaaaaaggagagaaggcagtgcccacggaatgaatcgaagagaaaaatagaattagtcactgaacagattatcgaattgagcaaatctttaaagaattccaaagatagaaatgtcttgkacmcagcaggactaatttttgtttcaacattggaaggcagccctgcttcttattatagacatgttcaaatagtttaagtgctggttactgaccagattatctggtacaaacatttatattacagcaagttacttaccctctccaagcttagtgttcatatgaataagatggggataaaaaaaatgcttatttcctcaaatccaagaactatcaatttagttgtacctttagtttatgtagcactaaggaaaaaaaaaatcctgccaactaaaatatgaaatgcctttcagagttgttaacatgtcggggggaaagaatgaactgtaaaatggattctaggattggtcttagaaacaatgaaatagaatagtctacttcctagtgttactgtgaacagtgccagatgtgtagcagttgctcactgtatttgatgatgaggatggtggtggtgacggtggtagtgtttrtgtagaaggaaacaggcctggaggctgaagcaactatgacttgatgtaagcaaaagctactagtcaagtgctctcgttgcggattttgctattttagagtagaggggtctcctgacacacaagagccctgttgcctgcaattctatgttaccagaggctgtgagtgtgtatgcttttaggtataatatgaccaagtggtcatatgcctatttaaaacctaaggggaaatgaagggctcaattttagagtgtggcttctaatcttgtgtgctcctaaactctggtctacatactcccaacgattaaagagacattttgcaacctgaaatggttgggttcagactagaatgcttgggtgctaccaaattaaaggccagtaggaagctacttggagaagcagcctctggcactgtggtagaggagcatttatctagagacgggcctcgctggaaggagatagccacgcctgtgtctcaggagactttaattagggccattggcttggctgccccatgatgacaggttgaacttacgcctgtggttctaagtcatgaaaccacccctgggaacagcccagcagaaccatgggtggcacctccaaggactggagagggggtagccctgcaggcgctggcttctgcctgctggcttccagctgctccctcctggggttccccacctggacctcacctgcttctcctgctgaagtgtcttctcaccgacctgggcacaggttacttctgtgctgtgctttgctttatttctcctttgtctgcagacaccactgggccagcaccagtccatcccgggtttttagactcgaactgaggtgtcatctcctgaggagcccctgtgatctgcgctcctctctgtgctccgtgatgccctaggcttctctctgtcatggcgtttcctgtcctaactttctgtctatgtgtgtgtctctgccctccttgaggaatgggaccacgtcttactcatctttgtattcactgtgcttttcctgtaggaggccatttacaaaaggacacgggaatggacagaggggcaaaatatcgaaagctgatatttggagggtctgcagaggaggtgggaggaggatggcttttctaagtatcctcaggaataaggagccacatatgcaggggagccaagaaagggaaaaggaaaatttacagaatctattgctttaaagagtgtggggagaaaggggaggtgggacggttctactcttgaccttggtgggagcatggattgggcgggtgggggttctgggctgatgatgcatgccaaagctgggtttcctaactggcctcagaggcttccgatttgaggaagggggatgggagggccgagtgagcacaggggttggtggttttcctccccttcagaggacacgtgtccttggcttcatttgtaggtctttgccaaggtgtctatgggaagcctccttgagcaaaggggctccaaggctgtggacgtgtgtgtctgtcagtctgtctgtctgtctgtcttagcatgaggtttagcaggcagcctcaggaaaaacttacagcccgaaagggagkgtctggccatgctgctggcactccctcttttcctagagacacgtgtgcaggtgtctgagtgcaggctaagtacaagttgcccatttcggctccagaacccagccaggcagctgttggcatagcatccctgagggaggtttcagcgttgggtggggagtggggcccagatactgatatccagtgttctcacctggctaaaggagagcagctgccccttggttacctggagaaaacaatcaggaaaggctcgtggtcacgtctcggtcccttggatcattaggtagttgcccttgatttccgtgagctttatctgactgcaagggtacattacacggtccccttggataccacgacaattgtacctggtctgtttcctcccaagaattttggaggactttaaaatttaacccgtgggagggcagggagggaagtcttggtacttacaaataaaaaagcattactgccttattctcccaccccctcccccaatatttacaaatataataaataatagctttcgtttactctctagagcaggggctcttcaatgtgggagtttacctcagaatcacttgggtagctgtttgacagtacgtatgtctagaccctgtcttcagagggtgcgtcaggaggcctggggcagagcccggatcctgagtattggggaaaggctctccaggtaattgtgatggacaccctagacagagaaccactgtgttagatggaaaagcttcctggtggcagagactgaggcctctcttggtgtcctgtgctgtgtatggcatacagtattttttttattcagaagtatttattgaacatctactatgtgccgggccctggaatacattcgtatcactgttcttggtgctcctagagccctggcggaggggccctaattgtgttggatgccaagaaaccagataggcagcttctattcattctcagttgtcattggattatggtcttcctgagtggtgtgaggtaggcacccggaattatagcgttgacgttgtcctctttcccaaaaattgaacatagctcaccaagcaggggcccctggaacgttgtagcacatgcgatcaatagatctaacatgccacccctgcctttcccattaactttcaggctaaagagctgagcttgggacaagactgggctggatcatttccctttctctttaatctaaaaagaacctgaagctggctacttccttggtgttcatggatgggtgagagccatcttgagcctcycctatctgctagacacaaaggacgtgaagatgaatggagcatggccctcatactttacaaatatcatagtctaaggggagtcagaaatgcagacagatgtgggccgtacagtgtgacaggtcctgaatgtatgctgagcaaactgtgaacaggctgtcgcagctatggtgagttgtgggaaagaggggaatcctttatgggacagtgctgattggacttcccaggttcctccctagccccggcctttgaggggtggtgtttgtagcgggtggctgaccaggaaggaagccttaccacccctcacctgggctgrggaggctctgcttcgtgcctctcccagcagtgtctgcacctttggcgtggctaggactccactacctgaccctgtggcctgtccagttttcaagctgatggtcacacgtatcttcccagctgcggggctccttttgtgttcacctgagacaatcgtagcttctgtttctaagagctagtgctttgatcatgttttcatcagaaaaacatggttcatgaacttgctctttgtctagatcctgtaataatcaggttgtgcaggcatgaattgttagtaaaaattcatcagtttacagaaaaaaaaaaaacctagaagaaaataaagggacacgtctaacattggtgttgtttctgggtagtgcgtgtatggggaccattttcctaaggtttttacttttcaggttatcctttcattttggaaaaagacgataaatattatttcttaaaacctacatgtgttggtgagctgttgttactgaaaccctttcctccaaggatgaaggttctgaatgataaactttttaatgatcacactcatcccactgccctctggcatcttattggtggctgggtctggttttacttttcactgaatgttccattttctctgttgattgacgatggcctcagggccaagaggtgactactgtcagaggatacagtgtgaaccaaattgtgcgtgtgtgtacgtgtgcgtgggagggtgtgtatgtgtgttccactcggaccttggggcacaagtccctcatcctttgctcttgtgggaagacactggaccaggctgcttagtatagaggagaaccagagtatcacagggcacccaggaggaagagaggcatgggagagttgaggggcatttccatactgcactagcatgaaagctgtaccacattcagaattttagaacactgatatcatgtgcatttagaacaagcttcgtagaaatattgtggctgctctgattcctccactaagccagagcctcatatttggtgtgtagtgggaggcatctcagccccagcaagtgggagggagggttaatgctctaaacaaggaacttcctcttctgttggaggcgtgggttagtgatctgtgctgttgtgtgggaagccttgttgatttatccccttgatcttgcctccacccttcagcttgagggtgtgtgtgtgtgtgtgtgtgtgtgtgtgtgtgtgtgtgtgcatgcgcatgggcaactttctaaataccaaaatatacattctaattataaactagtgccattcgttccttgcccccaccctcccttgtttactttcttttggttaaagtgctgcttctttcgaagggcccctgtttctgtggcacagcctattccagatcactcaaacggktgtttgtgcttttctgattcctaactctgggctgccgaatgctttttcatctcctacaattgagctcagagccagagaagggcttttgaaggttcatttctgaaatgtacacatgtgtactgtcttgaagtccaagcatatcctcgggacagctgtgtggctttgagatctactcagagtggccatcctacctgccatgtttctggggggtggtacttttcagtatgtgaaaagagactgcttctaatactctatggctcttattcaagttcaagttccatgggaactgaatcacaaggtctggttttaggagtaagagagagagtcaggaagagatgattccttaccattttgtgtgcatgtatttatttctatttagttgttgtatttggactctaattctgggttgggatagccctcactgcctgaagtaattgcttcttagaaatagccactgcatttgttgctatcttcatgttacccaggtgggagcggagcggcccaggtgttgtcccatcaatgcacttgagtagagaatccaggatgaatgctaggcacattacatggtccccttggatgtgacaacaatcatatctggtctgtttcctcctaagaatttctgaggactttaaaatttaaccagtgggaccagtacagtttaaatgtattagctgcttgccagtaggagccaaatcataattcttagcctttaatctcctgagaaatgagctgagcagcgccatgtgatttttaggtagcttttctggaattagactagagtggccattcatgtgtttcaatctaagtgtttcactttaaagggcgaccttcctaaatattatcagctaaaggcataccctatatacacatgattcccgagatgcaagtcacagaaatagattgagtgtcatggagaaaaacttaataaactataaattctcagatacacagaatgtgaactgttaaattactatggtaattgataccatttagctattattatttaattatttaaagtcccctcattcttctaaacagggcagaagggtactttaataatgcactttttattgtgcattattcatttcatcgaatcatccatgattctggttatatctcaggttcttaactagtgttgagttcttgtaaaggaattgcttactgagttcagttggcaggttaatattaagaggtatcctctaaaacaaagttcaaaattgctggggtttgttcagattcatttgaaataatgcaaagattacagcaagctttataaaatgaaaattagttgaggctcctaaaagaaaagcccgtagcctggatggtgcaaacaacagaaatttacttctcacaactttggaggctgggaagtccaagatcgaggtgctggctaatatgatctggatctgtgtccctgcccaaatctcatgttgaattgtaatccccagtgttggagatggggcctggtgagaggtgattggactgtgggggtggatttcccccttggcgctttgctgctgttctggttgatggtgagtgagttctcaggagctctggttgtttagaagtgtgtggcacctcccccttctgtctctccctcctgcttcagccatgtgaagctcctagctccctctttgcattctgccatgagtaaacattccctgagacctccccagaagcagaagctgccgtgcttcctgtacagcctgtggaactgcacaattaaacctcttttctttataaattatccaatgtgttagtccattttcatgctgctgataaaagacatacccgagattgggtaatttataaagaaaaagaggtttaatggactcagttccacgtggctggggaggcctcacaatcatggtagaagatgaaaggcacttcttacatggtggcaggcaagagagaatgagagccaagcgagaacggaaaccccatatcaaaacatcagayctcatgagycttattcactatcgtgataacagtataggggaaaccacccccatgattcagttacctcccacctggtccttcccacaatacatgggaattatgagagctacaattcaagatgagatttgggcggggatggagccaaatcatatcacccagtctcaagtatttctttatagcagtgtgagaacagactaatacactgtttcatttggctcctggtgagggccctcttcctggtttgtagacagctgctttcttgctatatcctcacgtggtggagggagagatcatcattctcatgtcttttcttataagtgcactaatcccatttgtgaaggttccactctcatgacctaattacctcccaaaggctcacctctaaataccatcacagtggagattaggatttcaacatgagaattttgggggaggacacaaacacttagtccacagtagatggaatgggacttcattttataaagcttgctgtaatttaacagcttgaaatgggccaataatgggtatgtgagctgagagcctcatgctttttgtagggaggtaggtgcctgggggcactgtgtatcatcagaaggtccctgtatcctggttaaatttggacttggtaaggaccgtgtgaacgtgctcttgtccatgatgtatgcgcagtgggcttggagctgaccccagaaccgtctctgtcacagtgttgctggtgagtcttcatgtcatgccctctatttctgctcagtgcagaggaaagtaacttctgttcacacccatatgtgactaagtagtgtgtgtcctcttcttttttttttttttttgctgactctgcctttaataacacatgtgttgagaaaaaaggaaaaaactttccattccatgttttgtggcttcattttcaacactttattatgggaagttttaaacacacacacaaaaaagacaatactatgatgaacccccacttaccccattaygcagcttcagtaaccatcaactttctgctgttcttattttcagacatgttgccccccagcccaacccctttttgtgtcctgcagtattgtaaagcaaagtgcaggcatttagtatttcacccatatacgtggatgcatggactctgctaatagattaggcctaaaaacaacaacaagaccaacccataaccacaataccattaccacttctaacaaaattaacaatcattcattcacatcattagtctagattccattttcccagttgactcaaatgtcttgcatttagttcatatgttcctttaatttagtctaatttattacagccttcctgttttcgtaaaaatgccatttactggtcctttgtcctgtagaattttctgcattctggacttggttggttgtactctcatagtatcatttaacagcttcctctatccccatgttgcctgcagttggaatacttcaggggtggctctgaaggagcaactccatttttttttcctttttttcttttttcttttttttttttttttttgagatggagtctcactcactcttttgcccagcctggaatgcagtggtgtgaccttggctcactgcaacctctaccacctgggttcaagcaattctcctgcctcagcctcctgagtagttgggactgcaggcattcaccaccacacctggctaatttttgtattaatatttttagtagagacagggtttcaccatgttggccaggctggtcttgaactcctgacctcaagtgatctgcctgtcatagcttcccaaagtgctgggattacaggcgtgagccactgtgcccagccttcattttcatttaaaaaaaaaaaaaaaggtcctggctcattgtccttttggtagcaatttagagagatcgtactttttactcaaatgccttgacacttttgtgtgcttgttttcctcctatgaatggatttaggctcatttagctctcttaagaactttattttgcaagctggtctccctagctctacacctgtcctccttgccagttcagcctttattccatagctgattttctcttcctaaaggaaagagttggttttgagttcaagtatgctagccccactacttaagctgtgtaatgttggacaagttagtgagtctgagtttcttctcctgaaaaacggggatctatctcttaagataaaggagataggaaattcaatagtgcatgaaaaggacttaacacagtcagattcaatgctcaagacacattaggtttttttctccttctgattatatcattccaagttcaaagattttattttcttctgcctaccaaagttcaacctcctaagtaggttttcttctttgagcatttcagcgtttgttatacacacatctttccagcttctgttcccctgaactctggacacactatcctaggaacacactctttactttactatggcctttgtctacagtttccctcttggaatgtggttccctctgatctctgtctgatgcttcaaggaccagctgagatgctaccctttctcccacatcctcccatccctctttctctccccaatcagtaagcagcctattgcttgggttcagtagttccacagtgctttatatgtgccactgtcattgcacacatctctctccaacttgtattatgggtgtggctgtaagagtatttatctcccaggcagctagtggtaaaaagacagaaagctttcatctttatctttgacttttgcagagcaagtccgggctcctgcgcatggcgtggtgccagatgactatttgttgagtcgtatggattctgatcactctcacctgtgtggaggccactgtggcaacccctccctgttctgctgggatgaggaagggcgtatctgactctctgtgctcttgggaaccccgtgtacctccaggcctagcaaggggaagtctaaaccaaagatgccagaagtacattgtctkygaccactaactgtkgcaacagagtcagcatctaatgtgttgtttcttagagttatttgcaatgactttgagaacaaaagctcccctgggagggtcagcagacttggtgtgtgcaccaggcagggctcctggcaggcctgcccagcaggtccccaagcstgggcctgagccccgacagcagttgcagccacagggcatctgcagttatcaaaactctcatctgtacatcattttccaatccgtgttctgctctgctgtttagggggctagagagcagaaaagagagggtggaaaagtgcttyatttgggcagtggttttatgattaakaatagagtgcctttgatattaaagcaatattattaaattattaaattagttagaagtttcggcattggaaaactagagcccagtaccctattgtgttactttctaactttgtggccttgggcaagttattgaaattatctgaacctcaggtggttctttgctaaagtagacagaagatacttcatagggctgatgaggaatgtaaggaaattttaaagggctgtgcacgttgcttgtaacgtttactaatgggtacattacattatgcttgtcagatagtcatgtgagttacaccctcccttgttggtaacgtggttgagacctggaaatgtacgcagctggccaaggtcaccttctagtagcaattacgctgggttaggatcagtgttggtgacttcctggtgttcttggcataaggatatacatcatacttcatgtggtctagtatgaacctttcaatgtttatacttcatgaaactcttgtttttcttaaaattctccagaattttgattgatcatttctcctgatctttgaggagggaggaagaacttctctgctatagaactcgttaatatgcctcacattttcagaaagtcctctcaccgtggaaagtgacagaggtggagagagtggatgggaacatgtgcttctgtgatgctttgcgtgccagggaattgtttctttgctaatgatctgtgtcattaaaatgaacactggatgagcgaagacggtgaaacatttaactgtaggttaataattcatttagcaaatattctaaccttcaggattgtatcagcagctaccatcaggagcgcttcaggcctgtccctcctttctttggagtcgaggcttgaggaacttgctcctcccacagctacaggtcagcgacgatgatacacctcattaccctcgtgtggggtagcagtaagacgtttccagaagcatccgtctagcaggagctctggaatgtaagtaacccaagaagtggctgttctgtaacttctctgtgatggaagtctgtgataggaaggaggccttttcctgcaaccaggatgtctaaccgcttcctgatgggcatggaggggatcagtgagttaaagtttccggcatctgttgaatgcgatttgtgtctagtagttctgtcgattataggcatctcccagcagcctcaaggaaagtcacacatgcttgtatatcctagggggaaaagggagatatttttatgcaaagtaaatgttatgaatccctgttttatttttttgtgtttgttttgttttgttttgttttgagatggagtcttgctctgttgcccaggctggagcgcactggcgcgatctcggctcactgcaacctcagcctcccaggttcaagcgattctcctgcctcagcctcccaagtagctgggattacagacacatgccaccatgcccagctaatttttgtatttttagtagagatggggtttcaccatgttggtcaggctggtctcgaattcctggcttcaggtgatccacccgccttggcctcccaaagtgctgggattacaggtgtgagccaccatgcccggcttgttttttataagttagcaaatatgatcttttctctggtgatatgccaacatagttgtaatgaataaaatgttacagaagacataacatatgaaaagttattagctaactattttatttcaatgtgatggactaaaccacacactgcatttaggcataactttgagctgatgacttcctgtactgtccccaaccaattgtcacccctcagagggctgccacactaccctcttgttggcacaggaattggttggtctgggcttttaaaatcagattcatctttctgaattccttcctcagtttctttcccatctgcctagctcctgtgccccatccgggcattccaggccaacccccaagtgtctggccacggaagtgaatatgtttgggatttaaatcatcagttgcctttgaaagtcacgctgcaatagacagataacttggaatgcaggtgaggcagagaattcactgccatcaagtcgcagtgtaaataagatcacagaggtgatgataacctttcacgggttgatgataggttaatgaaaaaagaacttcagagcattttaggtggatattcgttaaagcagactcagtgggatcactctttagagttgctcttgatggctgtgtttttttttttttttttttgagacggagtctcgctctgtcgcccaggctggagtgcaatggcacgatctcggctcactgaaacctccgcttcccgggttcaagtgattctcctgcctcagcctcccaagtaactgggattataggcacctgccaccatgcccagataatttttatatttttagtagagacggggtttcaccaggtcggccaggctggtctccaaatcttcacctgtttctttttacgtgactgtggcctttagaaatttttaaacgactcatgtggcttacattgtggcttgttttgtatttctgttgggtattgttaatgtatagaagacattcctcggctgggcatggtggctcattcctgtaatcctagcactttgggaggctgaggcagatggctcacctgaggtcaggagtttgagaccagcctggccaacatggtgaaaccctgtctctacaaaaaattagccaggcatggtggcatgcacctgtagtcccagctactcgggaggctgaggcaggagaatcacttgaacctgggaggcagaggttgcagtgagccaagattgtgccattgcactccagcctgggcaacagagcaagactccctctcaaaataaataaagaagacatttctctactggctaagaagttggaataaatgtttaccgagtcccatccaattattaaacagcttatgattcttactaaacagggaggattaggagaagggaacccctggggtggttgaaatgggtgaatctagccaggagaaggtttccgaggggagaggtggccttggaactgagttttgaagttggagactgaaaatcctttagggmgaagaaaattgacacaaccgggctttctgacagacaaggactggcccacccctgcctytaaggaaccctggggtctgggagaggacccaaaagccttcttctaggggagcacgcctggcagctctgagatatgaaagagagaacccagcaaaaacaggatgtcactgggtcctcgagtctggggatcagggtaacccaggctcagtgaatttttctgtctctgagcccctcagatgaattagcgagttcttcagggagggtctttttctccatggctggtactgtctgactgggtggagacttatgtcccaggaaaaccgaaataactgcttttcttgcaaatgctttcacatagctctttatctggtctgtggtttcagggaagggcccttctgcagtcaggaattgtccccagcctttatttagagggctaagctagggaaatggttctgaatgtaacatgtttctaactgtagtaatctatgcccctccccccccaccaaaaaaaaaaagaccatgtggactgtatttggtagccataggtaggtagagcagtaaaatacaatttatatgattgtgctgtgtgtgctgtgtatgtcaaagcatgctcttcacacggcatgtcacgctcaagttcttgaactgccacacgtgactgcctggtgctatcagcatactttgtggtatgttatcagctgaaaccagaagtctttttgaaaaatgtcattgttgcatggggctttaatactgaaatcctaggaggtggcctttcttaggtcataattttttaaattgctgtaatgcatgtttaaagaacgacagtacacacgagaagacaaaaagtggcctgaagctttgggtggaagtcaggtagatttgattcagcaagtaatagaagtcaacatttaatgaacacttgctttgtgccaagcacactgttgtaagcactttaaatatattaagttatttaggtctcacaactttrtatgatagtttattatttccatttcacagataaatgagcttgggcacagagaggtaaactgatgtcctcaaggtcaacagctactaggtggaggagttgaaatttgaatccgggccatacaccattgttaatcgagcatttgtgttaactaccaagtacttactgggccctggggatggctctggagcagtggataagtcagatagctccgatccttgcttgccaagccataccatcattctcagcttcagtttccccaaccgtaaaaccagcacccaaaccctgccctgcgcacctgctaagatttgtttgttaggatcagttgcattaatgcaggaaaatgtgatgttcgtgcatggcagaaggctgggttgatcaaaggctatgcatagcttccatttgcaaatgtcaggggagatggggtaaaaatggaaggatcggagagaagggcgaggaaacgcggcttctctatcttagcacgttctcaggatttggttgtgtcaggtccctgccctgcgccatatatggatgatctcattcttgtccatcctgtgtgttctgactgaagtcacacctagcatatgtgggtgtcaagtcagttgaagcaacaggagtgtggtttcacagccctttaaaacataagctctttggctgggcgcggtggctcacgcctgcaatcccagcactttgggaggccgaggcaagcagatcatgaggtcaggaattcgagaccaatctggccaacatggtgaaaccccatctctactaaaaatacaaaaattagctgggcgtggtggtgcatacctgtaatcccaggtactcgggaggctgaggcaggagaattgcttgaatctgggaggcggaggttgcagtgagccgaaattgcaccactgcactccagcctgggtgacagagcaagactccatctcgagggaaaaaaaaaaaaaggctcttcagcgcttctgttggcctgtgtgtagtttggccactgtctgggaataccttgtaccaattgctgtctgttaaaaggatgaaagatacaatgttcggagacagaccctgggtgacaatgctcttagtcttttccatatctaggaggctgccgtaagtttgataattgaaagattccaacctgaaacagctcagtgtttttccccaagcacaagaacattaagtcctgaccttgtgcctttctatgactcaacacagagagagccttgcgtcctttcttttggttgtcgtgctgagtctatgatctttwcgaggtcatagcagtaggaaccttaatgactgaagatgagtattgcagggattcacattagtcctgtgttctttcttgagtaacagtggtcagtagggtcattaccattaatggagcaccttgaggagtaatttgcctgtgccgggagctttttgtgtactctgtcttggctgaccctcaagacagccttgtgaagtaggtattgatgcctgaattgtatagccagaggtgccaaggctcgccagggtcatgtgattgtcacgaaagctggtcaggaagcatagctcccatctcagcgcccccgactccatcgctgctctgtgctgggggtttgttcagggaagggctgcttcctgctgataatgatggacacctctccttagaggtttccatgctttgtaccacacagggaaaacttttactgtgaaaggccacacagtcaatattttaggctttgcagactaccgtctctctcacaaccactcaacactcccattgtagagcaaaagcagccctagataatagataaacagatggccctggctgtctttcaataaaactttacttacagaaacaggcagtgggccggatttggcctgctgccatagtttgccagctcttgatttagggtttgrtctaaatggaaatggttattgttaatactattatttttggaaagtttatgaaggatggcaggttgcccacaacagatagaaagggaaactctctgttttggagaagattaatctggatccattcctacttggagtatgtctcatagaggctggatgttgtagagctccttgagggtagtcccgggtggaccccatagtactcgatgagtgcagacctgggcccagtgggcattggataaagatggcattttcatcatggcgtactgatggccttgtggtgtccatctcacagcagtccccatggccttggattctcacattttctcacttacctttccttggaacaccgtctggtcagtatctgggggggggctgctatttgggatgaagactcttcctataatcctgagcctgagaggagagagtagggaaacggctggactttcttggagtcactgtgcttcccaccaactttgatgtggagacccccaagcctttccaaggtaatatatctctgggaaatagggctcccttttacaaatgctggctttatccctctactaaggagctgtgatgggctgctttgggggcctgaggagttaggggagagagggcaaagtgagcttccagtgagacgaaattcattgttgatgtggtgctgcttggaggatgtgaggttttcttaagcaactccttattttgtagcccacccaaaacttttgtaacagaagagagctaaagttaaactgcacccaaagagtccattgttggtgtgttgaaatasttaaaaaaaaaaattcaaaaacactaggtaatagtaacaacaaaccctttcaccggatcactcatctgcttctgaacatcaactcataatctttggagcaactctggtagctccttggtattcttttgccccagttttttcctctgttaataaaaggctttgaaatgctgggatggggtgagtcttgccacctcttgatttcagacattaataaagaagctgatggtccatgcccaccataaataggattgcagaggctatagaggctaaatctgctttaggcctgctggtaaactgtattccccttgctactcttgaaacgctaggttgattggagacatttgtttttaagattgagttctctcaggacatgaccccactgttggtgatgggttggatcacacagcccatggggacctgtaggtggctccagaggttcttgttcggcctctgattttagagagttctggattttaatgcacatgacttataccttgatcctgtgtcctgttatcaaggatacgtctatatagtcattcaggtatttcaaggaacttgaattgccttgcttatttttatagctgacgagctgtaacaattgaagaagtgagaaatgatttaattcttttgaaatgagctaaaacatgatggaagaaatagtaatatttcaacatgccacacatctttttttttatattagaacatgctttattgaggataaacactgttgttagctaaaagtacaaagttttaggatgaataagttgtggagatctattgtatagcatggtgactgtggttaataagaagacttgaaaatctctaagagattagatcttaaatgctctcactacaaaaaatatcttagtcgttttacaacatatacattcatcaaaacatagcatgtatactgttaacacataacaattttaatttctcagctatacccttaataaagctaaggggaaaaaagaaactttgatatctaacaaattccacccaaaagaatcgtatttcataaaaaaactctaaatctagatgtatccaaacatgaattactcagcacatacataagacataaatagtatgaaaatgtactttgaagtagtttttgaaaatgtaggtaaattccttttatttaaagaggaatgactgcgtggtggctcatgcttgtaatcccagaactttgggaagctgaggcgggaggatcacttgagcctaggagtttgaaagcagcctggtcaacatagtgagaccccatctctacaaaaggamaatttaaaaattagctgggtatggtggcacatgcctgtagtcccagctactcaggaggctgaggtgggaggaccatttgaggccagagttcgatgggaggaccatttgaggccagagttcgaggctgcagtgagccatggtagagccagtgtactccagcctgggtgacagaggaagactgtcagagagagagagagagaaagatgtaatggtgcagattttttttttttaaccatgaggaaaatagcttttagctgcaggttatacaacatgtttatttagtgaaaaataggtgatacaaattttccttcaagatattaagcagtagctttctaatggctctgttctctgtggatggtttaaaactcacgggcattttgtcttttaaagcacttgagaaaccctgctttcatcacatccaaattcttctgtcttctcagtaatagtttaagtttctagggatcttgctattgcatttcttacaagttgtctaaattatgaaactgtggatataacttgcttttaaaagtcagtagaagtgtaagagatgccttatctaaagataatttgagaagcagcaagactcagttattctttgtgacccaggaaaatatttttagattttttaaatgaatgaatggtaaataaatgactctatggtcatttatttaccaagagatgctgattagatggcagttatattcattattacatgttctcccgattgtgaagtgttcagtatgtaactggctaaagatgagatggcacagccattgaaataaaagactaaggcttataatcccatttataatcccagccttgctaatattccagtgagatggacagaagaaaacacaaaggaatttgattcctggtttcccaaaggagcctagacaagttgaggtttcagcgtggcccaggaatgcctttaaaaaatgagttgaatacaattttttaaaaccctcactgtccattaagtgtttttaaagtgtgttttattttacatacttttttctaaatagacattcacagtggaaaggaggggagaaatacagcaggaataactagaattcatttgcatgagcagcttctgaaggaagatatcatagtttctttgaaatcgggtgagagaccttcgtgccctgaaagagcaaagattgttgctgtcaccacttaagccgaggaagctgggcgagggttttgtctctttgggaacatgggcaaatactttcattaacagcttagagtactcaaaatagtaagatgcttatgatcctttttgctttctggatacgcatgataaagggtttaagtcaaaggttggagcttaaaattgaaaatcatgctgagcgtcaaccgagaaaatgagatttggggacagtagttcaaagaacagaaaaaagagaaaagcttggtaaactggtgtgctttaagcttgtgataccccagcggaaacatatccgcatagctgttctcaaatcagcgtcctttggattctcgtgggaagaataatttgagtttatcctaagatttttgccattgatagggatcgtgaagatgggactagccacccaacattcattggagccttatattttcttctacacattgaaaattgtattttcttttaaaaattggtgacaaggtcttgctctgttgcccaggctggaatgagtagcgcaatcatagctcactgcaacctcttgggctcaaacagtcctccygcctcagcctcccgagtagctactaggactacaggtgcacgccaccatgctggctaattgtttttcgttttttcgtttttgtttttgttttttgtagagactagggtctctccatgttttccgggctagtctcaacctcttggcctcaagtgatcctctcacctcagcctcccaaagtgctgggattataggtgtgagccactgcacctggctgaaaaatgcatttttgatgcactattttgagagggtctctggttcaggtgtttgaacagaaatgtccttctctacatttgggcctcaagacctatcaatgccacatatatagtaggcccccagtaaacgtttatggctcaatgaatctgtgtatgacatacctaatttcattcagtttatccagctagacattttcttagaaaaatgacttaaggggtggacacaaattccataaaatgttttaagccctcttatactgaatcataatcggatgacttaggtttctccatgtccatttggaattatctcctgatttcttcataacattctgccaatagtattcagacctcagggctttgctcacagcctctgtagcagtgttttccagtttgacatttgcaggttagatttaggcctggaaaccccaccacgtcctgctcaagggacctgaagtggagagagcaggtaaatatttagacaccagtactatttagcaaaattggaggcttaaatgtaatttccttgtttcattcacttggtgaaaagattaattatgtttacgtgatgctaaaattaaattgtggtaatatgaaaatcagacagctcagaactcaaatggtaaatgcatcaagaatctgttctctaaaatccattgtggaatgagcttggtgtgaagaaactcattaattagaaattctttcttagagaatgagcattctaccatgttctgctactgtctagctggcaattgatctcagggactttggagaaccaagactttttcatctgtggttgagatcaaagaagacagagataaggttgccaaggaaaccaaaatgctacagaattatgtgctgctcatgcatttcaatgtggtttgaggtttgggaggctttcttttttttcttttggcacaaataatagtacatgaaaatgagcaatgcccatgttcccaggtcttaaaggaaatgaccacaggcttaatgtaactcaaaccgtgggcctaaagggaatcctattctttctcttctttctgtactcaagcatcagcaattaatggcgtgcttccagttggcttctctttagtgtgctttgtccctctccatcacagacacatacccacacccacaaactttttaataactttttcctgactttaaataaattacttgcacagaatttcaaaaatacaaacaattctctgacaacatataaaagttacctgtaattttgccatttggaaatacctaatgtagtattttgttgtacttttctcctaatatttatagacacaatgggtacatactattttaaatatatttataacatgaaatcccaaagttttgagtacagattttcgtggttttttttttttttttttttttttgagacggaatttcgctcttgttgcccagggtggagtgcaatggtgcgatcttggctcaccacagcctctgcctccccagttcaagcgattctcctgctgcagcctcccgagtagctgggattacaggtatgtgccaccacgcctggctaatttttttatttttggtagagatggggtttctccatgttggtcaggctggtttcgaactcctgacctcaggtgatctgcctgcctcggcctcccaaagtgctgggattacaggcatgagccactgcgccgggctagatttttgtttttaaatgatcatattgtaatcatttttccgtggctgcaggaacaactcctatgaacacacaactgtttatttggccatttcccccactgttggttatcttttgcttgtagagttccagtattctaaatgatgctgcagaaggcattcctgtgcatctttttgcatatcttatttccctaggatggagtcctcatgtgggattgccgagtgagggccgtaagcatttgtaggcttctgttgtattgccaaatgcttctttggaagtcttattaacactaggggttaccaatttttttctctctgccaaattttattgatcaaagatactcagttttcccccttaattatgcagagaaaaagaagaatagcagctaccatggattgagaacttattgtatgtgctaagtctgttattgttagttctcacaatggctggctcaagtaggtttcattgctcctgtttcacagatgagaaaactgaggtttaacaccgtgcttaagaacccagaagagccgggcgcagtggctcatgcctgtaatcccagcactttgggaggctgaggcaggcacgtcacctgaggtcaggagttcgagaccagactgaccaatatgactaaaccctgtctctactaaaaacacaaaaattagccaggcgtggtggcatgcacctgtaatctcagctacttgagagtctgagccctgagaatcacttgaacccgggaggcagaggttgcagtgagccgagatcatgccattgcaatgcagactgggcaacaagagtgaaactcatctccaaaaaaaagaaaaaagaaaaaagaaaaaacccagaagaaacatggggctgtcttaacaactcatatttccaacttaggtggatcaatataaatatgttactagctaaggagatgcctagagatctaatagttgtaaagcctccttggacttaaggtgggtgattggcaggaagatgggagctaactgaaacttcaaagggtaggctgactttgggctccttctgttgaaaatggagatgtttttctttccacagtatagtgtcccctccctagtctttgggtgtgtcatcytagcatgtggagcttttgtaaacagaaaatttacagtgagtgaaagctttatctgctgattgattcgttaaattaaaaaaagccttcaatttctgcctactttccattcctatcacatccacaattgaaagcatgtattctgcacctgcctcgtttcagagtttaaatatcttctcagtgaactgcgcctgttatgaaatgctaartacttgaaaccaaaaccacatggtggttattctggaactgttttcctttcaacttttggagactttctatttactgaaaactaagggtaaatgatttatctttttgctggatttagctgtctataaatttctctgtgccttgaaaaaaaatcacacttattctaatgtgtcctcattcttaataaccacaattggcgggaagaggggaaaaaagatttatctgccagtgagccagttttttgtttaacatctgggtctgatactttttaaattctcttctgtttatctcttccttttattcctactctggtctctccatgcttattggtaaaattagaatttattttcaggtggggaacactctgactccagctacagatacttgatttgttttaggggggccatttgagccaagcaaggtgataaactgaaggatttttacagttctgacatcagaccatctgtccgtctttctgtccagccatcagagcttcttacttcacagcatgttgctaggcactgtgggagagagataccacgataaatcaggtaaagagcccgtttattgagtaatttctgtgttccaaggcctgggctgggcactttccatatgttcttatttaattcctgcagcaactgcacaaggaatcttgttttaactgtacgtttcaaacaaaggaattgaggctcagagagaccctgggactagaaaagacttgtggttatttgaacccatcttaattgkgtctcaatccttttattcttttctctaacacggctttattttctgataggaatgttcactgttttcccaagttgctcacaggtatatggggattggggggtctggagggagctctcttaaccagcctgcactgggcctgctggccaaagtgactgtggtcttccattcccctggtccatttgacccatcagggcactgggggctgtgatggctctcttccttgtcccctgccatgtcccctcccccagatgagctctgtgcttactgatcagttgcgggttttcccccagacttgtttttttttttttgccacatgtacttgcttttgtaattatgtaaccaaaatagtacatacacggatgacatattagtgtgaaaagagaactcgtttttttgaaaastaagttatgtgttttggaaagagttgcaaaacaacttataaagaaattcctgttgtttaaggtgtggttgagacaatcagtataaataaagaggggatggtgtaggtaaaatctagaagggttgaggccgggcacggtggctcacgcctgttatctcaggactttgggaggccgaggagggtggatcacgaggtcaagagattgagaccaacctggccaacatggtgaaaccccatctctactaaaaatacaaaaattagccgggcatgggggcgggcacctgtagtcccagctactcaggaggctgaggcaagagaatagcttgaacccagaaggcggaggttgcagtgagctgagatcacgccattgcactccagcctgggtgacagagcgagtctccatctcaaaaacaaaacaaaacaaaaaaatctagaaggattttctactttgtaagtagtgaaactctccttgaaggaacctgaaatctgacattgcagggtgtgtggatggggtgtggttgttgccggaaagaccacagaactctagtcagcagatccccactctaaagagaaggccttggcccttcayaagattgaggaatgaatgttttccgttccagtaaattgtttaaggtgtgtgcgtataattttttagtcctttcctaccccgactttttaaaataatcgaacaaccatcacatcagagaaggcagctcttccgtagaaccagagtgactgcgtttctcagccttggctcagtgaaataacagtgggtagggtaatcaagaaggctgggtttgtatcccagcttgacccatctaccagctggtgaggcctaggggaggccagacattcagtttcctcctctgtaaaatgtaaaatgagatggacaactgtccagcactgcagctggggaggatccagggaataaatacctatagtctggatgaaagcacctttcacatagtaggtgctcgttaaatgtcagccacaagtcataaactgtttatattgttctgcctacttataatgtcagccaaatgtcataaactgtttatattgttctgcctacttataatgtttaccttattcactattatgattattagctattggggcaagaaattgaacgaaaggttaggctttgcagatgatgaacatttagttagtaatagtcatagcactacatagaaaagaaatctggggctgggcgcggtggctcacgcctgtaatcccagcactttgggaggtcgaagcaggcagatcacttgaggtcaggagttcaaaaccagcctgggcaacatggaaaaaccccatctctactaaaaatacaaaaaattagctgggcatggtggcacagcctgtaatcccagctactccggaggctgaggcacgagaatcacttgaatacgggagtgagccaagatagtgctactgcactccagcctgagtgacacagaacaagaccctgtctcagggaaaaaaaaaatctaagtaaggtaataccatcagaaagatataatagtgtatttaatagaatatattcttatagcactttataggaaccacttaaatttttgttttgttgtgataattttacatcttattaaggcaacacttttgttttttggagatggagtcttgctttgtggcgcaggctagagtgcagtggcgtgatcttggctcactgcaacctctgcctcctgggttcaagcgattctcctgccgcagcctcccgagtaactcagactacaggtgtgcgccaccaaagcccggctaatttttgtatttttagtagagatggggtttcaccatgttggccaggctggtctggaactcctgacctctagtgatccgcctgccttggcctcccaaagtgctgagattacaggcatgagccaccacctgggccaggccgccaatacctttttaatttakccccttgctacatacgcatttgaaaaaataaaattacttttttgttgtgacaatgtgtagtaagtgcttgccagttcagccttttgatgaattcaaactggcccgcccagttagttaaaattctttacctcatggagattgttctggatttccaaaatgatatttgtttgcttgtaacatgatagtgataattactagtgattaagaaaagcctcctcctctgctcctcattcttttgtggcctcagggcccttgttaccctcctgcatcctggacaaagaggtgggaaatgcgtctgtgatgggtgttactctgaagacccctaggttattaaatgggagatatttcagcttcatgcttgaatggtggtaatgagctctgtggcccatttctattctccggggagaactgagtagctccaagaatgtggggagagcaggtgtctgcttatctcatcacagaccctccggtttcctgacactgtaccgaagggcacggatctccgccggggaaggaaatttggaaatggaatgtctgtgtgtgatccccttcctgtttcagctgggacttttctcattcccagcttattttaggatgatgtgggcttcctttgaagcrccacttatcaacattactaaactctaagataggcccagtttggggtagtggatttgatcacaaacactgatgtgtaccttcttagctccatgggttgaagagagagacgcttaacaattgaactgcagtttcctgactttaagccttttgtagttgtgaaatttgaaatttccttggatctctgtgataaggtgaaataattctgattaacatctttgttagatttattgttaaaggccacattcttcaactcataggactataccatcagcaaagtcattgtcttctgctctaaaaagatccaggaataacagaattttatggggagaaagagaccccataggggaaatgtctcaggtgattcttctatacattaaagtttgggaagtactacgctgctcccagctggaattaatctactccccctaaactgccaaaccctgcttaacctccttaatttatctaacttgtgtgtaagtcttctataagaggatatgttctttgagggcaagttcagcctgatttattttcatgttcccatagcaacttttacacctgggctcagtaaacgtttgcacagaatgaacgaatgagcaagtgtatacatccaaaatataaccacaaaaaacagctgtttagcttgtgggggaagattaccccccctcacttagacacccgtcggaagcatgctgctttggggggagaatctgagacccaaatgtgacacataaattccaccccttctagggtgtgaacggaggaggtgaccacctgtttcctgtaggccccagcatgaaacagcagctgggccaaggccaaggttttgcgagtgatctaaccccctccctcctgctttctgcaagtgttcagcacccatcttcccaacaccagatacccagcttaccaccagcctgcccatgttggagccgtgggtctggcttcccctttcctgtgggagaagggccttctggggtctcagcccccaccccatgctgctcaggtttctctcctgtatattcctcactctagattggccatgagtgtgcatcactttaatgtcaccatcccaaaactcccctgactctgtctccctctctagttaccactccattttcctggtccctttcaccgaataaggttgaatgaataaataagttcactttaaagtctagccatcttatttgagctcttcatattgagggagtaggatggctctagaaaagcatgaaccaacacggatgcttcaggatctgacagttctggagccaggtgcttcttttgtggtcttaggcagggctgygtttcctcatcttttagggtacacgtccaactccctgggtgatcatgctattaaataagggaacatgtaagatatagggcacacagcaaaagattgaaaattaattccttccgtagccatctttatggatgccagaggaaaatcccctcttagttcagagctggacacttctgaatttaataagtaagacctgggagaggataatttcggcagagtcagttgctattggctccttgcccgcagcaaatgctgactgttggttcctctgcagaggatcaaaggtcatcgtgcaaggtcccgatggggccaagaagtccttgtgccaaatgtaaagtggttacccttcaagggcaccctctccaatggcgatgggtgcttaggtactttcggattgtcaaggaagactttgagactcttggtcagctgtacctctaagtggacagctgggtacatttcctgagcaggagtatgaggcctcagtgatcatagataaatggacacagaggcagtcaggcaaataaacccacatttgtcacagctgtcagaatgatcatgttatgttctctgccctttggaaaatgttttggaggtaagctccctcagttaatgacctctgttacattttcctagtatttagagtctcaaacacatttagaaaatagagaaaggccaccaaactttggcggggtgcagtgactcacacctgtaatcccagcactttgggaggccgaggcaggcggatcacttgaggtcaggagttcgaggccagcctggccaacatggtgaaaccccatctcaactaaaaatacaaaaaattagctgagcatggtggcacacaagtgtagtccgagctactccagaggctgaggcaggagaatcgcttgaacctaggaggcagaggttgcagtgagcggagatcgtgccactgcactccagcctgggcgacagagggagactccatctcaaagaagaaggagaaagttagtagctgaggttccagcacaggaacccatatctgaggcagggctgcgctctttggactctgcgctcctagcctaaggagcctgtcgaatgcaccctgcaccctccaccctccagtgtgaatgtattggttttcctgcctttgtgtcttttaatgttagagagctgagtgttcttccttaaagactcgttcaggtgcttggtgtatgtaacagggcagtttatttggcctaaatgagaatattgaggcaggtaggctttcttgttgttttgtttagcaactagatggaaggcatgagagcaatccaataaaattgggaatccgggagccataaaatatagttgattccatctacaaatagggcaattgcttcagagagaataacagctcaggacactcacacaaccagtgattgagctcccgttgtstactagatcttgcagtgctatggagagtgtaaagatgattaagctactctccttagcctcaagcaacttagcatggcagatgggagataacctgaaagctgctgattagaatagaccaagagtgataaggaccttctgtgctctgggtagggaggcatgggagatcttataggaacagaggcgttccggcatttgcctgggatgtgtcaagcattacagatgtctctgttgacatagatttctctgctgagctttgcagtgaagaagtcctgagtcttctcagaattagataaccacatccatgtttctacaactaactgktgcacctgctacctgraggatgaccaaaccagagcttctctgtgtacagactgctgactttaagagtttattctctaaggtgatctagagtttcctgtcatttgactctgttccctgtatttattgctttcttccttttctctgaaatgctattcctttaccttctcttacctttttaaaccctaaaagcaagaaagaactttacttataggaagaaagagctagaggaaggaagtgatgtttggagggtaaataaatggaagtttgggcagctttaacgttccaggctttgagctaggcattgagcgttaactcttacaataacctggggagaatagacagtcatttctttttgtagataagaacagagaatcagaggacagttcattatttcgtacaaaacaaaaagtgcattaagactagtaatgttttaaaaaatcatttgctgtcttttaaactcacagcatagaacggcacttcccaaactccaatgtgcatgggaattgcttgggatcctgtcaaatgtaggttctgattcagcaagtccagcacagatgggtccccaggacactgcatttccgtcacactcccaggtgattctgctgctgctgattcagggagcacactttgaataccaaggacatggactgtgcatttgctagcattttttttttttgaagctacaagagggaaaaatatttagatcaaggaaatcagaaggtttctggctctaatcagcccatcacaaaaatgagatgagtatttccctgttgtcataaccccttagggtgaggagtgtatccttggtgacagaccaaaatcaaatcatttttacaaatatttatggagtatggtttgagaggatgaagaagaaaagcatgtggaaacatggggcaaattgggactttttatatctctcatttaaataaagacttgttggctgggcagctcacgcccataatcccagcactttgaaaggccaaggcaggaggatcacttgagtgggaggagtttgagaccagcctgggcaatgtggtgaaatgtcatttctacaaaaaaaaactataaaaaaaactacaaaacaacaacaacaacaaaaaaaaactagccaggtatgatggtgtgcgcctgtagtcccagctacttgcaaggttcaggtgggaggattgcttgcgcccaggaggttgtggctgcagtgacagccatgattacatcactgtcctccagctggggcaacagagtgagaccctgtctcaaaaaaaaaaaaaattaaaaataaataaataaataaggactggtctatattttatccttcctactggtctcaaaggaagccacctagagtgggtcattgtttgacattttgatgaatttatactttgatacataaattttgaaccagaccatatcttgaagtgtgagagaagtaattatatgaattgcctttggaggctaattctacctgttctctcagtgtggccattactcaaacattttgggaaagcacttctagaaccaccgtcagaaatttaggcggtactaggatcaacaaacattacttcagaaggcactgaagggtttttttgttgttgttggtttttttttttttgagacaggatcttgctctgtcgcccaggctggagtgtgcagtggtgtgatctcagctcactgcaacctccgcctcctgggttcaagtgattctcctccctcagcccctcgagtagctgggattacaggcgtgtgccaccacacccagataattttgtatttttagtagtgacggggtttcaccatgttggccaggctggtctcgaactcctgacctcaagtgacccacccgcctcgacctcccaaagtgcggggattacaagcgtaaacccactgtgcccggcctatgataggttttcacctactgagaatggacttaatttttccttttagraataagagtcagagctaaggcccaagactaaggcaagtgacaaagccactcaatactatatgtgatcaggagagtttgtgaaggacaaggactccttttattgagtcacttagaaacctaattctgaatgctgttcttaaagatgagttcccaagaggttttgaccaaacataaaattattaaggcctttgatgcctaaaatgacaacaaccctttggctggagaaatttccaggttgtggcaaaatccatctttaaaaatttttttttaattttgtaattttaatttcttatacagatggggtctcactatgttgcccaggctggtctcgaacctctggcctcaagcattcctcctgctttggcctcccaaaacactggaattgtagatgtgagctaccatgccccgcgccaccttattttttactgaccttatgtatgatatgtatgggttagtgaaaggcaggattgaggccgggtgtggtggctcatgcctgtaatcccaccactttgggaggccaaggcaggtggatcacctgaggtcaggagttcgagaccagcctggttaacatggcaaaaccccatctctactaaaaatacaaaaattagctggatgcggtagcatacacctgtagtcccagctacttggaaggctgaggcagaagaatcgcttgaactcaggaggcagaggttgcagtgagctgagattgtgcaactgcactccagcctgggcaacagagaaagactccatctcaaaaaacaaacaaacaaacaaacaaaacctaattctgaatgctgttcttaaagatgagttcccaagaggttttgaccaacaatacaattattgaggccattgatgcctgagatgacaacaaccctttggctggagaaatttccaggttatagcaaaatctatctttaaatttttttttgaattttttattttaattttttgtagaggtggggtcttactatgttgcccaggcttgtctcgaactcctggctgcaagtatttctcctgctttggcctcccaaagcactggaattataggtgtgagccaccatgcccagcctcatcttattttttactgacctatgtatgtgttaataaaaggcaggattgagaaacttgttccttacctttttttttttttttttttgagacagagtctcactctgcttcctaggctagagtgcagtggttatggtcatagttcactgaatccttgaactcctaagctcaagggatcctcctgcctcagcctcccaagtagctgggactacaggcatgcaccaccacacctggctaattatttaaatttttttgaagggatggagtctcgctatgttgcccaggctggtctcaaactgctgggctcaagcgattctcctgtcttggcctcccaaagtgttgggcttacaggaatgagccactgcacccggatgctccttaacttttctcctctttctctttgctttctgttaaaaaccaaatgacacaaccaccatcatcagcagcaggcccaaagctcagatctgttattccagtagctgcagtggaagagccgagtgggtggacaggcagtgggggaagcctgagytttgctgcctctgcctttggagggccgtgggtgtgattctgtaagcagtggagagccacccaaggcacaatgggatcagacccgctgtaggaggttggctaagcagtggtgctaaaagcagtttgaattggagagacagaagctggcaggcccgagggctttcatagtcagaacctgaatggtggctttgggagtgaagtgagtggactatggaggggatcagagaaattttagtgccagagatgctcagactcaggatgagatgaggggcagggtggcattgaccaggagttaaggtctggtgcacggtgaggtcaccaacaaagcctgggagcatggaggaaaaggagagttctgaggaggcagtggcctgcgggccaggacagggtctgagctgtgcagcagtgtcgggactgtcgtgtagcgctcgtcttttcctagcacgtggacgtactctttagggtccagaagggctcatgtcttgtgaaatcaggttgctgtgtttgctggctctggaagtaaagggcgttttgtgtcattagggagattggtgggtcaaggtagtgacctttgtctgtgctgtcctcgggagcacccagctgtggcagcgtgcctggaatccgagtccaggagacctggcctgtccccgtgccccaccttcccaaagctgctgattccttactctttgcctttgacctctgtgctgcgtgtatgtttcaggctcaagggcgaatcctcagggtgcaggccaatgaaatgctcaagtgctcycagtcctccttattttccctttcttatacacatgtttctggctccaggtgtagttggtaactttttatctcagtgatgatgctgccttaaatacatgtgtatttaggaacatgctggtaggtggcacagcattgcaatataccaagcaggttcagaatgccatggccaaaggcctccaaaggtttccataatgatgagaagtaatgagaggcagaatctggtgacttgggttctaagctttatgtgttgatagcagagccagctggtcattttttttgtattagattttgtgctaagtactttatttgcattattttaatttcctcttaaaaccaccttgtaagtaggtactgccctacaaatgagacagtggaggcaggttggggctatgtagctcattgtaggtcacatagaaagtgagtagtgtggctggggctggtacccggatgtttctgactccaaagcctgtgctgtagaccagtgcttctcaaactgtccagtgcctgtgaatggcctggagccttgttaaaaatgtgggcggtgatgcagtgggtcaggcagtgctggggctccatgatcttgctgctggcccataggccccctgagtcacaagtggcctttttcatcctcttcttcctcccagcctttctccacctcctctttcaggtcctcccctctgttcctgctcccaccccacccccacctttcctcccatgtggctgacagtctgctcgggtagcccaggctgcttgcctgttggtgactctgttgatggatggcttgccaaaagatgtggtggcccccattcagcccagtggcatggggtgggcttagactggggccctttagggtccacaacctctttgggctcagggaggaaataggtcacttctgaaggtgacctcttccaggggaggtagagggaagttaactctccctggtcatttaattaaatgtaaatgcctttggtctaaaagttttaagcaattttacaagatgaattatattccatggagcaggtgaagtatttcaagaagcttcagacaggattaagcaagcggggctgacgcagctggcttggccttgccacatctgtcctcagcgactcaattctttacagggtgatgagtcagcagccactgggcagtagctccatttaagaacgcacggtgtgtgtgatatgtttttaaaagatgacagttaaaatgataaagactggttattcggatgattcactttggaaaggcccctggttcttcccagatggaggggggyggccttgtggtgtggtgtctgggagagagaaccctccyctcaggcaggctgtggcctctgtgtgttacgatggaaactacctgtccagcctccagcaggacaggaggccacttaacgttggaggcacttggctgtctcaccaaccagggatgtgggaactcgtgtttcaggtctgttttagggagaggtcagatctcgggcttcagagttaggtaccgctatagctaagtatccagctccagaatttcttttttctttttcttttctttttttttttttttttttttgagacggagtcattcaggctggagtgcagtggcgtgatcttggctcactgcaagctccacctctgggttaacgccattttcctgcctcagcctcccaagtagctgggactacaggtgcccgccaccacacctggctaattttttgtattttttttagtagagactgggtttcaccgtgttagccagcatggtctccatctcctgaccttgtgatccgcccgcctcagcctcccaaagtgctgggattacaggtgtgagccaccgcgcctggccatctagctccagaatttcttagctgtgtaactttaagtggcttaatctccttaattcgagccttagttttctcatctataaaatgggggtgatgatagtgcttatgcacagggctgttgaaagaatgaagatgaatgaatgaatgaatgtgtacacagagcttaggcctaggcctggctcatgagtgcccagcacttgtgagctctcatgattaactcatttscctcctgccccaaggaccctcttgggaaataaaacctccctgaagatactttgggatcctgtaaaatccgtgtgtgttactttcagggtctgctgtggtgtaatggaagaagtgcagacttcggagctagacaccacctggctttgagtcctaggtctacccacctatggcaggtttctcttagcctcagtttccccatctttaaaatgaggatgggcaatgaagaattgcctcagagggttgttgcgaggattagatgaaattacacaaggtacttcttggagttyctggctcactgtaggcatttaatccatgcaacttattatttagctgacaaaatgcctataattagatgttagggaaattgctgtcatcgatggggaaagttccccaatggagttggaactgttgactctgctgtcctggcttctccaagtcctgccatcattttcttctgccccttcccagagcacctgctgtgggggctggtgggagctccaggttccacagctgagccgtggggagcagaagacagagctttcctgctaataaggatcataaatgccakccctgggctgggcaagcatcctgctgccggttcatatcactggatttagcatcctgtggcggtggtttaattggaagagataattggtgccgtgtcctggggagtatgatctgggagtcggatgataagactgacgcggctgatgtcttggagctcagactcgcagcctgggatgggaagcacccgttctcagcaaacttttggtttctgtttgtattactgacctgctctgtacttttcatcactgctagtttgttgctgttgttgttgtttttgagacagggtctccctctgtcgcccaggctggagtgcaatggcacgatctcagctcactgcaacctccatctcccgggttcaagcgatattcctgcctcagccacctgagtagctgggattacaggcacatgccaccacgcctggctaacttttgtatttttagtagagacggggtttcaccttgttggccaggctggtctctaactcctgacctcaagtaatctgcccacctcggcctcccaaagtgttgggattacaggcgtgagccaccgcgaccagtcactgctagttttctatctgtaagagtttttatgggaaatagcaatgccacagttttctttctaaagcgcagttcacactgtctccctgtgcttctctcccggactccctatggcctgtggaagctcaggctgacctttaaggcctttcaccctcctagctgagcttcctcttcttacattaccctttcagtgatccctgggggacccccccgccacccctggccatctcccagggctgcttagtctatgatcccatcgtgtctgctccatgaattcttcctgacaccctcctctactttcccggtcttatattgtctctgtctccttggctgtggccctgtgctgtggaggaagagttgagaacaagggatttgaaatctgatagccttagtttgaatcctggcctcaacatattttccctttgtgactgtggatcagcaacttaacctrcgtgagccttggtctcctcctttataggatagatgcctgccttgagggttgtggagaaggtgaaatgttgagtacctaatgcatgaagtggcactcagtcagtgttagcgaatgtaacgattatgccccagtttctcactgatagccagccctcatcttttgagtaccaacttgataactaaattgaaccaggtttttaaacactgtaagatgattccagwtttttagatagctcagagggccgtggggacaccagggtcagaggccagaggtaccaggttgcaggggaggataagcacagccttaccttctcttttgagaccctggtggcagccttggaagcttttctcggtgcaaactttggtgtgagccacacagctgctgcctgctaaatgggaatgtgcacaggactcgaggaatgaagcaatgttgcgtgacaggttcgtgtccaacccctgtgtgcaggctgggcaggggctgggtgcgggctgctgactcaccagctgcagtgaacaggacctgccttgggagacctttcctagtgttggggcagcgtatrtcaggctctgtgaccgtcaccatggagatgtgattcttgttgccttttccttttgtctgttgcagtagaggctggtgtgatgcccctaggaagaaacctggaacccagagtcccagacagaacttgtrgcggcctgctgattggtcctcactgcaccgtaatcatttctaaccaccccattcccatgaccgggtgcacctcattatctcctcccaagggcaggttgaatgcctccccacaaaccgccttgttgaatggaaccttactagatcctcatcccacactctgcccccctccagcccagtggataagattgctatttctggatttaatgtttctcaaaatccttttgactggagctactttgactataggatcatgtttggtttttttatttttattttgaagcatgggtctctctaggttacccaggctggtcttgaactcctgggctcaagctatcctcccacctcagcttcccgagtagctgagattacagatgcgtgccaccatgcctggcttataggatcattttttagctcaagcatcctggcagaaaagctggtggtggactggcccaggccagtgctttgtgtgtagaatgttcccaagaaaagaactgacgaaacactagaatggctcagtgtggtgagaaataattccactcctggaagacctgcatacctgcaacttcctgtcccatagccctttgtattcactgtgctgttgactttgtcttgtcctttcatttatcctcattatgaccatccttttcaacatggtgccatggttaaaagacctggccctagagttctatttgggtttgatttgcagcctctccctttcagtcttcatcagactctgcacagtttcctgctgcgtatagtaggtgttcattatgcttaaactaaagtcacagcctacagaaaatttgaccctggagccaactgagaggggagggagagaggcagtggggaccttgcatggatataatcctgatgtctggatttcttggatgaaaacagtgttgtggatgagggtttgctcatgaaaatggatgtgtggccttcgtatcttgcagcagtgcctgggagtctgttcatcttgaaataaaaggaactagatgcatttaaagaaggcagcatagctacacttgcagctggaacatttaagcctctttcacaattctcaaagctgcagtttttgtgtgtggggtcagggggagtgccttaactggccttctctctcagagccgggacttggctgcttctgggggtagagttgcctcgccagcaggtggtctataccagctgaacttcgccatgaaagccgcctgtgttggagaactgaacgtctgtgtccgaaaatgctggtctgtctaaagtttcagcatttgcgatccttaggttcccaaccatgcactcatttccctggactgtaattctgccttcacgaatgagccagaattattttgataggtacagtgcctagattagaaggattcagctgcttgccaagaaacccttgctcacgtggagggctttacattttatatattctcctgccatgtattttcgatgatccttagaagaatcttacaaagcaggtacagagttccattttacagatgagcccaccaaggctcagagagatcaagtgtcctttccaaggtcatgtaactaaagagaggcagaggcaggacacgaatctgatcctggcagacgaggatgacaatcatttgcacaatgccttctcattcagtctcctttctggctcccgagcccagaatcctgcccagaaaaccatttctctgaaaagaaaagatttgcatttttggatctgaaatccacacacccaggccctgacagatttggggcacgtgttgttacagccgctgaggtctgtggctrgggaaatatgggcatgtcatgtagarcatttatctatgaaacaaggacaatgggtgtcaggaaatttccaggcatttgccagacatctgccattttaatgtggagggtagcaaacagctttgtgtgcagacctcattcattcctgtgcccacacctccccgctctgcgcaaatccacctctttgagtcagcttcagtttcgcatttccagccgtctggtggttggtctccattcatctgaacagacatttatttcagcgccatcaacgtggctggcatggtgcagggatatttggccttccccctggcacctgagactcagccaaaccaaactgccttctcctgatttccctattatttgttggtgggactcccaggtggaggtacctgggcttcaagtgtcagactgccctgggatccttagccctgcctctgtcattactctggagctgccaggctgaatagacactgcccctgtgattcccctgtacccatccctttcttttctttttctgtgtcacgtcgtcaacctgagtctaggctgcttttgctcaccagttctctgaatgtctggtccatgcctcccagtttctctttttacaacctgggctgaggatcttctgaaaacgtcccttccctgctcagaaagcgggtgcactcttgctgtctgaacgcggagccatttggcttagagctctctgatagtgcaaaaataataaattgtgggcttgctgctttctcctccagactatggtccactcattgaggacgggggctgtcttcttcttctgtcctatatgagtcttcgcacagtgacaaaccttttcaaataggagcgtgagtgaaatgggggttgaaagtaagcctctctcctttgttttaagctggtgtaacagcacatatcagttcacccacacgaagcaatggttgatagcttcgatgagctgacaagaaaggaggcagtttccttactttcccagagaaaggcaagatggcagtgagttttagaaggtgcttagcgcgggccccgcaaggtggcttccgcctgtaatcctagcgctttgggaggccaaggtaggcggatcaccggaggtcaggagtttgagaccagcctggctggccaacatagtgaaacccggtctctactaaaaatacaaaaattagtcgggtgtggtggtgtgggcctgtagtcccgggtacccaggaggctgaggcaggagaatcgcttgaacccaggaggcagaggttgcagtaagctgagatcacgccactgcacactcactccagcctgggtgacagagcaagaccctgtctcaaaacaaacaaacaaacaaamaaaaaaacacagaagatccttcagtgtttcaggtgctctttggtttttttaggccaaatgcttaaattggacagttaattttatgcatttctctcttttgggccaatttgtgaagccagcaagtgtttattggacagatgagttgtttgggggaagggccagggcatctaactcttttaggtgttggatttggttatgtttggtaaaagaaaatgtggcattcacaaaattgagcctaaccacattttccaataatttttgcctttcctgttgctgctcacaaaggtggttgatcaataccttactggaaaaaatgtctgaggacatatgacaggttcactatagacatatgagcacagatacatgcagtttagttgtgtgtagtcttcgtaagaaggataaacgtgtgtgagttcagaagacaagaaatagggttgaagttaaacaattttcagtagggtaaccatactctgaaacagccagtcaaggcttgtgggagacttcttattggaatccttcagtcaagacagttctttggattaggaaccacttgagtgcttcctctcatcgcagtgacctgccctcctggaaggtgtgagaaaggcaagcaggctggatcgttcttactgttacacagggatgggctcgtctgtgctctgactttgccttgggccccatctccctactttccgggtcagggaagattgtcttttgtgtgtttgtgtgtatatttaaggtgtacaacatgaagttttgatacacttagtgaaatggttactatagtcaagcaagttaacatatctatcatttctcataattactttttttttttttttttgagatggactccctgctctgccgcccaggctagagtgcggtggtgtgatctcagctcattgtaacctccaccacccgggctcaagcgattctcctgcctcagcctcccgagtaatggattacaagagtatgccaccaagaccagctaattgttgtggttttagtagagacagggtttcaccatggtggccaggctggtctcgaactcctgacctcaagtgatccgcctgccttggcctccaagagtgctgggattatgggaatgagccactgcacccagtcatttaccttttttttttttttttttttcaatatggcaagagctcctaaaatctactgtcttagcagaaatccccggtataattcaatgttgttgactaggagtcctcatgcacattaggtctctgggcgatgcatcttgcatatctgcctctctgygtcctttcacctacatctcccgtttcctccttcacctcccccacccctgctccttggtaaccactgttttattttctatgtcttctacttaaaaaaatatattccacctataagtaagatcacatacaagcaaggtcatgcagtgtttgtctttctgtgtctggtttctttcacttagcataacgtcctccaggttcatccgaattgtggcagaaggcaggatctctgtcttttttaaggctgaaaaatatattcatattctctctctytctctctctctctctctctctytctctttctctttctgtctctcacactttccttactcattcatcagggaggttcttaactgagagagtgaagccacctcgtgctggtgcatcactgagagaaagtaaaccaaacccaaacctgaaacggatggttcaagtgcccagaacccactttctggttgaatctttctgactctctaagggttagtaaggatttctctggggaaagagataggggctgggcgyggtggatcacgcctgtaatcccagcaccttgggaggctgaggtgggcagatcacttgaggtcaggagttcaagaccagcctggccaacgtggtgaaaccccatctctactaaaaatacaaaaactagctaggtgtggtggcgtgcacctgtaatcccagctacttactcgggaggctgaggcaggagaatcacttgaacccgggaggtggaggttgcagtgagccgagatggcgccactgcactgtagcctgggcgacagggcgagacgccgtctcaaaaaaaaacacacaaacagaaagtgataggaacccttccatcacatcaagcctggtgcttctatatgattggaatgacggtactgatgcccccctggcagacaccccttctgcccatgggcctggctttccagtccctgtttaaggaagactgcccccaccaagtgcctctccctcctggggagctggccccttccacttcacttctgagaccatggctggggctaatgagactgtcattaacagtgcctcaaacaaaacctaagaccattaaatatttaattgaattatttcactgcagggatattgtgactcatgttgaaaactaatcacctgcttttttatctggcccttaatagatctctggttcaacatttaaaggtcagagtcatggcgatcgcagtattgtcattgttttctttcctttgtgggtttgggtggaggaaaggggaagagtgggatgcgtgggaaggaagaggagtcattggaagttgcctttatcagtggagggattccaggggatcataggagctatgcttcttcttttctggccttccctggtcttgattccccagagggataccaggaaggggctggaatgtgggtgcggatgacctctgaactaggcgatcctgtttaatgcaagaaactgtattccctgtccagccattcacgatactgtttcattcgctctatcagagctcagtgaggcgttgaaattccattgttcttctttttaatttaattttttatgcaggaagatgaaaagatgttttaaaatcctcatggttttttcttcctcttctcagtgttattactatgttaacaagatagccattcctgccactaacatctgtgctcagcctgtggtcaggtcctgacttgagtattctagcaataaaatcggtgtacttaattagctttttaggtgactccagcctgtgctgctgcttgtaccatttgatgggaatttcaggaggaaggaattaaggcctgtggacgtgaagacatgtggctgacacagggtttatgttggtaaaagatcaactgtgaaatatttggagtgtccaatgcatgccgtgaccttgctagacacccttgggagttgtagagccagtccgatgccctccacaaataccttggattttctagagaggagcaaaagctatttctcttagaagattttagtgtagcattttcccacagacaaaaatgcccaagtttgggtatgaagccccaactgctaactttctttgcatctgttgaagatgatgaacaggagaaagttaaagcagtggatagaaaaacagttgtgctggctgggcgcagtggctcattcctgtaatcccagcactttgagaggctgaggcgggcgggtcacctgaggctgggagttctgagaccagcctgaccaatatggagaaaccccatctctactaaaaataaaaaattagccaggcatggtggcgcatgcctgtaatctcagcaactcaggaggctgaggtaggctttgaacccgggaggcggaggttgcagtgagccaagatcgcgccattgcactccagcccggccaagaagagcaaaactctgtcttcaaaaagaaaagaaaagaaaagaaaagaaaagaaaaacagttgtgctgtaatttttgtactgttattgcctggctgaaaaccaggcctgccgctgatggccctaaagggaaccgcatctgccaggacgacagagcgtcagcaatgtgttggactcatcayaaagcagacacatgtttcctgcattatggagctgttgggccacatgacctagaagcccttctggtgccaggagtctgaattccatgatgcttacatccagccagctagtgattgcagaaaacctttaaaaaaaaaagtctgaaaagattaaccagatctattttgtgcaggttcatttgtgttcccattggctttaatgacacctcctccctcccaaatttcacagtgatttgttcctttcctctttaacgtcattcagcggtattttttgagtgctgctctgtgccatgcaccgtgcaagagaggggagccccacctgcaagaagcttagtcttggcagaggagacaaaaagtaaagagacaatggcaggacgggtgtgacggggcacaggggtctggtttaggcagagaggcgggtcccttggaggcagagcatgggaaatgctgctcagtctaggtgatacccaggcgaggtcttagaggtgcacagaatcctgtgagaagggcaccatcccagcagtggagtgtacagaagctgggaggtaagcagctgaacggtgtgtacagaagctgggaggtaagcaggagcaagaacagagcatttgggagctgccgggacgcctgtcacctgaagtgcgtgtgttggcaggttgtgatgatcttgtttcctgcaaagactctcagatgccagtttaaaagaacacttacagttctgcctttttgtctgttaactttaatagatgtcaactccatgaaattctggtgaaawcctccttgcatgaatattaatcacctgccgttaaccacgtacaagaaaattttagaaaggcaaacttagtaaacatctgtccaaatcatttggagcaaagcactagctccttagatcttccagccatgacactgttrtgttagtgtaaaatgacactgaggatgtgcaaaagttactgaatctaagattgctttgcatctgttttcctgtgttccttggaacctgctttttgtatttgttttcttctccttttttccaagtatctgggaaaagcccctcttctggtctggtgtttgttgtactgtggatgagcagacagctacattatggagagctgccagctaccagagtcattgcagagccagtgtgaaggcaaatgcaggaaacctcatacttggtgtctcctttggattggaaagaatgactctgagctcctgttcctagttgctgtccttcaacctggtcccaggtcataaagagcaagtgtggtttcagcagcatgttcaccgagtctactctgccagctgcccaagtattagttttgtcaactgcagattaaaaatgaaaaaattggtacacagaccctgccctgttgaagtcatctttgggaatctgtcttgtgatcrtgtggaacgatgcaacagttgcttactcttggcatgaatgaaggccagaaatgttgtgaaacagaaaagtttgttttgggtacttgtccatttgcttgggaaaaattggtatgtagagggtggctgcctgtttgccttccactgaggtctgggactttgaagtagacaggcctgggcagcagcagcctaagagatttaggttataaaggctgaggagtctggtgtatgggctttggaggcacatgacctcatttgaaatccagatcccttgcatgttagctgtgtgaccccaggcaggttccttaccctctctgttcaaaggcatcttgagaatgttattataggaagtatttaggtagcagtccatttagaaggggtgagtactcttacatgatactttacccaagacagaaaacctgcataacccacgtaaataattcatctcccaaaaatagagtcagggcgtaatgagggctaatgtgccaggccacctcttggaagtgctatagcctttgtgtctcattttcctcttctatgatgggaatattcatgcctgccacatagagttgtcagggattttagaaataaagtctagacgttgcttagcaccaggttactacttcaagcgaggagtataaaacatggtggtaaattttgccaagtgactttcttggatctctgaggtcactgagctccaggtccactctgattttgagtggcatgatcaggtaggtgagctcgcagagggtgcccaggggcttgtggtggggctggagaatggcaatctgtggagatcccctgcacccctctcgccctgtgaaacatcccaaatyaaaatagggggttgctgccgtataaaaaattattctcttgaaaatctctggtttaggtgagatctctctttgaagtgcaagatgatttttaagaaccttcccagctctcatggttctctcataagaaatgaaagaactgaattccaggctctttgtaattgaccaggaaaattaggataaatgggttaaaggagtcagaggcctttgggccaccacgtctgctcgcggtctgaatgggagccccctgggacccagcgggctctctggtgggtccttgatctcctagaaatggaagcaagtggtgagaccctgccccttaggggcagctcctggtttccttcacagaacagcaaagaaagagttgccccgcctgcctgaaaatcatttttcttgccgctggtattctgggaatgattctggaaaaaacattaggcatggactcgaagtctgacacactcatgtgtggtagcggtagacactgccctcgttctctgaccagacagcatttccatctgttggtttaccacttatggacagcatttccatctgttggtttaccacttatgtaatcctaatgagaaaaacagtgggatttgtggcaggccaaagttcaggtgaattgctagtctctagatgaaatgccagttaatctgattgttaatcgatccctatttttgtaaacttgaaatgaaaggttcaaatttgaaatgaaaaagcaatcaagatttcagcaactcagttgcctccttagcgcagtaggtagcacgtcagtctcataatctgaagatttcaacaagtgagtgcctcgttgctcaaggagtgaattgagaagggcttagttctgtccctgatactgtcagtctaggttctaagttgtagcaacagaaatcactkcagaatcagacagggaagttgctgaagaatgtgggggagtccaaaggatccctttctctcctatgttttgtgttcctctactctaatacctgggaactatccgtttccgtctgcttatgtgtctcactctctggtgagacctggactgacagcagggacagtcttgtttgcttttatttttcctctgcccagcactgacatatgggggttgggtcacataatctagccatgggcaggatgtcrgaacatactgaagcatattggtgggctgagctcaagtaataaagctgatttttttttttttttttttttttactgcctgaaacargcacacttaacaacagccgcagcaatgacaaaaacctcatgagaagatgcctgggtcaagggtcttacttccagcagcttccctgcaaatccagtgcaaataaacataggctstcctttgcagtttgttgcagtggaatcttgtctgttgcatgctgaagcgtaggatkttaggcctyttytgacatcamagcagagcgtttgcatgttcatgttgaatgtgttggtttggtttatctgtgccctgaatttggcatcatgaacttgcactcttggttcagttggaggcggaggtggcccagagccgtgtggatmtgtgctggtgtcaccactgatggtggcaaagggaagagtgatgctgaggaggaagcaggagaatcctgaaggtcgaaggccatggggcccggctgccataatagccatagcgtctggggcactgaccaggagaagggtgctggcctcagcccttcctcctgtgatcctgaacggctggttctagggccaccagtagttctaggctgatctggttagggaaggaggcactgcttgttcttgcctcagtttcccctccagaatcatccccagaatagaaaccaaagctataatgagatcattggtttttaaaaaaattttaatttttagttgtggtggagtgtgcataatataacatataccgtcttaatcattttcaagtgtagagttctgtagtgttgtgccacagatctccaggactttttcctcttgcaaaactgaagctctgaacccattcagcaactcgcattttcccccttccccccagtgcctgataaccaccattctcctttctgtttctgtgagtgtgattctgctagacacctcgtggaagtggaatcacagtatctgtccttttgtggcgggcttatttcacttagcattatgtcctcagagctcatccagtgttggagcctgtgtcaggatttccttccttttttaggcctgaataatccattgtatgtatatgtttatctgttcatccccagcagatatttgggttgcttccacctcgtggccacatccctaacttttaatcctttccaccgctctccatttgccttggggtgagagctctgcctaccccccagcatggctttcctgaagccatttccaggcctggcctcctcctgcctctcttgctctarcctaatcctctcactgccatgccacatccctggcactctggccacactggactccttagagaccctccaggcacgcactgttctcttgtactgccaggccttttttgcacgtgctcttctgttcatctggamcgctgcatcttsccgccttctggaacctccaacatamactgtcttccttccatctcagcttagacaagcccttcttgatctcctcctatcacattgtgtcatccagtactgtttatctgtcattttgtaccactgygcctgtgtttattttagggcaaggactattttattgactaaycytagagtctgtgcatggtaggtatggatgatttagtaaacacataaaatatgtcattctttcaaaggcaggagsctcttcctttcctccccctgcccttttccccttgtcactaaaatccatgtcccaggttgaaattgggtacttctttcctatagaaacattgttatgggacatggtcaggttcagtagcatctgatgcgggtatataatggattaagtttgcaggccagcctgagaacttaactaccattcatgacattgtttctttggggaaaaaacatacccatttccaaaacagctgaagcatagtcttctggatcctgcgcctctttgtgaagttggcctttgctggtggctctgccactggtttggaaatcagagatggtttttccatgcccatgatgaggacaaaggtgagtgtcccctgtctccacattgggaaaagaaacacacccatcccttagaaaggagagggaaatggtattgcggcctcactctcagatgagtaaaacctcctgagaatttaatgtgtgattgtttttataaatgtgacaagtcctggtgttagctcctggcctccaattgagcaaggtttcagtagcaggtaatccccctgttctttcccctagctgtgtggggcgggacccatgtctttgctaccacctcttgctatattcctaccctttttttttttttttttttttgaggcaggtatttgctctgtcgcccaggctggagtgcagkggcatgatcatggctcattacagcctcagcctattgggcttaaaccatcctcccacctcagccacccaagtagctgggactacagatgcagaccaccaagcctggctagttcttaaaaatgttttgtggaaatgaggtctcactgtgttgtccaagctggtcttgaactcctgagctcaaaccatcctcctgcctcagcctcccaaagtgctaggatgacagccactgtgcccaaccatatccctaacttttaaaccttgctgtggctgagaacaaattaatgtagtttgaagtttaccaacagggaaaacaaaaggaaagaaagggatggggcagcagagcaggcagtgccatgactcagttccactcagatctcattctggatttgactggggtagaaaccagactttaggatgcccatgactcattgtctatggaaatagcattctcttagacttgtgcagtcagctacctgtggagctgtacgtagcagcccccataggcttgaaggacctttctgtagctgtctttggaggcagtgatactctcctcccaattgttacacacatttctgcataggagttgatacatgaaacaggaaactcaaatacattttgcaatgagttgagaagtaaatccaaaaccagatttagctgagagtcttttgttgcatgaagctgtgcacacaaaggcagtgaagaggtctagaataagacagctgtaggtttgcgtgttaattgcatgatgatctgactacgtgtgcacagggcctggcactcagcatcctacttggattatctcattcaatccttgataacactgtggagcagctcctgttggatgaagaaacaaagattcagagtagatgtcacccaaggttataccattggttggagggagagctggaacagtgaccaggkatatccagctccagaaccctgaatcttaacctctgtggtatactcctgttcggtgggttgccctgagccaattgttctgctctctgagtcttgctcctcatctgtaagatggtcctcgggcggctgagtgtattgagagacagcctaggtatagatgcataccttcaggaaataggccatccttctagggccacagaaatgcccctgagaccttttttcctgtcatagcaccgtgctctgctttctgagaactgaaatttgcagggatagcctgcctacggaatttgtccacttgtttagtggggctggatggtggttgtcctatttacttaattcacttgatgggtttcagtcttttgaacctaaaaaaaataagaaaatgggatttgtttaatctcgttttccaacacaacagttcttaatctgctttcgaatgtttgtttgtgggctgaatacaattcagtgttaatctagtgacctagtattgcctggtgatgaaatctgtccctgccgttaggttcacttgtgtttctttgtgtttctctctctctgtctctctttctctctcgtacacacacacacacacacacacacacacacacacacacacacacacacacacacacacattttaaacttggtctttaaaatctcagtttttcctgcttaagacaagaagatccctgatgccaagatttctacctgaaaggtcagtttcagctttgtaacaactgggtaattgtctcctaaaataaaccagcatctcagggactgcaagcttgtcttctcagttatgtgaatgcaaatctcttctctcctaatgactaccctgcctatgccgtttcctgtgggcatgtgcagtcatctggaaatggcggctgccagttccacagctggggacgaccctggcttcttttctgtaatgaggatgtgtctgctcctgccattgccccactctttgtcctctgccttgtggtcaggagctgctctttgtgctttcttttttccccagttgttactgctgggggaaactgttgggagtggtccaatgtcacccctgtaggatgctcaccaaatcgatactaattcctgcagcagataattcctgcctgaaactttaaagtttgctaattaagtaccattaagattatttgctaggttcttccccaaatgagtgctgggttcctgattgggaaccttggtagaaaagcccaggggctgcattctggcgttctgtgagccccacaggcagcagagctgtccctggggtaagckttggttctggggaggtccctgttcacaggtgccatcttcacatcaaatctgcttctgtgcaaatacgcttgagtgtctgagatcaagatcattttacgtcatgcaaatctgttttatttctccagtcttcttttgggatggtagacattactgataaggtactaagtaaactggagttttaaaaacagggtatttccttttaatatttctgattctctttctcatatgaaatgggccattaagcttgttcaggatggtggtcccaggtctcactgtgtcagcccggagtgattactgaaagatgccgatggtatctaaaggccatctgtaaagtgttgaggtgggtggtgagctgagggacgtggtgaattgaagggagccgagggtctgttctgcatggacagaatggaagtaggcctgtaggagagtatcccaggcacctgtcttggtggaacctcactgtaatggggggatgccagctgacagctggaggtcgtgtgttcaggtcggctgggcctgaaagtctcctccacaggtcacgccgctccttgtagcagcaacacatgggcaaggtatttacttctccttcagtggggcttgtatccacttttgtgatgtacgtcacttacccagcaatccccccagctcacccctggctctttctcccaatcttggtctatacaaatatattcccctgtgagttacctaagaatccatgtgcatttgtctcaaaagataattgatgggcagggccctgggagaagccatctttagtgatgctctacagaggtgactgttgagtcacatgctggggggggggggtctgtctggtgggtttgtgcacatgtgtactcaggcacgtgcactgtttctacagcatgtggatacaaggcacctggctgtgggtttccccatgcagccttccacatggttcatggaataccaccagggtccttggtgctgtttccatgtagcataacagtgacaaccatggatttccaggtggcattgaatggctagaattggaaactagctctgtattggagacctgggagaagttaccttccaggcatttttttgtttcgtttgggctccttgagctcatggcaggcattgccagagcctaaacctgctgcttggaaaggggaaggttcttcaggtaattactccctcccttcttgtacctctgttcacctcactccagggatgattgaagaaagctccctaccatcttcctcctggcatgaaggggagcaagttctctggtcctggagatgtttcaactgagtccagatgactatttggcagggacgataaagaagaaattctggtgtcatgtgaaactaggttacycctaaggtctcatgcagcttttagattctcctagatgctgacggttctttagaaagtggctttaagaaatcccagggctgactgttgagaataccatttggtaggttccccgcccttctttatgcgcagccaagtgattgttgtcatggcaacagatctgttcccgcgaaggcttttcttgtagcatataaggggacctgaagcttcagagattgttagtaattatcttctaaaaaaatatgtcttgagtactgtgagcattttaatgggcccggttccagccttatgggtacttttgaggtctgtatcagccccatgtcacaaaataaaacgacttgattcgttgttttgttttcatttttttcttttgtgcatgtctaatatggaagaagaatcacgatcctattgttaataccttgcacatagtaggtgctcatatacttaattttatttgacaggcaggcagaaaagctgaggattgatctaaatatcctttattagattagcagttacatatgttctttccctagatgaccttgaatcacaaactaggcaggcctcccggagctcacagctttatggtccagatctcctgtccctgttgtttgcacatcaccagggagaggggatccatgggtgagtctgatatgtatgaagaatgtctcatttccccccaccccaggagctcagagtcagctcagctgccaaaatgtcaggagtacctgctcttcagaataggatagtgtccaagtttwaaactctttcccctttatctacaaacatcaattgagtctttattctaagtcatgcattttgctagatactgagaattcaggaatggctcacacgtagttgttcctccaaggtggtcgctgtctaatgaaggacacaggcccgtggagcagtaagcccaggacagcgcattaagtgtgagaatgcacttggtccccttagtctctctttccttccctgcctttgaacaaaggcatcccatcctatttgcaaggactggaggcctctgaaccacttctaatcctctgcaagggagaagataaaagcttactccttgcccacctttttataccaagtcactctgaaggttacgtgaatgtcctagacatgggaaagataggagcaggtgggaaccgagggactctttctgacccttaactcttctgctgtcgagccactttgccctgagacgttgtcagccctcccatgctctccctttcctctagaccggggttgccatttcactcgttggtaggaggacctctggttaaatggaagagtgtggtttgggatgggacactaaggcgaggggtggagaagcttcatcagcaggagactgtcccagcagcagaccctgtgtcctttagtggtgcaactggcaaacagtcatatttactgtctcaggacatcccgtcagctggatttcacctggcaggggctctgtgtggtgatgatgttctcagggagctggggaaagtattctggctggtgaaacattctagcccctttcactccaagtgtggttggtagtctagcagcaagtcagtatcttctgggaacttgtcagatatgctgaatctctagaccttctggatcagaatctacattttagcacaatttcctggtgatccttgtgtatactgaagtttaataagttgtgtcttgagctctcttttgagatcctaggcccagggtagcaaatacagagtctgcatccttccactgtcctgcggttgtagcagacattactagctgawctagccaatccattttccatctagcgcatagctgcccacagcaccctccacacagtgccccaggcatccatacacctgatcagaattagcccaagagataaactgatttaccatccttgcctttgtctatgaagagctcattctaaaaaagtaactaacataaaaaacaaggaaacagctgtttgcataggccttaagkgttgggaattaggacccccatcataccccagggcagtgggaaggaacactcaggcccactgcttgaaaagatgtcggcaacctgaacatgcacaatacagtggcgataaaccagaccctactggttctctgcagttgggcaatgaccttgtcggaggaggcgaggccatgatattgctggaggaggcraggccatgatgttaccctggctccagtgctcatccatgggacatgtggtcagcccctgtgtcccacaatcccattgccttctggcaacttcctaactgatgactgagccacagtcaggtttcagtcattcattggtagttattcttatctgcattttgttagaagaacacagttaataaagtgggtgtggggaagaaaacagtgcaggagaaggagaactggaagaggaaccagagtggcttgagttatctagtaaagtcttcattacatgatgtgaccagctctcagaggggcatctaatacagagcagtttagtttaacctcagaaggtcatcagggtgctagaatcatgtcccattttcatggtaattgggcaagactgggaaaatgttttgggaatacacattttatcttccacttccagcagtggcttctaaccactgaggactctccacgttaccaatctctactgacctacctcaagctttgtaaaatcttatttaccgaacaaattacatttttaagtaataattaagcccccccttttctgtagagatatataataactgttaacctggggtcatttttatcgggctttatataattccaacagaaagcaaaggactgtgagtgcttaagttagcctgagcagtaaagaggcttttagacytactgagaatagtttttggattcacattaccactgcttgacctgagactcgatttgggagctagaaactaaaaccagttatgcccttccattgaatagatggaggctgggaggctsgggcttgtctagcttgtagggactcaagggcactttggtcgtgtcacggtgctgctttctctcctgcgcaagcctcatacttgctttctctgttgaatggtaaaagccagcctcttgtttgctattccggggttagaatttcaattccttttttaaaaactctgtttagatcagaaaccatccagacactcattcagaaaccatctggggaaggtatgacttgagatagaaattgaagagatagagaggaggagaagaagatagtatacgagttagtttaaatgaccccagatgagtttggccgggaaatcaactgcagaatgcatcctctgtccctggcctgtatccctcaagggcctttgatagagtcttggcttagttgcagccacttttcctctagaactttaactcagtaaaggtgtgcagtaaaaatggggaagagggatgaggaggagccaggagagaatcgaggaagagcaaatattacgagcgtagaacgcgaagcttggcatgtctgcctggttccacttactcacgtttgttgagctccttctatgtctgaagctgtttctaaaacgtcagtttctagaaaacaggatcctgaattcagctaagcatgattcccagggccatccctgggaagctgtcctgaagatgcctcctgctaagacrggttgcggaggggagtcagtggctgaaagggtgatttcaggatagattgtcctggcaaataaggaggggtcctctgcatgaataagcagtgtaccctgccaaaggaagctggcaggaggtgattcctgctgaagcctgacagtacatgtccaccctgaactcatggccttggatgcagaccggccaactgtacacagttgagcgaggaagtggcgacagcacggtttgaatctggctgataaaacagatgttcgggggaagggctcttattttctcccagttataggatcgggggtgggggaagaaaacctaattccctatctgccaaatgtttctgttggtaatgtcctggcaacagtgagatgcccccaagaatggagtggttgaaagttctagctatcgactcagccctggatgtaaattctgaattctgtgtgaccttgggcaagttacttaacctctctgagtacccttggcctcatctgtaaaatgaggataatgatacctacttttggcggggtgcaggggcttgtgcctgtagtcccggcactttgggaggctgaggcaggtggatcacttgagatcatgagtttgagaccagcctggccaacacggtgaaaccccgtctctactaaaaatacaaaaattagctgggcgtagttgtgggtgcctgtaatcccagaatcgcttgaacccaggaggcagaggttgcagtgagccaagatcatgccattgtactccagcctgggccacaagagtgaaactctatctcaaaaaaaaaaaaaaaaaacaaaaaaccaaacacagaaaacacaaaaattagctgggcatggtggcacatgcctgtagtcccagctacttgggaggctgaggcacaagaatctcttgaacctgggaagcagaagttgcagtgagccaagatcacaccactgcactcccagcactctagcctggacaacagagtgagactctgtctcaaaaaaaaaaaaaaaaaaaaatgagatacctactttataatggtacctataagaggagtataatgagattttaaaaaaatgaatacaacattcctgcaagggtttgtcatgttgcaagcactcagtaaatgggagctattcctaataatatgaaaaactgcaagattacctcctaagagatgataaagtcgctatattctggcatagtttggggatgtacagaaacctcttaaaggaataaagtagctcttaggccagtgacacatgcatgaaacctgattttaggtgctagcgggttcaaggatagatgtttatcacagggagttctgatctccaacgggagcccagcgcgagggcagggagggaggcagcgcgagggcagggagggaggcagcgagagggcagggagggaggcagcgagagggcagggagggaggcagtgcgagggctgtctccgcagagtcccagcttagagccatccctttgtcagggatagatgtagcaggctcttactctgatccctagaacactaactccctgattctgattccatattcatctggccaccttctgaattacctgacaacccaagaaggctgactgggagataatccctgatccagatactgtgagcatcttatctacccgacagttaaattttgtgaactaagaaaatgacatgtggtttctgcatcaggccacagctgcttcgctggcaggagctggcgtcatcgagtcgctcagacctggcttcagcaggagcatctttctgtgcccatgcagcagaggcagaccatggcaatggggggttcatggtggcagatgtcggggagacagctggcatttcccaggtgacacccccacagggtgttgcaaccagacaccattccatccaaaacgtagacagggaagcctccctgtcggaatgtgtttgctgttaatatggttttcccatagtgtgagcgtgtccgtgtttttgtgtttccatattaccattctcgctttgcttttaaaacagcaacaaagaggaatattggtctttgtggctgccagtacggtgcatgccagaatctcatgcttgctggtctgaagccgccagatggtggtaggattgtgtgtggttttgtttcctctgctttttgaaaagtcgtgaagtgggagagactgagaagtgggagattggctggaagattatcatctgataacagtttgcagtgtcttccaccctgtgtgtgggcacaatggtgtcttccaaaaatgtgatgctgaccctacctagcatttgctgaatgtgcagtattagctgtcccgtaaacaccagctgggttattcattacatactcagctgtatacagtagctgaataaaacaggttttttaaaaaaaaaaccacacaggaaattttctgcatgtttttctcttccttgaagattaaaatgagttgttaggattgccattgtagcaaaagggaagttgtacttccttttttgggggctttatgggtttatttttgaatatcttttcaagttcttttacctttgtcctaaggaacctattttcacagcttaaaggactaatgtttctcttctcttagtttccttgaaatcagattgtgtgtttgttgtaagaacatttagatcaagcttgtccaacccatggcctgttggccccatgcgccccaggatggttttgaatgtggcccaacacaaattcatcaactttcttgaaacggtttttttttgcttttattttattttattttatttatttttaagatggagtctcactctgttgcccagactggagtgcaatggctygatttcggctcactgcaacctccgcctcccgggtccaagcgattttcctgcctcagcttcctgagtagctgggattacaggcgcctgcctccacgcccagctaattttttgtatttttagtagagatggggtttcaccacgctggccaggctggtcttgaactctcaaccttaggtgagccaccatgcccagcctgtttgtttttttagctcatcagctatcattagtgtattttaagtgtggcccaagacaattcttccrtgtggcccagagaagccaaaagattggacacacccgactgagatgatcttgtaaatggcacaggcaaaaaagtttgtgttttgcagccattttcaaggctaacataaggtatcaggacgctgctcagtgacttatgtgtgaccagggtctmtaatgattggagaggggatatttgtctcgtgtgaacagagtctgatctctgtgaagacttgtgataccagaaactggttgcttctccatttcctccctctctgcctcccctccctgtagttaaacaaatgtagggcatcaaatgatgccactttcttctggttgtccatctctccatgcccaagggtaaaaataaaatgctgatgaagccagaggaacacagtttgttcatttgaagttcttaatatcctgagtgctgrctttgacctttaatgaaaatgatggtccttttggcaggggccagctgcctcataaatgtgcagcttaaagarcaaggatgagtttccctgaacaagagaaacagcagcaagcgtggaagtcctgcgtgcatcaggagcactctgctaattaaaggcaagagtgggatgcctggccaggcactgtggctcacacctgtaatcccagcactttgggaggctgaggcgggcagatcacttgaggtcaggagttcgagaccagcctagccaacatggtgaaacctcatctctactaaaaatacaaaaattagccaggagtggtggcgcacgcctgtaatcccagatacttgggaggctgaggcaggagaattgcttgaacccgggaggtgtaggttgtggtgagctgagatggtgccactgcactccagcctgggcaacagagcaagactacatctcagaaagaacaaaaagagtgggatgcccaacagcaaggaactgctggtttgttgctttgtgagttttctaaggcaccttccagctctaaggttaccatgacgatccgtcatttccaattacaggagatgcccactctatgggggcaggcggctgtctctttacttcgtagcacaataattagaccaaggtaacatttcctaaaaatttgttgactacaggaacactgtcctttctccactccagcatcttggttgccaggaagaggggtcatccagtctaacctggagatcacctaagagatccaccttatagacccccaggctgatgtacccacctctagccgaggtctggctagccccttgcctggagcttccttactgatcagttattttgttggtctgggttatagttgtccacctactagccttttgggttttgccccttggtctagatcaagcttgttcaacctgcaggcctcacatggctcaggatggctttgaatgcagcccaacacaaatttgtgagctttcttaaaccattatgaggccgggcatggtggctcacatctgtaatcctagcactttgggaggtcgaggtgggggaatcacttgaggccaggagttcaagactagcctggccaacatggcgaaaccccatctctactaaaaatacaaaacttagccaggtgtagtagtgcacacttgtagccccagctgtttgggaggctgaggtgggaggattgcttgcacccaggaggcggaggttgcagtgagccgtgatcacaccactgcactccagcctggatgacagagtgagaccgtgtctcaaaaaaaaattatatatatatatatatatgtatatatatgagatttatttgtgattttttttttttagtagctgttgtttgtgttagtgtattttatatgtggcccaagacaattcctcttccactgtggcccagggaagccaaaagattggacacacctggtcgaaatctttgggtaaagcattgtcttagctagggcatcatgattgaacttttccaggcctaagaattgagcttcctcttctcttattagaattcaggttcacactctgatgccatttggaaacactcttactttcctttgaagactgtgttctgtcacttcaccttataaaataaaaaaatcctgaaacatgccagtgcgattgcagaagaggagtgcccagcttcatggtcaagtctgacgctcgtgtgtgcgtgtgtgcagagctgtgtagccgtggctagtgctggcctccaggcatcccccggggcagcagatggtgtacccagccttgccctgctcggtccagccagagtggcagtgatgcacgctgaggcaacttctgtgatgcaacacccgggcagtcctccagcccgccgtcaaggtgaaaagacccctgccaatttaggacttctgggctctctgagagcaggggcttgagaggaaggagagactattttctcatatagtgaaactaaaatattacaacctgccatgagccattgcagcagtgtccctaagtggccctgagcgtcccatgacacagtcccgagccctggattttgtaggagctttccttttcattcttggctggaaggaagctggtgatgcaactgttgtgagctctgaaatataaaaattaacagtcaagggggctgggcacagtggctcatgcctataatcccagcactttgggaggtcaaggcgggtggatcaccagaggtcaggagttcgagaccagcttggccaacatggtgaaaccccgtctctactaaaaatacaaaaaattagtcaggcatggtggtgggcgcctataatctcaggtactcgggtggctgaggcaggagaattgcttgaacccgggaggtggaggttgcagtgagcggaggtcacgccactgcactccagcctaggcaacagagtgagactcaaaaaaaaaaaaaaaaaaaaattacagtcaagggaaacctagggtcaaggtcactttaaaaagctgttcagccaagggcaacggccttcctgttttgaaggggtgggggcagaggatggaggctcactggagttggttttcatgagcctcccggtcccccagctttcacttcccattaaataaccacgttgtggatgcgtaacaattaataagtacaaacagaaccttccaggcaagccctctgggccgctccttctaggcctttggtcttctgagatgtttgggaagaaggaataattctggctttcttgaaagctgccctttgcactgttcatttgccctctaagtactgatttgccagctccttagagaaagtggatattagatgtgggaggagtgggggtcatgatctgttgtccagtgtgtccttatggacagatgccccagcccagccacatttacttactccggcctctgccttcctgtaggactcagcttatagctacatcaccgctctgcctaatgggagcactgatgtaaccagtgctccttattttctctgtaaaatattccagcccctgccttcaggaagctcacagactctctctctagcatgcgcacacacacttctcacacctgggttgtaggcttcaccagcatccgctgtgtgcgcttataaacctgtaaatgccagttgcacatactgttgttaaataatttaattataagctatgtaaatgtttgcagtgtgaatgtgaaaaccaagatttgtcatttctacaaaagaagtagaatgtttagaaagatatgatattaataaaagttacttttgcaaaaaaaaaatgccatcgaattaagtatggatgaggcaactgtaaaagatttgggaacaaaatttgtaaaaatctaggatattcagattgcttcacaagaagcccgacatggaaatcacagatgatgcattttgggtgtgatttatgcaacaaagatagcatgagacactggtcagcatatttggttttttttttgktttttttttttttgtagtacaaccatctacgtttgagcctacgccaggcagacccttgcaaagaccacacagacagcaaatgtgggagctgggctttgaagccacattggctaatttcagagctaagcctttcaccctgtggttctctgcttatcctcctgctcatttagacgatagtaaggagtctctgctaagactctagattagccatggtgagagacactgttgctactgaaactctatggcttgcaggctgcgtggagtgtgcctgccatccaagtgtgtgggaaagaggagacagatgggaatacagctgccaaggagccccaagaccgttttggaggtcatttgggggaggagggggtcacttacctcaataggtaagtttttggtgtgtatctgttttagaaaaagattcctgatacagtcacaggcgagcytacactcacatttgttatatttggtgtgtgtggtagttatgtgcccaggaaccaaagatttccactttacttagatctttcatttcttttttctttttctttctctctctcttttttttttttttttttttgagacggagtctcattctgtcccccaggctggagtgcagtggcgtgatcttggctcactgcaacctctgcctcccgggttcaagtgattctcctgcctcagcctcctgagtagccgggattacaggcacccaccaccgtgctggctaatttttgtatttttagtagagacagggtttcaccatgttggccaggctggtctcaaactcctgacctcaggcaatcggcccgcctcggcctcccaaagtgttggggattacaggcgtgagccaccgcacccggctacttagatcttttaaacttgaaccctagtgggtacagtaatcaatttcactgtgggggaacgggagctgctgttcaagcgcacagggtcccttccatcagcaggcggcaagggcaatggggagggagcaaccactggtgttagggttccagctgctgttttgtagacatcttcagggacactttggggctggctgtttattgctggttggtgtccagacagaagtcacaagccattgagtggttggaggtggctttcttatccaccacccattcttcctccactttctagctgggtcccgtgaaggagctcttcctaaccagacagctgcggccttagatcctgctgatgcagctcctcaggctccctctcctagttatttgggtatttccagtattttgggcttgtacacaagctgcccctagttgaattaatgcatccctaaggccataggagagggggttagtgcctgctggctttgtggggaatgtcagttgtgtgttttcaaattagtgtttctttaatggcaagtggaacattttcttcattatgagaacatgtgttgcctattayctctgtgcttatgaagatgggggtaggcagtgaacttaatagcttttcagagcttctgcagcgagggtttgcrgggaggccactggtgcrgtgagcatstcaggtggcttccctggaacagcactggaaacagtgagccctccttatggaaaaaggatgcatgttcctacgccagtgctcaccagggacgagtttgccccctggggacatttctagttgtcatgacttgagggatgttactggcatctagtgggtagaggccagggaggctgcaaaacatcctacaatacacaggacacaaaaaatgatcattcctttttttcttgcttttttcttttgagacagggtctcagtcactcaggctggagtgtggtggtgtgatcatagctcactgtagccttgagctcctgagttcaagcgatcctctcacctcagcctcctgagtggctgggactgcaggcatacaccgccacacccagttaattatttatttattaatttatttgtagagatggggtcttgctgtgttgctagttggtatcgcttaaagccagaagtttgagaccaaacttaagtgatcctcctgcctcagccttccagagtgttgggattataggcatggccatcatgcctggcccaaaatggtcattattgataacaaaaaatgatccggttcaaaatgtcagcagggctgaggccgagataccccactctagtgaactctcctgccctgcacccctctcctgcagagatgcctgagagcgttctcctctcctctggttctgtctggctcctaattagccttcgagcaatgtcagctctcgggaacagcagagatgcacagtgacttactgtgacggcggcacactttcaccaaagcagttcttcagtctggcttcctcagcccttcccctccacgctgcagaagctgggcctgacaaaacgtcttttcagtcctcgctcgccacctgcccacactgtagcccccaagaatgcctgccattagtcccctgctatgcagggagatggcagctgcctgcaaatgaggcagcttggagggacaggacaatgccactcgaaggacccaccgtcctgcctgtcgctgccaggtctctgcagcaaggggcaatctgacttcggactttagggggcaaggaaactttgcttttcttatttcctccctacccccccaaatatgcattaaacaatttgtattctgtttgtgactttaatgtgcctctttgtcctcagctgggaatgtctccagcttgtcgtagtgagagagagcccttggtatccgtagaagcaggcttggattttggctctactgctgaccagcaatgtggccctcagcaaggttgttaaccctcctgagcctcaggtgttttcatttgtaacatggggctgataatgcctaccacagagggttgctgtcaggacagtgttccctgcaccattttatctgtgtccatccaaccaatctttgtaagctgctcaagggcctggcacctgtcttcaccgtccttgaaatcacgttagtttttgctgcacggtaggatgtgggccgtggactgcggcgcacccccagaaagataggttgatgtcctaatccctggcgcccgggaatgtgaccatttggacacagggtctttgctgatgtaatccagttaggatgaggtcattaaggtgggccctaatccaataggactggggtctttataggaagagggaaatttagacacacacacacaggaatgccttcacacrtgtcttatgggaagatggacacacacaggccgtgagcctagcacaacagaggcagaaatttgaacaatgcagctgcaagccaaggaatgctggagtcaccagcagcaaggagaaggcaaggaaggactctccctgtaggttttagagggagcacggccctgccgacatctggatttcagatttttagcctccagaactacggttgctttaagccagccagtttgggttgctttgttacagcagcccccaaaagccaatacaaatactcagtggacgcttgtggatcgtgtgtcttcatatgcaaaatgtatggtgctgggcctcagcagtcatgctttggcagcccagcccctggatggttcacttcttcctttccactgatgattccttcacagatcacccacagatcatactggctgattttgtgctgctttattagaaaagcatttgcttgttatgggagaaagtttttacatgtaccacgttgaatcgggttatgtttttgccataaagtatttgtgcctctctaagcagtggcatcaagtgaccaacttagatttcttttagcaacacgttggttcctggttctgggaagaagcatgagaggccattgctcctttctttcttctcctttcaagaagcagaaccaaatcaaagtggctctaaaaataagaaaatgaatatgcttgcaaaactggggtgccaggcccagaggaagagcaggttcgggttggtggctaagggacatcactggagactcaggccctttctcttctgtccacagcagtgtcatcctgaggcaggtgtccccatggccataggatggctgatggcagcagctgcacagtctgcttccttgtttgtggcctgtggaaccctttggtgtgtttctcttaagatcaggaaaacattccccagaggcctccccagcagcctcctctccatgtctttgtcccatccctgaagcagccactgccaaaggggatggagttagcatcatgggcctagaccgatcatgtgarggcgaatgggtgctgcagtcagccacagtgcccwgccacactctccagattcacaactcttacctttttttaatggccatgataaggatgccccaaagatgtccacgttctaacccctagaacctgtgaatgttactgtacgtggccaaaggggtctctgctgatgtgtggtgatgtggttaarggtcttgaggcagggaggtgatcctggatgatccaggtgggtcccmcataatcacaaggattctcataagaaggaggcaggaaaattggaggcggagagagaagatgtaaggacagaagcagaagtcagagaagggagtagattgcaccgctggctttgaagatggacaaaggggccacgagccaaggagtgcaggcagcctctagaagtgggaaaaggcaaggaaatagattctcccctgcagcctccagaaggaatgccagccctgtggtacctgacaccctgatattagaccagtgaaactgattttggacttctgacttccagaactataagataataaacttctgttgttttaagccactaagctcgtggtcatttattacagcagcaaagggaaacgaatacagcattgtatctctaggctgaccaggaatcaatatagaactttgctaagattaagcatcttgtttttattttatatcttttaaacaagtatgtggggattaaacaagatacaaacccagtccctggtcctgcctccagatagggccagcctggtggtttgctctcaaaatggtaaatgtccgttcctttattcaacaccagtgctaggtaccgagaacacagaagtagggccttgtcttcactcaagctgctgtgtgtgcctcagccagccatttgtttccacaaatatgcccactcgcaaatgggagctcttccagatgtcttctgtctttgtagctcaagccagtttcctctgaagcttattcaaacctgctgatttttgtttaagttcttgcaagggttaggaagagcataagatgttaagcacttccacagatggacctatttttagggtgccccatgttgccgagatcagcagtgattctaatagctcagtcctggggtccacagaggatgtcatctgcctcctgtcttcgtgccagttggacagagacactgctgtttggaagttttctttgtggttctttatttcctctcctctctagggcttcctgttctacagaggcacatacattatgtctagaaattgtttttattgtaccatagttcagctatttcctttcctttcctttcctttatttcttttkttgttgttgttgagacagagtctcagtctgttgcccaggttgaagtgcagwggcgcagtctcagctcactgtaacctccacctcctgggttcaagcgattctcaagctactcctcccaagtaggtgggattacaagcatgtgccaccacacctggctgatttttgtatttttagtagagatgaggtttcatcatgttggccaggctggtctcgaactcctgacctcaggtgatccgcccgcctcagccttccaaagtgctggggttacaggcgtgagccactgagcccggccagttcatctgtttctgagaagccttgggctttcctggggataataagtgaccagtggcaatctatgggaaatacctgggaaggtgacagaagcagtgaagcagagaaacggagtgggggcactgacatttgagatgatcttttccaacatcataattctatcttgagraaactgaggcatgaattatccatgaagcagctctccatccctgaactccctatagtagcttagcaagnatggagcgcaatccctgtggtacygattagacagggccaggctctagaagcaaaatatgagagctggctttaaagcaccaacacccgtaatagcgtgtagaccaataggtttggtgtacattgttctaggctctcgtctctgctctgtcccatctccctttgtccatcacaagtgccatataccygaggggataaatgcattgacgctggagcttaagcctaggtttgagttccacttactagtgacataacctgggacaaatcacttgggcatttttcctttctataacatgggatggtcacagtactgaygcggctggaggtgctgcgaggattaaatgagttgaagtgtgcagagtactcacagcagtgcctggcacatcctaagcgctgtacgtcttcctgcaaccttaaacgttgttctccagtgttttaaattaccacgtgcaattccatcgcatggtggtgctctatggttgatttaaccagatccctgtaatgggattttgtttccagtcttttgacgctgtgaacaacatttcgatgactacccttgtaggtaaggactttctttcactcttaatcatttccgcaggttaaatttctgaaatgagaattgctgggtcaaagaaaaatatttcaaggcttttcttgatagacgctaccacattttgctccaggaaagtagtagtttacactcttaccatcagtgagtgagtgtgccagtttccttgtgtggccgggttattaacttttaatcaaacgaaggcccagaaagaaataggaaatatttcccggggaataaaacgttcctcgtctttgcttatatgcagtaaaaagctcagaacttggagagcgcagaaggcggggcagagtgtgtgaaaacggcgccctctgctggctctccctggtgtgaacagtggtagatggcaacgctgagatggccgtggcatcccctgctctttggaggcaggtacagttttaagagactctggtcataaaagtcagattcgggcaacacttggccctcgcttgggttcttttacagcastggtttcaacaggagtgatttgttgcccaacacttggtactctctggagacattttggaggatcacaagtctggaggtgaggttaaaggaagtctgctgttgacttctggtgggtagaggccaaggatactgctaaacatctcacactgcacagcccagtccagcccagcaacaaagcaacattcagcccaggatgtcaacattgtccagattgagaaaaccttgtttttagaggaatagaggccttgccctcagaaggtttctctcttcagactgaaataaaatatagaaatattaatatacgatatatatgtcacagttactattatttggttgtagaaacttgatggttttgcaaaatgaaatggaaaacatgtggagctgaaatagtaaatggggatttctagaagagagggcacaggaaaatccaacccatagtaatgtcacgagtactaataagagagggaatgttcttctaccaattcaacatggttaaacctgccacagatccctgtggctttcccctgaaggtcttgtctgttaaaaatagtgctttatttgacacttttccccaaattcacaaacaccagtgttttcgtaatgttcataattgtgccctccagtgttcagcgcagaactaccatgtgtggttataatttsctctcccacgccccagtaaatgctgattcaagcattgtttttaagagggagaaggaagagaagagctttaaaaataatgttagagaaggtgtgcctgaaggggaaaagtatgatgagaatttcgggaaaatcaaactgggctgcaacttccttcattatttgctgagcttgaagactggtgttgctcaagcccatttaaaaaatgtcctattactggctgggcatggtggctcacgcctgtaatcttagcactttgggaggctgaggtgggtggatcacctgaggtcaggagttcgagaccagcctggccaacatggtgaaactctgtctytactaaaaaaaaataaaaaaatcagctgggtgtggtggcacgtgcctgtaatcccagctacttaggaggctgaggcaggagaattgtttgaacccaggaggtagaggttgcagtgagccttgattgcaccactgcactccagcctgggcaacacagcaagattccatctcaaaaaaaaaaagtcctattacctcattttgctttagccttgctattctctgaattacttgtattctagaacatttgtcttgaaataattagctagcgtggctgccttggctgttctaaataatgttaacgggattattttgtcagaattgttgagaaaagctacagctcttccctaaacagcagatactatattgattatctttcatgagaagtatttttcaaactacaggtcatggtcgatttataggttgtaaagtcaatttttagattacaatcagcattacaaaaaaaatcagatggaatagaaactaacagagtgtggtatatagtaggagcagcctttggtgatagttttggtgatacagaaatctgtcaccatacgtacatacatgtttacatgtgcctgtgtgtatgcacacatgggcatggtgagaagcttctaaagatggtggcttatattttacaatgtggtgaaatctgacttgtttgtaaagttctctaaagacctccatgatccctgctagtcttctatccctcacctttgcctctgttgctttttcaggtgggaccagggagattggatctgctctcaccaggatgtgcatgaggcacagaagcattgaagccaagctgaggcagttttcgaggtgaggagcatgttttggccccgatcgccaacacccttgcagatttcaggttaaggaagcagtcatgtgtggcacacagcatttaaatccccayaatctgtctgacttggctcattcattgcctgagtatttgttaggcatctgctgcataccaggcactggtcgaggccctggggktgcagcagatcaccagccagccaggcccctgccttcacagagcctgtgctcctgcatgggtctctccttaccctttgtctgtgcaaggagccggtgcagcctgctgaggtcttttgggcccccactgccctgcgggagcctcgcaagaagaggggctgygaaattggagagtgagatgtgccttggtatcctgtgtgcatcctccagactcactgagggatgtggcagctcacagaccactccacaccgccagcttcccatctggcttccaggcatccagaatagggaagaaatggtagtagctggcaccggaattgggttacaaatgttcaagtgaaaatggacattgctttccaagcagatcagcatcattcagcagttttatgtgattctgtttgggagactgcacaaaatgaaggggcacaccttcagagaccttcacccctcagtaaccccgaggctggcagtgcagctcgagaattttctgggtctcgtcactcttctctttctccaggctgtgcatacttagtgtatatttatgacctgtcatgccgcatgcacagcagaatcttgtgggtcttttttaaaaatagtgatgctgggccccaccctcaaagtctccattgggggtgagataaggcccaggtgtctttgcattttgggggtccctgttgtgcagctctcagaggggtgacccctgtggttctgcaacttggcttgttaatacaaacactagaatatcacagggaaaatgggaagaagggtcactcccaccagtcacattgacagcttcttagtagtcattgaaaaacattcttggggccaggcgcgrtggctctcgcctgtaatcccagcactttgggaggccaaggcaggcggctcatgaggtcaggagatcaagaccatcctggccaacatggtgaaaacccatctctactaaaatacaaaaaattagttgggcatggtgatgtgttcctgtagtcccagctacctgggaggctgaggcaggggaatcgcttgaacctgggaggtggtggttgcagtgagccgagatcgcgccactgcactccagcctggtgacagagcgagactytgtcttaaaagaaaagcattcttggaacatggctgttctggagccccggggtttagatgagaacgtttcgggtaattgtgatttaggtatgttttgacaaccacatttaaatcctgacaacagaatgtatctatttaatttctccctttttcccccccrcttggtaaaagcgctttaattgattgtctgataaacccacttcaagaacagatggaagaatggaagaaagtggccaaccagctggataaagaccacgcaaaaggtacaggggcgagatgtctagcgcatcactgcacgctggggggcgctgtgggaagttgccagctgctgcctggcccctctrctaggtttattggtgtcaccaaaacagccaagggcccactctgtccctactctcctgtaggcacrtccgtgtcaggggatgaggagaacaaagtgatcccgttgtgaggctgagtgctgtttctttggtgtgaaacaacattcagcagctgatagtctgatccctcagtggcatgaattgtattcagctgaattaagaataaatcacagggtgggcgcggtggctcagacctgtaatcccggcactttgggaggccgaggcgggcggatcacttgaggtcaggagtttgagaccagcctggccaacatgttgaaaccccatctctactaaaaacacaaaaattagccaagcatggtggtgggtgcctgtaatcccagctacttgggaggctgagacacaaaaatcgcttgaacccgggagtcagaggttgcagtgagccaagattgcaccattgtactccagcctggacgacagagtgagactccatctcaaaaaacaaaaaaaaagaaaaagaagaaatcataggccgggtgcagtggctcacacctgtaattccagcacttcaggaggctcaggtgggcagatcacttgagtccaggagtctgagaccagcctggccaacttggtgaaaccctatggctactaaaaatacaaaaagtatccaggtgtggtggtgcatgcctgtaatcccaactactcgggaggctgagacacgagaattgtttgaacccaggaggcagaggttgcagtaagcagagattgcaccactgcactccagcctgggtgacagagcaagacactgcctccccctaaccctccaaagaagtgaraatcatcatggcaggtttaaatgccaaacattyatacttaaggcatttcagcacattttgaaagccagacttttaatgatataagcttaccctaggtctcctgcccattctctttgtgcgttgtcccaggtmggtgagacaagtctttgtgaactggttgagtgagttgtcagggaccttgatggtatgagaggaactaagtgtaatctgcacagcaaatagcactgatgctttcgagtgagagtgtttgtgttcccttcacacaggccaaccagaccttcgtaagagcttctcatcccctgttcrggtcattctgatgctttttacatgctaggsrctatgggggctacagaaggatgagtgtggtatctactgaaacagaaataaattaaccctgttacaaagcaaagtagaagactgcaatgaagacccaaccgggtgctctgggagtgtgaatggtggctcctaaaacaggcctctttgtgactatggggatggtttattctgcctgcttcaagctatatcatgaaaatcattctrtgtccccagcaactatcagtagccaccagaaagttgccggttcattcaaattattcacccctcccctcatcatgcacctatgctactgagtacttaccgtatttcatgcccgtgcatgctctggagccacagaaataaataagttggtcttggtttttggtgcacgtcctttaactttgtctatcacagacaacagactcctgaagtcgtgtcttcattgttattggaaatcagtcttatgtagaacttcaacaaaccattttgataaaagaaccagggagggtgatggcttatttgtgttgagattcagaagtatgggtacaatagccaaatacttagcagttatattaaaaaagttaatataggccaggcgtggtggctcatgcctgtaatcccagcattttgggaggccgaggcgggtggatcacttgaggtcaggagttcaagaccagcctggccaacatggcaaaaccccacctccactaaaaatacaaaaaaaccaattagctgggcgtggtggcatgcgcctgtaatcccagctactcgggaggctgagacacaagaatcacttgaactcaggaggcggaggctgcrgtgagctgagattgcactgttgcactccagcctggacaacacagcaagactccatctcaagaaaaaaaatagttaatatataatcttttatcccccctaccctaacttgaagttagggagagaggcaaattcagaggattaactggatcccattgtgtgttaatcacatcatgaattttcttaggctcacgggatttatccatctgtacttttcattgggtaaaagaaaatagaaccatttgacattttttttcagatggggaaagagttgatagtttatgtttggcccaattcactttgtgttggctgacttggctcattcattggctgagtatttgtcaggcatctgctgcatgccagggactcgttgaggccctggggatgcatagacaaccatccggccaggcccctgccctcagggaacctgctctcctgcgcaggtctctcctcaccctctgtctgtgtgaggagccggtgcagacttctgaggccttttgggccccaccaccctgcaggagcctccttctactctgttaaatgttcccctttgctggtacagcaaagctgagacttcaaataggatgtgtaaggccttttataagagtagttgtgctgagcccattaggagaaggcagcaggtcttgcagagaggtctactcatccaataaaacacaggttccttgattttcttggaatatttccccctccttcccattcccactgcatacagagaagcacgtctcaattttcttctttggggtcacatacagagatgaagagcctaggcctgaatgtgaattgagacccattgtccggcctgcatacctgctaagtggcctgtctgcacaggggccaagaggttgtggggtacaaagctcctaacccccagcctcggtgacacagcacttccttcatcttttcgattcagcctttaactcagggagcgcgacccgagtagcagccacacgcaacccactctgctagcccaagatgctcagacatgacccaggcactgctgcgtcccctggggagcttgtagggggagggaggagagactgtagggcagagcacaggatgttgggggagagagatacagggagccccagaggttggagaggtttggttgaggaattagaaaatgaggcaccatttggagggatcccagtaggtgtacatggtttcatcacgctgacgttagagcagtgaaggggccctagccagatagaaaactgtgcagataggcagggaagatgggggagtggccagaaaagagtggagagctgccacgctgcacagtgattccaggtgtgtataaataggcttagggccagtagaagggaaacctcagagctggctgcaagggagctggccaaggtgaaatgtacagcagctggcaattaattgactgtgagggcagcaaagggaaaagtgtcacaggtgaccatcatcccaggtgtctatgtctgggtgatgaggatgccagcaacagaaatggggcagtctgcgaatgggccagtggtggaggaggaagtgcttggcaggggatgtggtgcacttggactgcccctctgaggtgtttgtggtatctagccacaggattcatgctgaaagtaaggcagctggttcttcttgcccagtctccccactgtgtgatctagcttctcctgctgtatgagacactttttctggattttaacatctgcccagcatcttttccacataggggttttttgttttttgtttgtttttttgtttttgcaaaacactgtggatttgggcccggggaaagtagataatattgaaaaatctttccggatacttgagctgagaaattgtgaatttttttcatttttactaaagtattccccgccaggcatggtggctcatgcctgtaatcccagcactttgggaagccaaggatcacttgaggtcaggagttcaagaccagcctggccaacatggtgaaaccccatctctactaaaagtacaaaaattagctgggcgtggtggtgggcgcctgtaatcccagctactcaggaggctgaggtgggagaatcrcttgaactcgggaggtggaggtggcagtgagccgagatcatgccactgcactccagcctgggccacagaacaagactctgtcttaaaaaaaaaaaaagtattcccaaacggagcctcccttcaaagctggtatgagtgaatatgacagggcaagaccactgtgcattttgttttcgtgtctctagcccctttgttgtaaatgtcatcatgagattatcatattgtattctgataaagccattgacggcatgtcacagtttatgctttctgtgataaatgtaatggctgtttcctacctaacatattttctgttaagcaaagtggtaaaattgttccatattctgctttstcttagaatataagaaagcccgccaagagataaaaaagaagtcctcggatacgctgaaactgcagaagaaagcaaaaaaaggtaactcctaaaattctgccactgatgttacttcctgatggagtacttgatttgtttttgaagtgaaaggtgttcacttcagagacttccttaagtatgacggccctggaaaacaggtgggagcaaataggacctatctgagttcacattctcaaagtgcagaataggtattamtttgaggcctttgccaagtggtacttgacgtgttccttcccccacctttgtcttccaagtttgacagtttccatgcctattgtgcttcgtaatgatacctataaatttcttagaagccttgggataatgcagaaaggcctttatgcaaatgttctctagtaatkattacagaaattatgtcattttctcctgcagctttcacagcctataatcttcaaaaccctttattaagtcttgtgagaatgctaggaatgggtgcaggggaagctgggagtcatggccatacaggggattttccatggtgttcatgagggaggagcttgataatctaccactgagcacaaccaggcaagatgcctttcccccacatccttgtttatcctccytcacaaacaaatgaatcgtcagatctttgacccacctttgttcctccagaatggactgggagtttgaagagaaaaatctagcagcatccactttgcaagcacttgtgacattttactaccacctaaaaatgtagggactttctcctgagctagagaaggtgacattccttccagtctattcttctttgacaccaagtttctgaatctgctgcttcacaactgataagatgggattcttccgtcaggctgctctgtgggtggtgtttaccattaatttgagacaaccttttcgagttgggatcccccagcctgaattttctctcccctaaaccagcgttctctgttggaaatagaagacacatttgtagagatgggattgtggagggtggtgtgtagtggggtgatgataggacacagtttttaaccttgaacatttctataaaatgagccccccaccctgaattttcacaacaaccataaacccattttgagataaaggcagcagaattttyacccacartcagattttccatcagcattggccccagcagtttctttcgtatgttttattttagtctggagcttctcagatttgtatcctatctaaccagggcacctgggagctagtgtttgacaagtaatagggtttgtgacatagtaacattttagtgactgtagaggtaagcatttataagtaaaattactaccatattccmtgaagtctgaggcccggaagagagcaggctggtcacagttcggggctgaactccacataactgacaggttggcagctttgagagaggaaggattcctgggctgggagaggtggtccagggaagatgcttaggcttagaaaaggtttgggagtttggtgaaaaggatgaaggaagaaaaagtggctgttttccctcagctcttccaccactcagttttcagaggccctaagttcttggctacagtgataatccttttatctaagttctgcatggaggctgaattggttgtcctctgtcactcaaagtcactggcattgcccaattagcagaatttatacctctgggtgaagcctgatagggtgattgcaatgcaacatcaaaagaagtttctggcaattagaccttcctagcactggctcgggctgcctgcaggataatgagctccctatcaaggctggataggaagatatgggacccatagaatgctggactgtgcataacatgaagagaggcatctggccctgggacttgggaatgattggcattcagttgtgtggtttcttagggcacattggcctgacagatgagagaatggaggttgggatcaggggtttctgaagcatctgtcttctcagccacagcctcacaccagcagtctctggcaccgtgtcttttccacacggtggacttaggtccacgagatcggtcagatccatagcttggaatgttctagagaatttctagttacttcaagataccaccagaaaataatttttatttctgtcctttataaagatttttttctaaaatcagtaagtgcagttttggaccaggtgttctatttgtatatttctgggatgaaagcagccttctgaaaggtactagagtcacattcggactggaatcttttatggagagctctcctaggaggcatatgtatggctgagaatggactgaagaaaacacaactcacttaagggctggaagaaatctggtcatttgaggctttcagttgtttaggggtctggttagctgacatttccctttctactagaacacctcgagggatctgtttcatctccttcaagtggcagattcccggaccctcggtttgtaaaagtgttagcagttccttytgacgcaccacgcgttcggatggatgaaggttttggatacatttttttttttgtcctgatagacggaatctgatgtatgcagccagataatcacttcctttttaatatgtttccaggagattctcaagcagcttcctgccatgcctttttcaaaaactctgatctttgatctaaaaattctctggactctccttttagcatttcaagtgcctttgtgcatgtaagcatggttttaccaccatccttgacgtgggcagacacacacggatgtgatttttgtgagcggctcactttccttcttactctgcagataccaccttttatcacattcttcgactctttcttactatatagagaggtggtttgtaatctaaaggtgtttaaatatttccttcaagaaactttcaatggtttgcctttggtaggttttatctcaaaatcattttttagcagcttgggatatgctatggctgtggatgagtgtgcctgtttttcttgaaggcaagcttgtcagatgcctactagaagtaaacacgaggcaaggagttagccagtcctcaccctcagagaaattctgggctcgtgcacagggtcaagagcacggggcagagccagcattgccgacaggtggagggacggaggcggcaggatgctggggagatggtgtggagcggacccagtaaccccaggctctgaacagtgtctcttgagccctcttcctgctccatgataatcagcttattgccttggaggtcttggagttgaccacgacccaatggggaaaagtaagagagagcatcagaaatgagaggcgttttacattgtatttacctacgtgtgccacccaaccgtatgaactcagcagccttattctcatttaactcccatgttactatcaatgtgaattaaaaattaattctgggctgtgcgtggtggctcacgcctgtaatcccagctctttgggaggctgaggcgggtgcatcatgaggtcaagaaatcgagaccatcctggccaacatggtgaaaccccatctctactaaaaatacaaaaattagccgggcgtggtggcgggcgcctgtagtcccagctactcgggaggctgaggcaggagaattgcttgaacctggaaggtggaggttgcaatgagccaagattgcaccactgcactccagcctgggcaacggagggagactctgtctcaaaaaaaaaaataaaaaaattctggtaaagccttctgtttccatctgtaactacaaaaagtttataagggatttttaaaaataataatggccagcattcattaggtacttattatggtcactgttccacttattaccatgacatcattaaatctaagaagtcttgattttttttttttttttttttgagtcagcatctcactaggtggcctaggctgacctcaaactcctgggcttcagggatcttcccgcctcagcctccctagtagctgggattacaggcacacaccactgcgcccagcagggacttttcttgagagagagagaactggaacattataatatgttaactgcacagctgacatgtaaatagttgactctctcactttccactagaggctgcaaagccaatgttataaatgtaataaacagactcacagagttctatacgagcatagtatttgctgttatactacaattttaaactctttaattttttttttccattttcatcccaccctaagctttgtttcctaggaatttcctagatatttttcaagtgatggtaaatgacactcgaaaggttttcttgccaaagcttggcttcttctgggtatatattcttcatctctctttttaaaaatccttgctgtcttctctaggggtggtcattactaactgggaaggttttgtttagatgagaaggaaggaagatattagtaaggcagagaaggggaatgtggatgtgggtttaatcagccctaatagaaaatttggtggcgagccatggactgtttaacacatgaaacaaaggtaagactgctgctgcttgaataccagtttgactttattattttcctttttgtgtcaattgtgtatcctgcactttctcaccgtgtgcccccccgccagtggacactcttggtaagtctaccatcccaaatctctggtggctgctcacggtgtggtccttgctgtgggctttccgtggttgtccagacctctgctagctgcccaggtttttctaccagctcaaaacaatcaactgtgcctacctaattttccacaactttaagaaaattgtgtgtgcgttgtgttttaattgttttcttttttggatgtttagccatttacgatgttagcacaacactctgagagcctttgaatcatcgtaattcaatattagactcatggaaaaaagaaatacagagtgacttaaactgtcatttccacagtcaataagcatttttgcatacatatatacctgcgtatrtatgtatgtatatatttatgccacaaacmgagctgcaagcctcaaaataattctcaaatcagatttggttgtgttaagcttgcaaaacatctttaactttgtcctgtctgcaagaccatatagttctttccataaccaatgattcattttttaaaaaataaatcaaaagtatttcttatttcagtagagtttgtgaaatgtttcatttcagaagtatcagatcttccaattaagtaatcagaatgattcttcttgactgaatgttgaacttcactctgtggatgatcatgctgccaaaacttcaagttgcttttggagtcttgttgctgtccctctgtcctgggaggtctgtctgcgaggtgtctgtgtggtttatcttgcctgagtgtgcccaggtgttccctgagcattttactgaacagctccaaagaggcttttgaagtggcttctgtcatttacagcaaacccagtgcacaaaggtctcctttgatggttggggctgacacggcctctatttcccctcatggcgatgttgggctagtggttccccaactttaaaaaggatcatcctttccagttctcaacattgtgattatgaaacagcttgcacagtttctagtaaacctttggaaggaaggtaagacacagtcactgttttgcttattgcagtaaaattcacatcacagaatttatcattttagccgttctgaagtataagtttcagtggcttttagtacattcatggtgttatgcaaccatcgccactatctaatttcacaacattttcattatccccgaaagacacctcatgcccattaagcagtccctccctgtttcacagtctccccacccrcgctgaccctgacaaccactcatctgccttctgtctctggatttgcctattctggacattttatacaaatggaatcatgtagtacacagccttttgaggacacagtcccttgagtcttgagttttactggaacctttgccgagagcctgacatgagtcagttcatggagtaaatagagcattttatttatttgaaatgatgggaggtcagtttggaatraataaagaaactgtatagccttttgactttgtaagttctaaagattctgcttatctttcaaagagaaatctctgcaaccccctttaattttttctcttgtaggggctggttcataggcaaagccacagtgaatttgggtataaatacacaagaaaagctatatgatttgtagctctcataaatgtttaaaatatttatacagagagaaaaaaataattctttaattatttttaacagttggcttggctgggcgcgttggcgtggtggctcatgcctgtaatcccagcactttgggaggcctaggtgggcagatcacctgaagtcaggagttcgagaccagcctggccaacatggtaaaaccccatcacgatcagtgacacgatctcggctcactgcaacctccgtctcctgggttcaagcaattctccagcctcagcctcccaagtagctgggattacaagtgcctgccaccacacccggcaaatttttctatttttagtagagacggggttttgccatgttaggcaggatggtcttgaactcctgacctcgggtgatcctgttgccttggcctcccaaagtgctgggattacaggtgtgagccaccctgccagccagtgctgggatgaatataagcaaaaggtgtaacctgggggcagagaggaaggagcctcactaagcctkggggtagggtagtgataatgaggaggagcatgaggggtcagctgttgaagaatgaggaggggatattcaaggtggagaggacagcgtgcaccaacacatggctcttgtcatttagaaaggagcatcagcaacagtggtgaagggtagacgtgtcacactgtgtgtgtgatgctccagggacagccttgaggcagggctgtcgtcccaccaagggtggactgtgtgcatagagaaccatagtgacccctggctactcagcctctggcttcctggaccgcgtctccccaccccacactgacctgcctccagaatggttcaatcactgggcctcgattctgatcagactccaaagtggaccccaaatgcctctccacgtcattcttcctttcttggaaaaagcctgtgaaatgtgaatcctttcctctaggcacagtggtttgctcatcccccagccgtatccagcctatgcactcacccacaggaatgtttcttgtgtttacaaaaccagcagaaagcactctcagaatgaccctgagacctgcagtcaatggatcaatggctctgcctctatggtaaaaattgaatctgtgtagattccctgcaaccccacccccattgatttttgaggagggatagtactaggagctctccttcccacagggatgtcagtggagtgaggaggaagaacaaggagcagagggtgggatggttccagccagttcttcgaggcyaagcccagggcttagaaggctgatgaggaaatacagaatgtaggcacagccagaccccttctgtctgggtggaagcagggatgctagaattttacccttagacctattgtgaccatcagaaagctgcccctgacctgaatccatagatgtctgaatttaactcagaaatctcctccaaggccgggcacagtggctcatgcctgtaatcccagcactttgggaggatcacttgaggtcatgagtctgagaccagcctggccatcatggcaaaaccctatctctactaaaaatacaaaagttagctgggtgtggtggcgtgcacctgcattctcagcgacttgggatgctgaggcagaagaatcgcttaaacctgggaggcagaggttgcagtgagccgagatygctccactgcactccagtctgggtgacagagtgagaccytgtctccaaaataaaagaaatttactgcaaagggatgttgcatttcaggtgaatgtatgtagccttcagaggccgggctatttattagatgtattttataactgaggattctaggtaaacacaagccaaacagatccaccagaagcctagagctgtgaactcttcctttgcaaagcttgtctccagtaaaacctcacgtagacacaactccttgagtgccttgcccactactctggtctcagaatgccctgggtgtgcctgtacacaataggactgttaaggtgcagtgcacctgacttccctgtggctgcattcaggggcagggtagaggtatatagagtatggaggcacgccgggagctgagtatttttcttagcgttaattttcgaccaaatacaaaacagcagagaaggaaacagacaacttgcttgaaatatttattccttgcataatatggttttcatctccctagagaacactaacgggatgggcaaagcctgacggaatggcagggtggggaagcagttgctgcctctcttgagttgcaacccatcagccatttatggtttttgtaggacyaattgattcacgcctggtgccattcttccattcataaacatccttkactgctgcagatgagtcctgcaaaacactccagcctccatttattagtttgttctttcattcattcattcaggaaaggggtatgacaagcctcctctgtgctagactctgttagctgctaaggaggtaaaagtagcatctacactcaagctctccccagcacgaagaatgcatttatgttccaacatcaattctctgactgcagctgctgtcctattcagttatgacacacctagkgttagtgtagaccccacaagctaagagttcagtcccatgagactgccccaaattcagtcaccagccacaagtggggtcctcagattcctcacacttctgcccagccgaccacaaatttggggttttctatgaccccctcgcccatcaagtttaataattctctagaaggacttgcagaacacaggaaagcaccatatttacaatgactggcttcttataaagaatgcagattgtagccttgtttactacattaaaggactctgctgaagcccttgaagcctttttggcttctagataattccaccgtgacagtgtgtatttggattagactgtggcttaactggacatccagttagcaagtggtggttgttgtctaggtgacagatgatggtggcctgggctcagggaagtgaccacagagatagagaggaagacaggtggattcaagagctacttaggagaaatgcaaatgaaagaaggaagagttgaaggcratggtaaatttctggatccggtagtcaggttggcagatggtggagtatttctttaaccaccaaggaagaagcattttggagccgtgaggatgctctgttggagacactctggatggtgagctgcaggttggcctgggacgttttctagttgttctctgaaatgtctctttttatcctttgctttgataaacaactgattgcccagggaccagtgaagaatcttgatgataaaactcctacttgtagtgaaagaatcatgggatcttttgcattttcttacatcaaaaacgaccttgaactgaaagctctctttaaaaaacaaacaaacaaacaacaacaacaaaaaacccaccctaccctgcatactatcacctgctaaactacccagtgtcagaaggacaacttcagagatgctgtggtggcagctgatagtgcctgacatttagtgagtgctcagcacgtgccgggcgttgttctgaatgcttcatgtggattagttcatttccccttccagcagccctgtgagctcaatactgttattatttacatcccacaggtaaagggaaactggggcacagtaggttgaaaaataacggaaattgagtttgtttgaaaaattttaaggctaaaagccttcagtcttatctaatcacatctatcttttgatttcgggttggatttttcttttgggaatcagtcaaaacccactgtgggttattaagagtagaagatgacttataaagggataatgaggatagcctccttttgctgggaagacagaatttttcattccaaattctaatctccagtgtcaccttgcatgtccatttctggatttatattttgtattttagtatttatatcccatgtttcatttgactctgggatacaagcaattgtcagatgcaccattattttccagaccactaagaaaggaaaaaaaaaacctaccgattaaactgtgacacaccattgattgtaagacacaccctgattgktgaggtgtaaaaatgggggaaagtggctctcttagaatgaaatatcttagaatgaatttgtgtgagtcaggggcaggtgaaagtcattttgcaggattctaatggcttctccatacacctctctccgaagaaagaaaggacttggggtgttttgctgactcctggcagcattcttggcccaatgtattctgggtttgctcttccccgttggagagccctttgccagagaacagccactggcttgttgagccaggaagcttaccatgtgagtgcagcttgtgtctgaagaggctgggccagtacagataatacgaatcacatttcactggctttttgatcggctgtttagctcctggcagcttgttcccagcattcatgtttgctgtgagtaggaaacacaaagaacctcgtcttcagaacgagaaagacttggggctggattctagctgtgcccgtggctggcttagtgctcatgattgtggccctgtgcagaccactttgcctccctcagtctcagtttccccayctatcaaaacggatattcattcctgccttgaatgtgttatgtaataatgattaaggaaaataaaatgcaagtgttgaagttgatacaggatctttatttcattccagaaaactctgtaaagtttcctcatttaaaaattccttccttctgtggccgggtgtggtggctcacactgtgatcccagcastttgggaggccgaggcaggcagatcacttaaggtcaggagttcgagaccagcctggccaacatagtaaaaccctgtctctacaaaaaatacaaaaattagtcggacatactgtcttgaacccaggaggcagaggtttcagtgagctgagattgtgccgctgcactccagcctaggcaacagagcgagactctgtctcaaaaaaaaaaattccttccttctttaggggtgctgccttggcccatgacatggtgcattcacaatgctttgccccaggaacattttctgcaaagagaatcatcatgatatcccctggggtggggggataaggggctcctggctgctgttcatcagaattccccagcgtgaatacacaagacctggaaactagcaccaggaaaaaaacaaaactcaagactgaagatgcctaagatattacagaagaaagccgaaagcaattctttgctcaagaattttgtctgggaagcccatcgaaggcaccccctccctcctcctcttggctgcttgatggtcctggaattgggtggttctgaagtattaggccatttaagggaatgatggttgaggccagtgagcaaacttggtcacgttgtatcaatgcttgattcatttacaaatatttgaacacctgccgccttccaggcaagtgtgctgactgaggagatacagtactgagcaaaagcattcatgggttctgcccccgtgggactgccccctgactaggggagactgacgtcaatcaaataactagagaaataaagatgaaattcaaaccgggggtagtgctgtgaataagtataagggatttcagagatcaagtaagagaagcctaatctggggagaaagttcacrgcaggattccctgaaggatcgagaattaagygagacctgtaggataaaaggtgttaggaatgtagcagagggacagcagagtgaagatgggaaggggcccaggccctggaggatgagagggagaggagagagggagagaatggcccacaaaggctgaggctatgaggtagacaggcaatgacctttcatgccttgcagggcaggccatgttaaggatattgttcttttcttgygagcaatgggagctgttgaaaagcagtgagaatatttgcattttgaaagtaatccacagccgggtgtggtggctcatgcctgtaatcccagcactttgggaggccgaggcaggtggatcacttgaggtcaggggttcaagaccagcctggccaacatggtgaaatcctgtctctactaaaaatacaaaaattagctgggcatggtggtacatgcctgtaatcccagctacttgggtggctaaggcaagagaatctcttgaacctggcaggcggaggttgcagtgagctgagatcacgccactgcactccatccagcctgggcaacagagcgagactctgtctcaaaaaaaaaaaaaaaagaaaaagaaaagaaaagaaagaaagtagcccagggctgctctgggcgagctagtccaagtgcagtctggggtgagacattaggggctgttggcatctgttcaggtgagagatcgtgatggcccagtgagggtagaggtagcagaggtgagacgaggatggagtcaagtccgtgggagctggaatagccaggaccagcgctcaaggagtcagtggtgactctcctaacactgccgatgggagtgaagmgaatgggcttttgtatatattaaatcagtaccaacacaactctctgaatttgtggacctcaaaagatcactctatcttaaaaccagtatatccaactgggacatgaaataatttctttcacagtttttttttataaatataattacatgttgtattagtgaatttaataaataaacattgtagttttagcttatcatctatcctgaatggaaatgtcttgactataattatagcaatctttacagagtatacttattttagaatgctayaatttgagagtcctttaattataatacacatttaaaataactttgctataatcataggataacttaaatttatattttccaaattagataacactgggttcagtggcctttttttctttcctatgtagatacagtttttaaagtcagcattattaattatggatagacatgtgccttrtaacttgtgaaaggaagtaaagatacatttttccaatttctgacaatcacaggctgttattttttaattttattttatctatttatttattttagatggagtcttgctctgtcgcccaggctggagtgcagtggcatgatctcagctcactgcaacctccccctcccaggttcaagcaattcttctgcctcagcctccccagtggctgggactacaggcgtgtgccaccacacccagctaatttttgtacttttagtagagacggggtttcaccatattggccaggctggtcttgaactcctgacctcatgatccgcccgccgcggcctcccaaagtgctgggattagaagcatgagccaccgttcccggcctcataggctgttatttttttaaattgctaccataatcaaagcccaccgagcaagtttggtcaaacacaatgtgtctcaatctggtgtctcccgacttctgttcaccatcctacacgagagttgagaacattctgaggtggtctgcagccctctgtgttttgttattagaacatcatagaatagatcgagagactagaagtagccctctagaccagccctgagtcatgtgacccaacaaggcccacaattggccatgctgtttggctgcttgcagaggaaaagcaagggtttacagctttccagagcttccctgctggtggactcgtatcatacacacattaagtatatctggattaattttgcactagccagcattttaaaatagaagagaaaactcacagttttcatagtgctggtggcacccagccttccctctgtaagccgttggccacaggtggtgggtctctgtgaacagagcacctgccctgaggcagattccaggagagaatgggagaatgtttttacaggtttcttgtctactaaaaacacatgaaaccagtggctcaggtggccagattaatgtatggtgatgattactcctacatccttgaggaagaaattgaaggcatggtaaagaattattctgaggggtggaggtagtgactacatggaagaatgggtgagtgggtcaccttgaaaatatgctgaaacacccaggcgctgtggctcatgtctgtaatcccagcactttgggaggctgaggtgggaggatcacttgaggccaggagttcaagaccgtctggccaataaagcaagacccaatctttataaaaaaaaattgaaaaactagctgggcatggtggtgcacgctggtagtcccagctgcttaagaggctgaggctgcaatgagctatgatcattccactgcactccagcctgagtgacagagcaagactctgtctccaaaaaggagaaaattatgcagagacttctcaagcagcaaatttcttatatatagtagttcccccttctcctcaggggatatgttccaagaccccccgtggatgcctaaaactgcagatagtacccgaaccttacatatactgtggtttttcccatgcatacatgtctatggtaaagtttaatacataatttaggcacagtaagagattaacaacaataataatagaacaattataacaatatactgtaataaaagtcatgcgaatgtagtctctttctctctttcaaaataccgtattttaccacaccatgggtagctgaaactttggaaagcaaaaccacagaggaggggccagtgtagtataatcgttgggtagcacccctccgtggacttagatacatactatctacacatttgtactcacttgactgatgagagttatatacacaaagctgtccatactgtatttactggccatctaaggcattttcaagggtgatctttgactataattttctcataatgtgctaacttagaacttattccctgtctgagaagtgacttttccttactaaaatctgactaccttttctattgggatgtgctttaagcctgattgcctcttgctccaaattaaactttctcctctgcttatgagtgaaaaatacagaatatgttcctacatccaaggcaattttccctgaccctttctttcttcagaccaaatggttcattgcatttaatgttctctacatcactaagagggatagatggaaactgcagggcccttcctgcgaggcggtggggcagagaataggttcagtgttaagggaattaggcagtgtggctcaaccctgcctckgtaccattctttctgtgaccttaggtgagtcccttgacttctctaggacttggtctccattgaaacatgagcagattggcccaattggataaccccttccagctctaacattttgtgttgaaactattaaacagacatttatcaagcacctgctgtatacacacatgacattgtactaggggctgtgctgggaaagaccaaaatcctgccctgaagaagtttagraaktatctctctggtttgagtgataggtaaggcccctgcataggcagcccaaggtggaagctcatgagctggtgtcccctgctgtcaccctgctgtccccacctacagatcagatttgtagtagctgctcctttggacacagtgcctcttggtccatgtttatcttttagggcagcaggcttcttttgcaagaggccatggtctgggggccatactctgtgtcacactactctgccattgtagggagaactggtacaggcaatatggtaaataaatggatttggctgtgttctaataaaactttatttgcaaagatggtttgctgaccatgtgttagtcattcaaaagactaacaccctgtcttaaactccagaagtggttgcctgcacctaactggggtctgtggacctggccagataattcctaaacatgggccaggctccgcrtagaccccactttcagtttttcatcatcagagacctgtctggaggtcttgttattactgggcttgttctacagcaagagcattcaagactctccactagagagtcaaaggaactgccaaggattcccatgggcccccagagccaggagagcggatgcttgccacctttgtctttaggagcagatccttctatccagacagaggctctttgattgagattgacccaacaaagccagcccgtgcccgtttttggaaacacccayaggctcttaccttgtttccacatctcttagcctcttcagaatgttctgcaaggaaagaatgctgtctggctctgtgttccagggttgtgttggcagaagagttggtgggggttgtgcagtgtgagaaggcaagtcatgaagagttgccccaggacattttccttgtcaggaataagccaggctaaatgtgccctttgggcattgaaaattggaaatggctggtcctagaaaaacagcygccttaaatccttttggggcatgaataaatactttttttacatcctggaaaattgtggttttgactccagcaaggaccccagggaggaggggcacttgttccagaagctggtatttcagcaagccgtgcttgggtctctgttttttgcagggagaggtgatatccagcctcagttggacagtgctctccaagatgtcaatgataagtatctcttattggaagaaacagaaaagcaggctgtccggaaggctttgattgaagaacgtggccgattctgtaccttcatctctatgctgcggccagtgattgtaagttaatggaaaactccagaaggtttaaactgctggtgtagaggtggcttccttctaattttatccatccactgttgagtcatggagaatctactgtcaggaatcatgatggtggtatctcctgtacagaccagcgattcagtgcaagttgatggccatgtagctcactcctcattcactgttctagtaccacttgttccccgttactttgtctcaccaagtcaagaaggcccagcagggtggttctcaaagtgaggtccccaggtcagcagcatcacrtgggaactggctagaaatgcaagttcttgggcccaacccagacccaccaagtccaaacctctgggggtggggacccagtcgtctgtgttttaaaggagcactccaggtggttttgagactcactgttgtagccgagtactaaggggtgaccatgagatgaatatccaagagcctcaatgaatcaatttagacttaatttttaaggaaatcatttgcatgccgtaattgagaacttgcactgcaggcgttctggaagctgattcgaaggtaccagctcatttcccttagccctagcaaaatgtctgaatttgagttgttcccctgagcacagaacttttccatggatcgttctagcccggcccgtggtcccaacttggcacttcgataaagcacatgggatgtttcttccatggtccccagctcctgtcttacttgtcttttactaagttgctggaaaagcacaagaaagaaggggaaaagttagcttctgttgaacacacaggcactgtcacaaagatctggaccaaaatatatccaagtcgtgtcatcyattgaagctaagcaacttcagaaaagggccacagtatgaagagggctgtgntgcaggatcccgtgggaacacacagtcagaccatctgagcaggcctggcagtcccccaggccctgggagggaggcctgtgtgttccccactgtcccctgtgcacaggtcactcctccattatggcagatttctttttccatctcatttcccaaaagaaaaggcatgtagtgccttcagcaaagatttgccagtcccaacagtgccttttctgaaaaactgaaagggttatacagagaccctaatgaaaacaattggactagagcgatgaagggaatcactcatgataataacatttcatgaatgacttttccttcaggaagaagaaatctcaatgctaggggaaataacccaccttcagaccatctcggaagatctaaaaagcctgaccatggaccctcacaaactgccctcctcaagtgaacaggtaggcttcaggggttaagcacttacaggatcaaaccaaagaggtaaaagctcaaggccctgagtgttcctgtggcatgtgtcacgtcttaaattgtagtcatattcaccacgtccttcatgatgtaatatatgaaatcaccacagcgagctgttacatagaacctattgtgtgtcaggcactgtcccaagctctttacatagcctgacttcctccattcatcttcatgattatgcttgttttatagagaatgatgcagaggcactgagagatggagtcacttagccaggttcagctagctagcaggtagtggaactgrtatttgaaccaagttggtcaggttccagatcccatgcacttaattgctgtgttcatctgccctctagaagtcaaccctcctaagaacacgtcgctggtgtgttttgattgacactgtcaaccattctccatttctcccattctaattgagcaatgcatggagagctctctcatcttatgaaaaagatgacatttttatgctttattcatttaattcacatcacacgcacactatgggaagagacatatttgggggaactgatgaatcacaygctggcttttgtgcttggtaacaatcttttcgtctccttggagagctggctcagagggcaaatttgggagctcatgttttctattcyatcaaattatatttattagaccagagcatgcatgcattcacttgacaaataaacatttactgagtgcttcttatgtgaatgaaaggtggaccttatactcatgtggtcctttgtcaagcaacggagacagatayagaaataatggtgaaagaattggcttgttcttgattctgtcaggctttaaaatttctagtgctggtcaaatagggcagaaatgaccactgaatatcaagtggttaaaatgcgctaccaacaagtctgggaaccatgattaactttatggcattacaagaggaaaatcctgtaaattctagccttgggtataaatggctgttataaattattaattggtcactgtatttctccctctctcgactgatatttcatgattttccttttcccttcctttccttctccctattaattatagttttactttctcagtaaaaggattatgatattgatggatttggtactgtggctcttcaatttaaaaaaaawttttttaacatgttttgctttcattcccacccccacgatggcagcgttttgatgctttggtggatgttaagctttgatggctaacgcttcccctctcagcacctyattcacccagctggctctgtccccttaggtgattctggacttgaaaggttctgattacagctggtcgtatcagacgccaccctcttcccccagcaccaccatgtccagaaagtccagtgtctgcaggtgagtgaagccggggtccactcttgctttcagsacgggtcatttttctttatgctaatgtgagcaatggagccagtscttatytcttagaatggctcattctcaaacaggaaatgggatgatgagctgaaagaatggtaataattttggtcttgctctttagtctctggattaattttggatcagaaagaaaaccccattagcccttgacttgtggatgtagcttattctctctcacttgtatgttgtagggattttcctattctatgagatcacatttgattttcctgtttagcagagtgaaaaccttctaaggcctaaaaaatggtgaacctgggttgatttttacacaggctgatctcactgttgccagaacaaacgaaggaagtaacaatggcttatgccctcatttcaccccatatttttgtttcarggtttcataaagtaaatagagttcttgctctgtcagtcactgctactactaccaccactaccacgaccacacctgtattaattagtactgttccctattggaacaaaatctgttggaatagttctgccatctgcaaaactgttgtctagcaattttctgttagaagtcagttcttggcttgccgagtaggaaagtttcttttcctctccttgaaagatggaagcatgatgtaccatctatctctcttggtatagtagtcctgttactcttttaatttaactttcaaagccaaatgagtttccacttcctgtgtattagcactgagagtagagggcaggatgtatctgctcaatctgtctatggtgatgttttggtgcacgctgatgcctatttcctttcactgcggagcttgtacactamacacttagcaggaagttcagacctaagacgctgcatcctggacattctgccccctgaagatattggtttgtttcttatcttctgtcgactgtgtgtgtgtgtgtgtgtgtgtgtgtgagtgaaagagagacctttttattgttgccaagaaaaatctctcattagtgtaaaacaaagttgcgtggctgtttttttcttccttataattttagtttgagtagaaaaccatgttgcactgacatctgcaactctgaggctgccggggtggagttgctgtgagctttactgtcggtccccaactgccgccttctggctgactggaggggaaagtcaaaaatcatgatatttattcctcactgcagcgatttcctccagcacgctcccctatgtctgtctgaacatttgcaccaagtaattctagtgtagaacagtcacgcggcccttgagtaccttattagctgccagattttgcaagccagagtctcttgcaggcttaggagcagaaaccatgacttttcctatcccagccctagttatttacttcatccctgctgctgcctctacaactgctctttttatttcagctccgtttgtttggaccatgggagtctgttttctgctttttatgatctaagttactatacagagtgtggagcattttttttttttttttttttttgagatcgggtctcgttctgttgtccaggtggagtgcagtggcataatctcagctcgctgcaacttctgcctcctgggttcaagtgattctcctgccttggcctcccaagtagctgcgattataggtgcctgccaccatgcctggctaagttttgtatttttatcagaggcggggtttcaccgtattggccaggctagtcttgaactcctgacttcaggtgatccacccgctttggccttctgaagtgttgggattacaggcgtaagccaccgcacctggccaggagcatgtttcttttgagtggagatggaaggcagacagaaatccagagcgggtgtgtcattatttgacatcctgtttactgtgccatttcaagagcaaacagctgagcattgattgcccttagtcgctgaaagctgcctgcctcttgccaagtgtgctattgtgccagacccacagatattttaacacagaaacagctggggtcagagtaaaaacattaattaaagcatcactttgttaaaaggtaaaacatatgcacaccaacatagtgagttgatttgctgaygttcttgacagcgggcttgaccagactcagctaggatgaaatcacctcagcaaatccatcggcagtgcttagctgggttggccttggtcatgtggacccagatggtccatccaagaacattccagtcatgctgaagccccagtggacttttgctgcaggctcatggttcctgcaggcagattarccctgtcccttttcttgctactgacatcagctcccctcgttttggtggtaggcgaagcagcagagttgggcgcacttgacgttttagaaccccagacctccctcgtaagaatgccacatggttaccatcggagacctgagtcctggcagctgtatttccccctgggtcacctggaaaagcattttgttgactaccttcatgatttggtgttttgaaaacgtgttttgtggtttgcactgcatctccagggcagagagctaattgcattatgttgtgcttctctctcttctgcctcrtctgttcccctccttcctccttcctcttaccactgctcccctttctttaccttccgtgcccacccctcacccctgcttgtcctccacagcagcctgaacagtgtcaacagcagtgactcccggtccagcggctcccactcgcattcccccagctcacattaccgctaccgcagctccawcctggcccagcaggctcctgtgaggctgtccagcgtgtcctcccatgactcaggattcatatcccaggatgccttccagtccaagtcaccatccccmatgccgccagaggcccccaaccaggtaagggtgyccttggctccaggagcagctgtcacacctggtgtcctgaccactgtcagtggccagaaccaaagaagcaccttggcttagacaatccsctgcccactgasttgagaaacctctggtttaatttctcatctttagatgtattgttcccctaaagggagaggtgctataagtgggtttgaagcctgtctccatggtggtaatggttgcattaccacatcgatttggggagctctcacgtaagtagatggattgaaagaggtttgaccactctcaggcgtccctgtaagtgcccagcttggcataattaaatgctataattaaagggcattgcacaatggggacacctcctcccccacatctcaggttctccctgaatggctgagattctatggttgaatagcgcttccgataccatcccttggcgctctcaggttccttttatcaatctgtgttgagaatgagaatgaatcatcagagcttctgcacataattctgttggcacttagattctggaagggaaggtgtggcagaatctcttcaactacagctgggtttaatggtgctaggcccagcccagcccagtggttccagctggagcagaacgcaggagctggccagggcatctgaacactcttcatgtgcatcatcaatgtatgtgatcctctctctgtcctctctcccttagtgtcattgggttggtgtcggccttgaacttggcaagtagctctacatacagaatgctgggtgccccacagccccacctgctgggaaacccatgtcagagctctgcgttcctctcctcacagctcagcgctcccattagcatttttcagccatcctggggactgtggcctctgtctgycttccttggatacacactcaattttaaacgcactcagagccaagagccacggctatagtttgagagtgcttgagagtgcgtgtcccacctggggtgcttggcttggtctgtaaggagctcctcttccccgctgtgtgcttcactaaaccatatgtgctgctcacaagcagagagggcaaagggtcgggaggagggctggaatgtgcagttcctccgggctgttctagtgtgcagcataattgtgtgtgtgtktttaattgacaaattaacatagtagtgtgcactgacgcccctttctgaaaaggagargccacgtgctgcagccttcccttccaagactgtgagtgtggatggggtagaacagagtgtttcccatggcatrgagggaagcagaagagggcatattgggtttacttaaatctgaaaacctgtgcccaagacatgcgtggctagcaactctagggtagctttttgttttgtcrtgttatgtttttaagacagtctcgctttgtcaccccaggctggagtgcrgtggtgcaatgttggctcactgtaacctccacctcctgggttcaagcgattctcctgcctcagcctcccragtagctgggattacaggcacgcgccaccattcccagctaacttttgtrtttttagtagaggtgggcttttgccaggctggtcargctgacctcaggtgatccgcccacctcggtctcccaaaattctggaattacaggcatgagccaccgcgcccggccactagggtagttttaatgagctcagggatgctacaaaacttaatagagaattcttattttttaagaaaggcattacgactgcttattattataaggtaaaggggaaattgaaggtcattgtacagatcacattagccagagggtacaatctcctgaaggcagtaacctcccctttattagggagaaagggggcatacatctaggaggcgcaggagcccttcatttctctactgagtaacacaggtctgagatgaaagccgagtgatggaatttgttcagaattctctggtttacctccctccactcttcaaattgtgccctcacccatctgtgcccaggagtggggccatgtcttcaatgagggtctcaccctagagccatttattccatctgagtcaagaggttctttataaaaaatgagcataattccaaagaaatctgaacctgcagtcctgcggtgggttactgttttgttgttttatttttgttcgttttttttgagacagggtctcactctgttgcccaggatgaagtgcagtggcgggatcataggtcactgtaaccttgaactcckggattcaggcaattctcctacctcagcctaccaagtagctgggactataggcatgtgccaccatgcttggctaattttattttagatttgagaatacatgtgccttgcatactggtgaggattgggcttctatttccattacccaaatagtgagcattgtctctgataggcaatttttcaaccctcactcctttcctcttttacattttttattttttgtagagatgaggtcttgctatsttgcccaggctgttctccaattcctagcctcaagcagtcttcctgccttggcctcccaaagtgccaggattacaggcatgagccaccacatctggctgttttttgttgataaagccctctaaacctcaaattttttaagttcagtttctcgactgggaattggcacaaatgtgacttaaatccaaaccttccatcttcaaatcctgggctgctaaccagacactgagctcagagtgcagctgggatgtccgtccaccgtggagtctctccttgctttgggtccactgagccccacacattgttgagtgtctgattgtctccttgcccttacaggacaggaaagcgaaatctctgttcctttgtagggacctttcttttgtaggtgaaagggacagaaatatgattctggcctccttgatggtgaatacaggaacactttcagataaattacaatagagaggagtcagcttatttaaacaaactgaggttaagccagagattgcagttaacagtgaaaaaatttaaagcaagtacctggatggatgcaaagcagtgcccaggagacccaacttacgtgacagagatgatcattgtcactcattcattatgttttgagcaccagccatgtgccaggtccagaactagaagaaacttgggtgtaggtgagatcataggaacagtccctgccccagctgaacatcaggaagccagactgggagcrcatgccgtggctgactaggactccagcagggacctggggttccatcagatcagtgtaaagcgatggtttcccaaatgagacctctccagagatggttcattccacccmgcaatggccaccagaaacattgtgctgaccagagggcttcactgccccaaaccccaaaatcacactccaggatgagaaacctaaaagtctatcttgatgaggcttcatagctggaaaccacccctcatggatccacaggctgcatttgatgaaaggagactycaggaagtcgagccattccaggcagacatgtagcaaaagcccgagctggggtccgccctcatgcaataaataacacctrtgcacataagagaggtgacaggcrgggcmtccctggggacctgggcctgtggcacgtgaagaaacaccyaagagagcacgaagtcccaatgccatgaccagatatttcggtgccaggcatgcttctgggtcccagcaaaagacacacaaatccgtgtccttggggacccacagtctagtgacctagggctggccgggtcgcacgcttcttttcaagggctcgaaagcctctgcatggatgcaactttgggggaaaagtaaccctaaccctctgcttctctcatcctcccctcttctgtgtatatgtctgtctctttctctctgtgtgtgcccttccccactcccatccccattcctttttttatttattatattttggtggtgtgtggctcggtttctgttggtcccctcgtgtggcccctcccctgctgcagaactcgtccagctcggcctcctccgaagcctcggaaacctgccagtcagtgagcgagtgcagctcccccacctctgtcagctcgggctccaccatgggtgcctgggtgtccacagagaaggtgaccgcccgggtggcagccacagcggccccactctccctggtccccctgcctgctgctcagacagccctcacagccgcggcaacctggaagctcagaatygacaccaagagtggggctcctcttggggacagagggtgggacaaggctgagrgcattttctagaatgagtgcctggctgctggacaatgaccayatggttgtctcaagggagaggaaggggtwtggggaatttggaggtgtgaaggctttctcccagaccaggtgttgcgtgcctgtccatcctcctccctcccttcccgagccacccaccagaccgttggatgagccatgtcactgtgtcagaggctgtgtgcttttccgctttttagtttgcacccccacccccctgcccttgatkgagaatgtgctcctgagcaatgcgaygattttggaaacctagaatgaacagattcatttgaagatgctttggaatttttaaatttgcataatgaaatgagcaaatcactatcaccattaaatgaggcttcattagttacattatcaaaaaccattgacaaggccacaaattgagggcactgatcaatttccaaacttctaaaacgtaggtcaaacatagatgcttatttgctgtcaaactcatgtgcattctttgcaccccggctcttttctcttgcatcacagatcatccgtgagcagcagagccccaatgtttgttttatttataaatattcaggtttcccctcccttgaatgtcaatgccattttgtatctccgcactcatcctgttatattaattttttttccttycccccccctttttttgtttgtttccagttgtctaacgggttttctcactatagtttatcaagtgagtcccacgtggggcccacgggtgcaggccttttccctcattgcctgcctgcctcccgcctgctccctcgggtcacctctgtccaccttccagactacgctcattattacaccattgggcccggcatgttcccgtcatctcagatccctagctggaaggtttgtgtctctccccctcctcctctccccgtcattgcctctgtgctcacccctcttctgttccaaccccctcaccccgactatcccctcatccccttcctttcacactctgccttcttccccataatgcctctccctcaggaaactcccattgggggagaagcagaaagcagccggcagctctaagacagcaatttccacaggtagctggggctgagggtcttccttcaggggacttyggtcaatccctgatggacggcagtgcagtgtgcaccgcaggcagcggcaattccaagtccaaaggcccagttttgcatcaagttgaaatctatgggttggtccctcccgggggccacctgagggtgtcagcatgatcagagcttctagggggtttaggggggactttccttctggccatgtttcccattttccctaatgagctccctgctgggctgtggtaacagaaccataacccaaagcaggtttggggtgatcatgttgaacttaacagtacacgcagactttagttttagtcttgagtgttcaaacatgtttgctttaatataaagacgaactttgaaaatgatcccctagcaagtccgatcaatgctcctccaggaggataatctgctctcttttgagaggaggaccctaatttgaaaagtaggccccttggctgccagcgttttaagcaggttttgactttagccctcacaggcggtgtgggcctctcaaggcttctcggaatctttctactgcccctgggcgccttcctttccttctgagggcttgagagggcagggagcctgccatgccctttgaggctggtttcctgggaatggagggagaagggctgatgttgctttagtgctygctggtggccattcccctaacgggaagccatctgggttgttaaggagcgctggtcccttcagacaggagaagcacgatgtactgcccactggtgggtccccttagcttacaccggtcacctgttaggtggctgccgggtctcctgctgccacctggtgggtgagggtttttaatctttgggcagagacgaggaaaagggaggtacacagggggctcccaaagggtttccattccttgccctttakagcctggagagggcatgcagagggcctgtggcttgtcccagccggaggttccccttaaggggaccagctgccttctctggggagctgtctatggggtccccgcagccctccagtggaggcagaggccctggctcctgaccgcacttgttttgcataggactgggctaagcctgggccctaygaccagcctctggtgaacaccctgcagcgccgcaaagagaagcgagaaccggaccccaacgggggaggacccactaccgccagcggcccacctgcagcagctgaggaggctcagagaccacggagcatgactgtatcggctgccaccagggtgatgctcttgttctcagtagctggttggggccacctcagcctggctggggatcacattctggccagcaactggggggccaaggcagccttgcagctggagggacctgggctccattccctgacttcctgctctacagcaaagtccctgggaaaaaaaccttgtgtgggaatgagagaggcagaactttctagggtcagagtgggacccaagcaagtcaatagccccctggccccacagacatgtagtgctcacgggggcagaacaggagtgctgttgagscccccccyyaaagcarcctgtgtatttcyctcctccaacctgcagcctggtgaggagatggaggcttgtgaggagctggccctggccctgtctcggggcctgcagctggacacccagaggagcagccgggactcgcttcagtgctccagcggctacagcacccagacaaccaccccctgctgctctgaggacaccatcccttcccaaggtacgaggcagcctggggtgtgcacttaggctttctgagcagcaccaggtgaggagatagaaaactgctggtccattttaaccacaacccaccactcgctaactaacaggtgtcaggattgttttcgtcatctgggaatgctttggggagctcatctgtagttgtcaggtagctgccatataagaaagggatctggggtcgggcgcagtggctcacgcctgtaatcccagcactttgggaggccaaggcaggtggatcacgaggtcaggagatcgagactatcctggctaacatggtgaaaccccatctctactaaaaatacaaaaaaattagccgggcgtggtggcaggcgcctgtagtcccagctactcaggaggctgaggcaggagaatggcgtgaacccaggaggcagagcttgcagtgagctgagatcgcgccactgcactccagcccgggtgacagagcaagactctgtctcaaaaaaaaataataataaataaagggatctggactttcacagctttttgcgttttgcagcatcatatacagcagtctccaatttgaatggagacatgtgctgtaataagaatagcttcaggccagggcagtggcttacgcctgtaatctcaacattttgggactttgaggtgagcagattgcttgagctgcagaagttcgagaccagtctgggaaacatggcaaaactcttgtctctacagaaaatacaaaaattagccaggtgtagcagcacacacctgtggtcccagctactctggaggctgaggtgggaggactgcttgagcctgggaagtcgaggctgcagtgatccatgactgcatcactgcactccagcctgggcaacaaaatgagaccctgtctcaaaggaatagcttcatttttgttttagcactttgcactacacactttatggttattttctcatttaatctttacagccacttatggggtaggtattttcacccctattttacagaagtggaaattaaggctcaataactcgctcatattcacacaaccaataagtagaactggagtttgaacctaagtgtgttagagtgtaatgcccaagttcttaacctattccagccaaatcctctatcaaacctgcctccttcatcctcaagtccactgcacacacaagtcaggcaagatgaaaatctaacagctagaatatatctatgataattgaccaaaagctatgccattcatcattcaaaacctctaagacagtgagtcttattggagggtgattttattccccaggggacatctggcaatgtctgtagacatttctggttgtcacaactggaggggtactattggcatctagtgggcacagggcagggatattgcttaaacatcccagaatacacagcacggcccctccccaccacgtcctccataacaaagaactatccagcccaaattatcaatagtacggtggttcagaatcagggctgtgagctgtttaatctgtaagctcccacatcatcctgagattggtcttacaaggaagtgagcacatgacactgatggaaactgtctttgtcccttattgtcagggactcactgtcagtagctttgttctttgtctagcccttgcctctccagttaattatcagggagatgttatagcctaggctagtctatttgaggtttgatcttcacgttgagttctggactggagaatttgtcttctttcatcccccttattcctcccagagacgcttgcaggtagcttcgctgcagcctagcagctttaccttcttccccattgacgatatttgagtgcctaccgtgtccagcactgttctaggtacttgggacacatcagtgaacaaagcaaagatccctgccacggagttcttagttggtgaggctttctgaagatggtagagaagcctsggggaagcttgggatgagactgtgtgtgtaccctgccttgcgtgccttttgtcctcccagcccagaagaatcaaaaaarcacagctgctgtcttgaatatgtctaatcaaatcctataatcagtttcagattatgattatttctctgtaagtggtgaccaggaggcagatcagcaggagttcgacaagtcctccaccattccaagaaacagcgacatcagccagtcctaccgacggatgttccaagccaagcgtccagcctcaactgctggcctccccaccaccctgggacctgctatggtcactccaggggttgcaactatccgacggaccccttccaccaagccttctgtccgccggggaaccattggagctggtcccatccccatcaagacacccgtgatccctgtcaagaccccaaccgtcccagacctcccaggggtgttgccagcccctccagatgggccagaagagcggggggagcacagccctgagtcgccatctgtgggtgagggcccccaaggtgtcaccagcatgccctcctcaatgtggagcggccaagcttccgttaaccctccacttccaggcccgaagcccagtatccctgaggagcacagacaggcaattccagaaagtgaagctgaagaccaggaacgggaacccccaagtgccactgtctccccaggccagattccagagagtgaccctgcagacctgagcccaagggatnctccacaaggagaagacatgctgaacgccatccgaaggggcgtgaaactgaagaagaccacgacaaacgatcgctcagcccctcgcttttcttaggttcacaagaaatgcgccggtggggaatgaactgtttcattaataaaacctaatttgtcttgatccattccactctataataaaacaaaagattttgtaggcaactcggaatatagctcttttgaaagtactcgacacctttagataagaattaaaaccaacctatgtaactgacataatcttgatcttttaatttgtaaatattgacaattttctttctgcacattttaatcttagtttcccttttgatttttctgaaggtgccaaattccatttaacttttttacaagtctttgtaaaattttaaatgcataaagggggttggggcaggggaaccacgaagtagttaattttagaaaaggatttactatacttcactcttctttttttttccccacaagcttttgtagatgcattgtagtagtctagcttagaagcaaatgcaagttattttaatgtacaaactaaatgggtaagaggtaaaatcttcatttaaatatactatgttctggatgaaaagagcaggagtaacaattgatgagcaatattcagagtgaagtaaatctggaaatggtagactgtgttgggatwggggggagggccatgggaggggtacatcgtcaacatagccgatcctgttacatttaagagtagcctcgtaggttgaatttcttctggtagcttcatggtaaatgcatccgaataagccatactggattgcagtgtttgtttctgtagggtgtttaaggacttgacttcctttctcccatgattcctctggactgcacacagcacccacaaccagccccatgcatgctgctgcctctgggcagtcgtagaatctcccacttcagtttctcgttgattgtactcacctttatggaatccaaatacatccaaaagggtaaggcagttttaaaaatgtgaaaacatttaaaaatgataatagcagggaattcttagattatagtaaatgccttttacttaactgtgcccagcaggctgggtgcgttaaaaagcccaagtattttgaaaaaactcgaacagatttgacaagggtagccagcttggagtctagcaacttgccaatgtgtttaccaatctgggggcttgtttttcttttcttctttcaaataaatggcagttaactggctttacagtaaacattgaagagaggaggatttgtttattgtcactgggaatctgaccactatactgtcctttttttgtattctgggtaaatgttttttggaaaagatttgtcttttctaagtggaagttaaatttgttatactgcccatcccctaaagccaacagagatttgtagatttaaagggatcacatttgaagacaatagtgtttaagaaagcaagcaagtcccttagcagtcaggtcataacagggcacatttctgaccgaaccctctcaaggcagagkaggagtttggtgggtttcatacacccygcagattcctgttggctctaaccctcaattacctaatcttatgctttaacacataactgcattggatgtgagagtaacgtaccgtatggtcattgttctatatattaacattgaacactgctgcgattgctcaaggacattttatgttacggctttaaagcaaaggcatgattattagaaactatttaagcttttttctttgaaaaacaagctccttttacagaatataaacaacagtagtgcctgtggtttagcccaccaatcttgatgactaaaagtagctgatgcattgtgcatatgatgcttgagatggtttttgcaaaagcagaaatcgctgcaaggtaatcacaatagataaaagtggtattttaaacctttgaaataaatggatgtaactgtaccttggtacagcttttcacttgtttagtttttaaacgttagtataatctgaataaataaaatgttgccaaattcaatgtagaaagaatgtgacaacacaccttgggtagttctgcttgtgtttttgcatattgtaaaagcagtgtcacagctaaaaagaaagaaatcgtttctaacagtaaattattgtgctttagttgctagtttgtactgagagttgacctctccctgtgcagttttttgttctaaacttgtataaataacaattgtgtaatgtgtctccctcctacattgtaacaattgcttcagcctacgttataaataaagaaccactagattaaaaaagtcctgtatttcaagtcttgttacaattcagtttgaggtcttagtcaaatgttagaagatggactgggactcaaattgagcttacgtagaaaagtgacaaaatatttttgtgatggctataagatcattagttgcctgaaactatttgaaaacagttctagctaatgagggatcaagaactaaaagcagctgttttgggttgaaagttttaaaaactgctttatctttaaaaaacaaaaacaaagcttctgaaacatttaaggagttctgttattcccttacctttgagtccgcagacaatccaagctacggtagcagaagcaaagctggaaaactgcttctaaaataagcgccacaaagttttatcccagattggaccatttaaccccaaccatcaaacctccacccctgacagaactccacaaattccatgcttatttgttgactatgtacttcttagggagagttgttcttctaataaaaactaagttccattagtgaaatctttagaaaaccaaaaaggttatttttaaatcctcagtatttctgttcttggctttgtttattccttctagttaccacagctaattaggcctttgacttgagagtttgttcgcctcaatctggttctgcctcagtttttccttactggtaacatatgctatcagtgatttattgcagagaacacagctgactgactacatgtcctgtcattttctttacatgcacgattgataaaacaatgacagtggcacagtcacttggcatcacagtaattcttagaagaacgtcagtcataccagagaccatttcactgattttttattagggcaagtgcatgttctgtaacatatttcacttgcaagcatgaaagatgaggtctctctctttctacatgggccgctcccggggtctggtcacaatataccaccacagtgggggcaaatcaccttcctttcgggcagggggcaaagcttcagttaaaggaccaccaggtggcgtttcctcctgcagctgcttaacctagaaggaggcaaggaaggaatcattaccaaaggaatctaattgactataaaaatctgtctgctgcagtgaagggtcagctttatgtctatggtgtgtcactgacattacacactatctgatcacaatattgaaaagtgttttttacatatacctgctttattttcatatccacacttttagaaaagtctccttaagggttttcccattcttttaaatagcaaagcctacccttcctattcttccccctaccccttttcatcacctcattatctggacctcctcttattctgcagacagaaaaatgacaactatcattccaattctccttgtcacagcccccacccactgaccagaaaaacatttattgttgtgtctcagctaagtgttctccaaaagcaccattaagaaacctcagttcataatatgctggggatgttaattctaagcccccttcctagcaaccaagaacaaaaataaatcacaaaatcacatgtaaaaatatgctcagttctgccaagtgctgccctactacctccagttctagttatggccaagataaatgtcctaacagaagatcacccattctggattgtggctgccctgggcctccagtcacacgtgctgcttaatagtgttgaagtgatgggatgtgtaaaggaggaattgtttgatgttatcccagtgatcaattgcagaatgcacctgcggctcaccatgcatatacttcaagcttctaaacggtgagacatttctgacaaaacactgccccctttggccacagtgcccttccttcgggtcccccttggccaaacacttccaaaggtcaatatcctcagtgttatcaccagaaccagcacaacttccaaatcatgaattcaaatatcccactatccaaccacactctccctttcccactcatttgtttaaatgcctccttgaaactcagactaccaattcacagatcctcccaacttggccttccctctctgcatctgcccccactggcttgactttgtttttttttaaattcagcttagattccatcatgacaacagcttcctttcgaataacctcaagtcccttgtcactctctgagcaacagacaaaccgaaccatataccctcaggcctgtgctcatacagcttagtattgctaaagagaaaaaagatatgggagcaaatcggagtcattacccactgattattcccaacctcaaatgggcctttgccacctggccatcctactactctccagcaagctcttcctcgcctcatgactatcacatcttgtccacattctccaaatatgctgcacccactcattctgggcttttcctcttatttcactaaaaaaaggaagctatcacacaagtctgtcatcttcaaaacttctaacccaaatgtatttatatacaatcttttgcccaattataatgcacaaagaatcctttttccttttcttttttctctatactctctcctaaggattccatacatctctccatggcttttaaaactgaaaactcccacgtttctgtttctaggccaaatctctcctgggagttccagatttccacatctgaagttggcttctgacatctgcacttgatgtctcacaggattctcaaaacttcacacttccaaaatgaattctcgattgctgctctgacacctgtgcccccttccccaatcttccctatctcagtaaacatcaccaaactccagatgttaaagcttaaaacccagaaaccattctctcttttttttttcttttgggatggagtcttgctctgtcgcccaggctggaatgcagtggcgcgatgtcagctcattgcaacctccacctcctgggattcaagcaattctcctgccttagcctcccaagtagctgggattacaggtgcacagcccccacgcccggctaattatttgtacttttagtagagatggggtttcaccatgttagtcaggctggtcgtcatgaactcctgacctcaagctatcacccactttggcctcccaaagtgctgggattataggtgtgagccaccgcaccctgccccagaaaccattcttgattcctccccatccctcacccaccctcaacatccagtcagtcgtcacatccctccaaatgatgtcctgagtcaatttccttccatatccacttcatccaccctagtgttagtcatgacaaccttttgactaaacttctgcaataatcctagaagggtctctctgcttctcctcttcccctctccaatatattcttcacactacagcaagattgagcttttaaaaatataactgaccatcctaacatgactgaaaaatgcctaagaaaatagtggagaggcaggttgagggaaagtatagcaagaaggcaaaaaagtcagacaaaggactaaagagaaggagatctgaagcaaaatcaaagacaaagccaaaacgaccagggaatgcactttaacttacttgtaaggtgattataaatgttaaattgatacacttagatactaaagtatatctgagaagcaagggcccagagtaactgtcatggctggaatctggacctctgcttgtggggagcaaaacttcactccatctacatagctaaggaataacgaagtacaagtagaacgcacctctcgttcccagctttccctccgcagtttcttccactgttctctcttggcaaagtaatcaggatacattgccttctcagaaggatgccagtcatctaagcaccattctgggacctgtcaggagaggaaatcatggtatcaatccacaggacacatttacctatccctgacagggcctgctcaggagatgtaagacaaagatcaagatatatttttataaccactgcaactaccagactgtttctaactctaagcaaggaacagcagaggataagtaggaagcaaagataaaggaaaacaccttagagtcaaagactgtgctgaaaaatagcaccatcatcagtccaaggagaactggcttcattcctcccctacctgccttctctaaatatccagagtagtcttatcttacttggaactcttaattagagtatctcagaaatattaagcaccaatccaagttggttaactttaaagtccaaaatgaactttgttatagcaaaaagtatactgtacgaccttaaatctgaatgtagaaagaaaagtcttaatgacgtctcagagagagaaaactgacacctaagaaacagtacaggcacaccttagagatactgggggtttggttccagaccgctgcaatatagcaaatatcacaataaagcaagtcacaaaatgtttttggtttcccagtgcatataaaagttttgtttatactatactataaagtgtccaacagcattatgatgtctgttgagatggagtcctcctggtgaagattttgtgaatattgattaactgataacaaaggactttgaacagtacatcaacttagttgataaagcagtggcagggtttgagaggattgattcccattttgaaagaagttcttctgtgggtaaaatgctatcaaaaggaaaagtcaattgatgtggcaaacctcacataatatacataaaaaatgtacataatttaggccaggtgcagtggctcacgcctgtaatcccagcactttgggaagctgaggcaggcggatcacctgaggtcaggagttcgagaccagcctgaccaacatggagaaacgctgtctctactaaaaatacaaaactagccaggcatagtggtacatgcctgtaatcccagctacttgggagactgaggtaggagaatcgcttgaacctgggaggtggaggttgcggtgagccgagattgtgccattgcactccagcctgggcaaaactctgtccccctccaccaaaaaaaagacataatttaaaaatacattattggttgggtgaggtggctcctgcctttagtcccagccctttgaaggctgaggcagggagattctatgagggtaggagttccagaccagcctggacaacatagcaagattccatctctacaaaaaataaaataaattagctaggtgtggtgttgtgcctctgttttcttagctacttggttggctaggacaggaggattgcttgagcccaggggatccaggctgcagtgagctatgatcatgctattgcactccagcctgggcaacagagggagaccatctcccaaacaaaaacaaaagaaatacgttattgataaaaactgccaacaatcatctgagccatcagaaaaccaatctttttactggtggagagtattatatcaatgttgatggctggtgactaatcagggtgatgattgccaaaggctggagtggctttggcaatttcctaaaataacgaggtttgcgacatcaactgactcttccttacaccaaacacttctatagcatgtgatgccatttgatagcattttacccacagaagaacttcttgcaaaattggagtcaatcctctcaaaccctgctactgcttaatcaactaagttgatgtgctatgcgaagtcctttgttatcatcaatgttcacaaaaacttcaccaggagactccatctcaagaaaccactttcgtattcatccataagaagcaactcttcatctgctcaagatttatcatgagattacagcaattcagtcatattctcaggatcagcttctattctggctctcttgctatttccacaacttctgcagttacttcttctgctgaagtcttgagcccttcaaaatcacccacaagggttggaatcaacttcttccaaccccgttaaagctgatattttgatctcttcccatgaatcataaatatcctcaatggcatttagaatggtgaattctttccagaaaattttactttgcccaaatccatcagaggaatcactatctatggcaactataactatgcaaaatatatttcttaaataataaaa

SEQ ID NO: 97119 - DNA, 12767 bp, Homo sapiens
attattggacatttgggttggttccaagtctttgctattgtgaatagtgccgcaataaacatacatgtgcatgtgtctttatagcagcatgacttataatcctttgggtattgtcaggcctctgagcccaagctaagccatcatatcccctgtgacctgcacgtacacatccagctggccggttcctgccttaactgatgacattccaccacaaaagatgtgaaaatggcctgttcctgccttaactgatgacattgtcttgtgaaattccttctcctggctcattctggctcaaaatctcccccactgagtaccttgtgacccccactcctgcccgccagagaacaatccccctttttcctttacctacccaaatcctataaaacggcccccacccctatctcccttcgctgactctcttttcggactcagcccgcctgcacccaggtgaaataaacagccttgttgctcacacaaagcctgtttggtggtctcctcaaatggacgcgcatgaaatttggtgccgtgactcggatcgggggacctccctgggagatcaatcccgtcctcctgctctttgctccatgagaaagatccacctatgacctcaggttggcaccaaatttcatgcgcgtccatgtgaagagaccaccaaacaggctttgtgtgagcaataaagcttttaatcatctgggtgcaggcgggctgagtccgaaaagagagtcagcgaagggagacaggggtggggccgttttataggatttgggtaggtaaaggaaaaaggtgggttgttctctggcaggcaggagtgggggtcacaaggtactcagtgggggagcttttgagccaggatgagccaggagaaggaatttcacaagacgatgtcatcagttaaggcaggaacaggccattttcacttcttttgtggtggaatgtcatcagttaaggcaggaaccggccatctggatgtgtacgtgcaggtcactggggatatgatggcctagcttggggtcagaggcctgacaggtatatacccagtaatgggatggctgggtcaaatggtatttctagttctagatccctgaggaatcgccacactgacttccacaatggttgaactagtttacagtcccaccaacagtgtaaaagtgttatgtttgtttttcgatgggagcctccaatcacccctgcttctagtaggccatcttggtcgcacctctggactttgttttcctcacatagtagacgtttcgtgttagtctgggagctttgttgccaactatgcatttctagataaatattgtggcagagagtcttgtggtcaacccaatctttacctactgcttctttcaatgcagtgttttttataacacggcaacattgcttttgttctggaaatcgtgattatactctatgtaacttatctgtgaaactgccttgcaaatctcagcacctgttttcactattgggctatttactgtcagctgttgacttttatgaacagtggttctcaaagtgtggtcccaatatcagcagcattcaagatcacctgagaactatctgttgtgatcagatggtacttaacagcctgggcttcagaggcagacagacctgggtgtgaatctccatacgaccaattgtgagttgtgtgatagtggactagatatatactttgctgagccttggtttctttatctgtaaaatgctgtaataataccttgcttacccagggagtctctgcgtctttctctcttgccctcaagcctttctggatttaaggtatggcttttaccactatttcctagggcctcactttttactaagttaggctgtatactaagttatgccaaaaaaagaagtgttttttttcccataaatttttccctcaaagagttgtgggaggaagggaatctgatgtgtataatatagttgaaaaacacatctacggtagatcacaaaccatgtctacatggccattttgtgggtaacaagaacagattctatcacctgattattaatgcacaagccattagctatgcaaatatctactttcttgtcactatatggaatctgatacctgtaaagagattttccatggaaaaaaatatgtgcttgattttattgctgcgtatcccaaaactgaaaagtttttgctacaaaattgtgtatgcttcagaatataagaatgctatcgctgattggctgtggataaagctctgtgcaaataaggaattatgcaagaagtagttactggccatctatgagattcaagatattattgcttgtattccctttgaaattgaaaattcaaaataaagacaagacagataaaattgtatttttttatattttttaagttatggggatgagctatgtttgaaaggtgaaagaaacctctagattttatatatatatatatgtaaaatctctagattatatatatatatgtgtgtgtatgtgccactgcactccagcctgggcaacagagtgaaactctgtctcaaaaaaaaaaatagataaaatacgttttttataaaatatttatttattttgagacggagtctcactctgtcacccagctgctagagtgcagtggctctatctcagctcactgcaacctctgccacctgggttcaagcgattctcctgcctcagcctcccgagtagctgggattacaggcatctgccaccgcgcctggctaatttttgtagttttagtagagacggggtttcaccatcgtggccaggctggtcttgaactcctgacctcgtgatccacccacctcagcctcccaaagtgctgggattacaggcatgagccatcacgcctggccataaaatagttttaatgcatagctgaacttgaggcaaaataaggaaatccgtaagtgtccagaaataacaagaaagtacacacctacacacaaaaagagtgagaaaagttgaacaagcacacaaatatgacaagtatttattgagagccaaatgtatgtcaggcacatattgctttgtgcctggggaacaggggcaataaagtagaaaataaaacaggcatggaattggcctcacagatcttaaagtccagtgaggcaaacgagtttcataagaaacacatgtatatttaagtattttcaaaagtactgtgaagacaaagaacacggcaatttgagagagaaaataacaagtgacgcctgctttaaaattatctgccggaaaaggactccagagatagtgccactggagctcaggaagagttaatatgttcaagaaaatgcaggagggcatttctttcaggtagatgcctaggctctgcctactttgcatgcttctatctgactatgtaaggcaaaaatttatagaagtataatcatgcctttgctgcaaaatgagaaatagacatttaagaagaaatttccatctcatcgaatgagcattttggtgctatagtaattgtttcaatttaaaacattcatttgtacatattttctttcttttttttttttttttttttgagataggttctcactctgttgcccaggttggagtacagttcacaatcagctcactgtaaccttaaactcctgggttcaaaggattctcttgcctcaacctcctgagttgctgggaatacaggcacacactgccaaagctggctaattttcaaatttttgtacagatgggatctcactatgttgcttaggctggtcttgaacttgtggcctcaaacaatcctcctgcctcagtctcccaaagtgctaggattacaagtgtgagccaccacacctggtttatacatattttcaatagttttaataaaatatgtttatatttaataagatatatttatacaaattttcagtagttttataacaacaaagtaccttagaggcagaggatagactttttttaaatttctgagacatggtctcactcttatcactaaggctggagggcactgcatgatcattgttcactgcagcctcaacctcctgggctcacgtgatccacccacctcagcctcccaagtagctgggaccacaaatatgtgacaccatgcccagctattgtttttaatttttttttttttaagacatggtggtctcactacattgtacaggctgatctcaaactcctggtttcaagcaatcttctggtctcagcctcccaaagtgctgggactacaggcatgagccaccacacctggctagagaacagacttttaacaacaaaaaagtactttttattctaaggttgaatttaggaggctgtataaagtaaaggtgggtagatgagactgattgcttacagaaagctagctttgtgtgctggacttgatactattacaggtttcttgaaagatctgggaaaaatgtttaaaattgcaactggaagacatttgctagactagaaatggagactcctaagcactcaggaattcagcaaatggctgctggttgggtttttatttttattttttggatttaagatactatcgaactctagtttagttctttctgaattgaagacaactaattgatgggtatgtttcatattagtaaaagcaaaaagcttattaatttatattttacattaacaaaacccatagagggaaattctactttgcctttgtaacccatatgtcagcttgggcatccctgccctgtaataaaaatgtaattaatgacattctccaagaatcgttgagaattctcagatggctcatttttcatggtcatttctgctgttgcctgggatgaattaggtatgtttatgaatcatctttcatttctcatgggctccataccaagttgatccagaccaggccaaggccctttcttcagttgtcataaatttagaatcaaacaacaaaaagagagaacacttgcctcggactgcctaccactcacaggacttgcctttacctcccacacatgaatgcccaatctttcaataggtcatcctctaccctgttaattgaggttttctgtgtttatttttctcatcattttaagtcttccatttattgtaatctaggagaaaatgaggtcactgagtttgttaattcattatgctgagtttagtacacaaattctaagcaatatttcacagacatggctttttcttggtgcaataaatatgggcttttgtaaactgttttttgctttttggtcccacagctatgttttggatggttaaagatgctaaaagtctaaaccctcaattgcaggttacttgtaggtttagttgttatacctgtactgggaggtagcataaggcagtaaaaagaacactgatgctctagatactctctcctcaatcagagagatagagcttggtagagagaccatggcctagttacctaacccatatgagtcttgtttttattattcataaactgtatctgataataatagctatttcatatggatttgcaaagatcaaatgtgatcctaagtataaaataatgttttatattgtgcaatataatttttttttttttttgagatgaagtctagctctgtcacccaggctggagtgcagtggcacaatctctgctcactgcaacctccaccacccgggttcaagtgattctcctgcctcagcctcccaagtagctgggattacaggcacccgccaccatgcctagctaatttttgtatttctgatagagatggggtttcaccatgttggccaggcttgtctcaaactcctgacctcaggcgatctgcctgcctcggcctcccaaagtattgggattacaggcatgagccactactcccggctaaatgttagttttttatcagtaacctctcatttcttttacccaggtatgttattttgttcgttatccctaggcaagaccctctagattgcctgtaacagtttcacactcttatcaaggatgtatatattcctgcattctcttttctatagttagtcatcatttcattagaaagatatttaagaattcacatttatattacaacatttaatttgaaaaraactttttgcgggaaaggaaagtataatcagaaattcatctatcatcttaaagtcctaggtttcaccagtctgtgccatatgtgttcacattaactctccattctgcatgagttgtactaatgtgggtgctgaaggagataaaccccccaaatcagtagcttaatacaaatgaaatttgattctcaaacacagtaggtgtaattggtagaaggcattgcactccacagtcattcaaggatccatgctaagggaaggttgccatcttctacacatggcttctaaaccatccaaggtctctctggatgacaataaaaaactgtcagtggggtaaaagaggcactggacatcatgtggaaggtttttgtggcccaggcccagaagtgcctatcacatctgtccatattccattctcagaactgtcactgggcatctaaccacaaggatggctggaaaatkcatagctgtgtgtccaggagaaaaggaaaataggattgttgaacaactaatgaggttctgccatggccttctttttaggtcgccaaatatctgctttcctctctttcccacacatagaagacactcattcctaccccagggtctcataccattattgcatccagtccaaagtccaagggggaatagactatcctctctatcagatccagatatttcagcttctggtttggtattcttggataaaaaggtgaattttctgcctcccaatgttgaggtagaaaatgtctctgttctatctcttgtcattgtagaacagcgaagttgaagaaaaaataaaatcaaacaaacaaagacaccttctattcaaaaaagagaagacaggcaggcaagcagcagtccctagaatataaccataaggaaatcctgattagcgagtattgagaagcttcctacactgggagtggggaaattccttaaatagcctctaaatctaatctctgggaggaaacttcttttccattattatttgtggtggctccatcctctggaaagttcttccttatttcttattccctggctgtcacctctgaagtggctgttaagaagtgtgctcttcttgcgatctttggcttcataactcattctgcaagagtaaagacggaaactaatgggtgttttaggtttaaggtctgtcatttgcggactctggggctgtgggagaaaaaataaatcgtttggttcatgcacacaatgtgacagcttggcataagtaaaagacatgaacaaaaggattaatgaagaagtgaaagaaagaaggtgtatacattaggcacaacatcacctaaaaaaaaaaaaaactggaatgcattaaacttgttcattcaataagtgttggctgagtgcctactaagtgtcaagcactgaaccagatgtggaggattcagtggcaacacacggaaaagttaaaggaaaaaaaaattgggtaataaatttgttattggttttagcaaatccaaaaaattcaagaaaatagtgcagtgtttgccaaatctaaaactctttcaccctcactgagtcttaaattaggaatgcacaaaagcagaattactagaaaatcaaagttttatgggtgtattcccttaagtaatagccctatattggaaagttggtggaggtgactgcacattttaaataaccaacctgcacctttaccccctcccccatatcctaaccaaataaagtataaaatgaggtagaactcaccatgttacatcagcttgccaggaatgaagtcaatgctgattggaaaagtgtcaagcaataaagaagagtttggatttatctttaacactgtcttcatgtcactcgagactttaatttcagccaactctacttctaaaaccaacctcttatgcaatgatcctgtctgggtcagagtttcttctggtaggcatcagattctgcaaatatttattatctcatgttaatcaagtccccctctagattctgccatttaactttaacgagtttgacacaaacagagtgatttaatgcagttgtaacttattcctaagtagggcctggtatagcttttaagcaatacatctctccagtcacacataataatgaatgaattctaactcactgcaagtactacagtgttcctgaaggtaataaaccatgtcagctatgtgaggcttggaaatttttttttaaaacatagtaaccaaaaatgttaccagttggcctttgattacaactacatcccccaggaaatgtgatcaaaaggacatctgttctatgtatcaaaattcagacatctgcttccttcttttccttttatggtatgcatagatatcacatctgacttccagtttccctgctgtcaaagagaaactattaaatgggagatgctctagacaaagggattttaaaaaatccattggccacagagaactagaagtgaagaatcgaaaaagaagattaattttctttcttattactaagtttcttaagtattttcagagcacttaaagggacataccagtggggggaaagtatatgaattaatggcaggattcttgaggactttctcacaaagataattaaggtgtcactccaagacaacagccagagacaccacaaataatgtatagatatttttattgtagtattacttatagtaaacttggatccaatttaaatgttccacaatagaggaatgactaaataaacaatatatacaagtgttagacaagtatccaggcattaagaatcatgttttataaaatagtaaatgacacaaaaagccttgtaatatattggtgcaaaaacagatgcaaaactatattcagtataatctcaactattagccctaaatgttgttgtgatcttggattacaatttttttgcattttcaaattttcaaattagaattatgattatgctacttctatggtgaggaaaaattaccctttataatagtgaaaaaataagaacagtaatcttctatcttccacattttccaaatacgatgaacacattacacttttacagtggaagaaaagaaacacctatcttgtaaagtagtaaataaatcagaataaggcagaaatcaatcatgaatttacaaaattatgtcatcaagtataagttcagttcatttttagttttgaaactgtttatcaaaattaaatagtttgacttatttttattagaaatatgattctaagtattcaacattgcttttttaaaaattatcatctagtttttcataaaatctgaggagctgctaggtaaatttcgcacaccaaatttcgtgtgttgaaatgtgaacatgctcaccacagaccaagggtttccgagctgctgtttcatctcttacttatggaaaatatgctcatgtaattatgaaccaatcagcttttcattgtgtcaaaagcaaatgtagatagtgcaattgatattttagctttattattgtcttaaatatgtcttggcttaaaaagacatggatggcttttccccactataccagataatgagttgcaaataaatcattcagtagtaaagttcaaagaaatgttgaaagcatttcgagtttcctagtgtcttaccgatatgtttctttttacaacaaccatgtcccacgtctatctgtttaggatcttaagttgctaataatctactctcaataattccttaagaaaacattgaaaggacagtatctataccaagggaataaaaccctaagtagtagaaattattaaaagtgatgtagctacttaggaatgagtgtgagctcagacactgaaaaatgtatcattgagataataccaaaaatggtcaaccttttcctgttaagttatagtaaagtatatagtttgagtacttagtatataagagaagagttagaatgagattgtaccaggttgagaattcctcatccgagaagaccagacaaaattcaaggtttttagagagggactatcttgaatgatatcaccagtaagtgggtttataaacaaagacagagctaggcaggttgcactggatccttcaaaccagtttctctggaaaaatctgaattactcagtaaaccctcagttgcccctgaggtaaatcaactttgaaatacagtagagaactctgggtgataaatcacgcagggttacacactgggtccacagttcacagaacatgattagatttaagacaatagaagacagggacattttatgaactagtttattgaatccttttgagactatcactggcagttcccagaaggcttagataaattaatctttaagaggtaaacaaattaacttcgaactaagaaaacaaaaacaaaacaaaaaactttgaattagaaaacatcttcaaagaaaagcccaccaatgaaagaagcacacagtagaagcattactgttttgtttgtttgtttgtttgtttgtttgtttgttttgagatggagtctcgctctgtcgcccaggctggagtgcagtggcgcgatctcggctcactgcaagctccgcctcccgggttcacgccattctcctgccttagcttcccgagtagctgggactacaggcgcccgccaccacgcccggctaattttttgtatttttagtagaggcggggtttcactgtgttagccaggatggtctcgatctcctgacctcatgatctgcctgcctctgcctcccaaagtgctgggattacaggcgtgagccaccgcgcccggccgcattactgctaagtttcttgttaattttcagactcttttgtagggaaaaaaaagtgtgttcatgcttcgctgtataaaagctgcttgttctcaacttccaaaaatgaatttctgattgacattaatgattctgttaaatctctacataaggcaaaggcaattggaaacatttgcattaaaacttccaaaattggaaatatttgcatttaaacttccaaagccagttgtgttccattactgttttacgccccgcccctccaaaggactaagaaactatcccacaaaaagcaagaggcctctagtgtaagcagttttcagttttcctgttactcaagtcagatcagctgaaggatgttcaacctctcccctgcaggccatttactttaaggaaggaaggaagggaggaagggaagaaggaagggagggaaggagggaaggaaggaaggaaaaaaatctcttccaatcacattaagtctttttcttaaaagcttcaaattggccgggcttggtggctcatgcctgtaatcccagcactttgggaggtcgaggcagacagatcacaaggtgaggagatcgagaccattctggccaacataatgaaaccccgtctctactaaaaatacaaaaattagctgggtgtagtggcacgtgcctgtagtcccagctacttgggaggctgacgcaggagaatcacttgaacctgggaggtggaggttggagtgagccgagatcacaccactgcactccagcctggtgacagagcttcagtcttaaaaaaagcttcaaattgcccatactaatttcattaaaaaaagttaccaagccatgaggttcaacatgattttggcatacattttgttcttagaagtatctggatcacaggataaaatcagaaacgttggcatgacccaacacacacacagacacacacacacacacacatacacacacacacaacacagctttctgatcagcagtttttggaaatggagtattgctgtggaagtagaaagggaattttcctattattagggaactacaaagcggtgggcactatgacaaacatctgactttcattacacgaatcctcagaaatctctgcagtatgcctattcctacatcacagatgagatacagttgtcatctctccaaggttatgtaatttgtgccaagtgatacagcaaaattggaatgcaggtctctaatctctaagtccatactttccctattgtactgcattgcctcccctaggaaatttcttcctcgatgacaatatcatgaggaaagtgaaactattgcttgccatttctgagttaatatcagtgttttttccatcctctagcatggataatgcagagatgccaccagttctgttggagagtagaaataatcttaagtttggtctccatcttcctagccaccctagctcttttcctgcccagatgcaagaaacaattctcaaaggactgtgaaattgatctttggtgtggggaaaagaaaacataacaagatgatgaatcaagcactgtgttgcctttagcatttattgtagaatattatgtaaagtgaactaaaattttgttaaatacaaaattgtctttaagaatagcataatatatgcttaaatctctgaggtcacagaatacgattttaagtgcaaaattgtctttaagaacagcaaaatatatgcttaattctctgaggtcacagaatacgattttaaatgcaaaattgtctttaagaacagcataatatatgcttaattctctgaggtcacagaatacgatagtcaggtggttggcattttagataaatatgcaaaaacacaatgacccagagaggtaagtaacttcccccagtcacatagcaaatcaatggcagaatcagaattcaaatataatatttcatgactcctaagggcctgagctctttccaatacaccaatggttctcaacttcagggtatatcagaattactagagaccatgttcaaagaaaagatagatgcccaagcttggactaataactgttgaatgagaatcttcagggtcaggacatag

SEQ ID NO: 97120 - DNA, 36341 bp, Homo sapiens
accccatctcaaaaaaaaaaaaaaaaaaggggggccgggtgcagtggctcacgcctgtaatcccagcactttgggaagctgaggcaggcagatcacctgaggtcgggagttcaagaccaacctgaccaacatggagaaaccctgtctctactaaaaatacaaaattagccgggcgtggtggcgcatgcctgtaatcccagctactcgggaggctgaggctggagaatggcttgaaccaagtaggcggaggttgtggttagccaagatcacatcattgcactccagcctgggcaacaagagtgaaactccatccaaaaaaaaaaaagggaaataggacagaaaaggtacattagagggccagcccaggggagccaatatccaacaataggaattccaaaaagaaaaagtgaagaaatcaacaaattgaaaaagaggctgggcgtggtggctcatgcccagcactttgggagggcgaggcgggtagatgacgaggtcaggtgatcaagacgatcctggccaacatggtgaaacccccgtctctactaaaaatacaaaaaattagccaggcgtggtggtgcacatctgtagtcccagctacttgggaggctgaggcaggagaatggcttgaacccagggggcggaagttgcagtgagctgagatcatgccactgcactccagcctggtaacagagtgagactctgtctcaaaaaaaaaaaaaaaaaaaaaagaaagaaatattccagcctggccaacttggcaaaactccatctctactaaaaatacaaaaattagccaggcgtgttggcacgcacctgtaatcccagctacttgggaggctgaggcaggagaatcagttgaacccaggaggcggaggctgcagtgagccaagatcgcgccactgcactccagcctcggcaacagagcaagactccatctcaaaaagaaaaaaaaaaaagaaatatgccaaaactgaagaccatgaattttcagattgaaagagcctgccagtatccaacctaatggatggaaatagactctcaccaaagtgaaatctcagaacactgggagcaaagagaagattctacaagcttccacagagaattagtaggtcgcattacaagggttaggagtctgagtgccttcagacttcatgaacaacaaccatggaagctagaaaataagaaagcgagagagcgatgcctttgaaggagaatccttcccaatctagaatttcccatctagaatttgatacccagtgaaactgtcaagtatgaagctagaatggagacattgtcagaccctgccatcccaaacatgcacctccttcacactctttctcaagaagttaccaggaggtgggcccccctaaaacctgacaggcacttcaccacaagggtggtgaagggagagcccaggctccagccattccctagacctacagggcaaccagtctatcctggggcccagtgactcagagacaggaacagcgaagacttgccaccaagatccctctgccactggaacctgagcacagtgctgagacagcctggtcaggactctgcacagacttggcttgtcttacattgatgaagttcctgccctctcctccatgtcctgctgcctggatcagcccagcaggaccctcgtgacacccttagaaagtgccttctgctttgacctactcctgagggttggagggaccaactctgagcctaaaagcagaaactcagagcagcccactcactgtgaccatgcttttgcaaatgtccggcaccttgtccgcccagataccccaaaggaaccctaatgacctggccagctgacttccctgaacagggtcctgtgggtgtggcacctttcccatgcagtttttttttttttttttttttaagacaaggtctcactgtgtcacccaggctgtagattgtcgtgcctcagcctccccagtagctgggattacaggcatgagccaccatgcatggctgatttttgtatttttagtagagatggggttccaccatgttggccaggctggtctcgaactgctgacctcaggttatccgcccacctcagcctcccgaagtgttaggattacaggcgtgagccaccgcacccagcccccatgcacattctgaagagtctcagtggccctgggaacacccccttggcctcacctgggctccagccgctccttcaccttggcaatggagcggacgtagggcgtgatctgcttggtgatggtggtcaggtaggcattctcctgcctcagctggagaaggtcatggagctgggctgtggggccaaggccagagcatggggtcttaatcctgaagcatctggcttcagatttttactcaagccaggcaccacgtaaatatcccgaccatttccatgatgacctctaattaaagagggaggcacttggtgggggcattctactcaatgaatcctgacctcacatgcatcatttgaggccagttagcagctgggaggcacggtcaagcgctaaggggaagagtgtggggatttgcatctggttagtggccgactctgacttcctcctctgctagtatgtgggttagctcagggacagagggttcactcggcagccaactgtctggaaccttcataaatctcctgctcattagccactcgctgataggcttcctcccaaatctgaaagagaaaagctggacattggatgtggcagtgagctgaatttacggtggcggcattgctatctctagctactcagatctacaaagcaccccccagccaggtccacgtggttccaagcagcaaagactcccagtttccagaccctgccacatgagggtcccgtggggtacaggccaggtcctctttccccgcttactgtcttagggtagcccaggtatcccctgacaggtggggctggagttagagtccttgggagggctacctcctggaagacgaccctcatgccctctaaggaggcgtgctccgaggcgatctgcacgtccagttgcagggacttgtgcaggacgtctcccatgatctccgccttgatgagcgagtggtgcttggtgaggtctcggtgcagctcctgtacctggtcctttaggctctgcatctctgcctgcaggtgctgcacagagaggctgtgtgagagcgtgggtcaccctaggctgtttttactgccatggacttggtggaggaatggctcccagcttcagcagctgggagaactcgatttccctgagcgtaccttggtgaggagtgggttaggacatctcccccctccggcagatccctgccccctcacccggtaggagtcctcatagtggcggcagtgctctgcgaagggcgtgttctcgccctccgccagcagcaccttggtgctgatggaccggtgcagcgtgggcttttggacgggtgaccccgacatctttcctactggggaggggcagtggggccccgtcagcgccttggggcctaagccccctgccagcctggggagagagccagtgtggatgcaggggggtggggaagtctgcccctcccccagcctcccagggcagccccctggactgctccgggatctcacagccctctccaccacctggagcacagcagagccaccaggagatttgaaaaggctgaggcaaggcctcacccggacatccacatctattttttaaagtccctggagtgggttccaggatgtggggccaagagcaagtccgtcggaatgctgccggggccaggaccgagtgagtggtgtgttcacttctatgctggacagaggaagtgtgggcccagtctctcttggtcttggggcccctggacacacacatgccatttcagcatctcttctaactcctctccagatgagtccaggaatcaggccccctatgacctcaggccacctaggtggcggtcagcccagccccaggcgccccaccccaggggaggctgcagtggtagttgggggcctgagtcctcccctcctcctttagccaagctccgagcccggtctgccatggacttcaggtccagggcttcctgttcccctacttagtggactcgccctggccatcccctgtgcccagacaccctgctgggagggtggcgagctaaggacggaggaaggaatggtggcacctggcttcttgctggcgatctggcccctcagcgcccaccctcccccacaccccagtgttggggaccttgtgcctggcctccccggttgctgctcacgtgttagcaccacttgcagcagctgccacccgacgtggccccagcagcagcagtggctccagacagcgcgcgaattcagctcggtggtcactggcaatctgggcagcgggatggggtcatgaggtggcctccactgccctgcagggcccccgaccctggcccacccaggccactgcacaccttgctgctctgaataggccttaggtggtgcggccgcgtgacgatgccctgcagcctctccatcagctcctgtggcagtgaggagggcctcaggccggtggaggtgtggcagccagggggcaggaagaggggagatggaggcggagcacgtctgtctttggcacttgacttggtgtcccttagcagcgccagccctcttctgggactcacccggacaaacccccatcccatccccaaatccacaggagagggggcggctggactccagtggtcactccgccccacgggggactgtaggctcatgcccccttcctggcttcactgtccttgtaacagtgaccctaacaggtttgcagatgatggagttgggagggggtcagccccgagatccctggtccaggctccaggtgacaggctgcccacccctgagttggtggctttggtctgcagggtgggctcctggtggggagggggcatctgcaggagcagaggagactcacatagcccaggtccaggaactcagccttgttggccaagctgaggaaggaggagcagatgaccaggtggacctgggggaggggatgctgctcagtgcctggccggggaggaggagggacccacccgcaccccgagctccctgtacctgcagggtgggcagcaaggtggccaagtgagagagctgctccttgaaggccttgtccttctcttcgtattggctgggggaggggggctgcctggtttccagggggccaggagcagggccgggcagttccatcccccacccgcctccagcttcgcatgtccgtccctgaaccccttctctgcaccctgagccatgctgccctccttagctgggaggacattcggatgtcttgctcctcagggtggggcagggcctgcccaggctctgagctgaggccatggaggccaaggggtaagggaagcaagccccgctccccccaactcacctctgcacagcctgcagcagcagcgctttcctctctgccagcctgtcctgggagagatggcgagcatgctcttgatttgcgccccagccctgccacctcccaccatgcctaccccccggaccccagccacctgctggttacactaggtatctctccaacctaccagccctgcatctgctgcctggtgagggcttgggtcccgtcaccttaaatgtcacctccccagggaagtctttcctgaccacctcacacccccaccaccagcctgcggcaggccctggtttcccctcccagctctcctagcaactccaggaaagtgcttggtgcaaggcctgctgccccactacactggaaatccacaagggcaagggaccagccctgtgtcaccaggtcccggctgggtcgtttatcccccaacccccacccctcacctgcatgctgccgaagagggcgtggatagcgtcctcctcctcggcggcgctgtgccgcacctcctccaccatggcctgcagcagcgcgatggcctcccgcgtggccgtctgcagggccttcacggcctggggacagggcgtggtcaggctcgcgatcgccgccgcgcggccccgcgcgccaggcccctgcgctcaccagcaccgcctgctccagccgctcgcagccctgcacgtaagccgattccaggtccacgcagtgygcccggctctccctgcagaaggcggcgggtgaggcccgctccagcggcccccagccccctcccctcgcgtcccctgtacgcacttctgcatgtcgcggaagcagcggatgcacaacagcaacttcttgtcggtggagaacaagaggtagggctctgcgtgcagcgctgcgggggcggcgggcggtggtgagggctccggtcagtgcccgccccgcccccacccccaagtccccggccccgcaagcctcactcactgcacttctggggcacgtcgcggcttcgctgacccagggccacgatgtcgtggcgcgcgaacatgcgtgctcggtgcgtctcgtcgcggcagcgcgcgcataggggctgtccgcacgtgttgcagaagtacgtggtctccacgtcctgcgggccgagcgcgggctcaggagcgccagagcccgaccgcggccagcgcgggaaccgcagccgccgcgtgtcactgcgcgtgtttgtcccagccgtggccgggtgcgcagctaaacgcagccctttcctgtaatccaggcacttggcgctctgatatacccactttacagaggagggcactgcggctcagaggctgggtaagtaggtccgtggaggggggtgggggacgcggggagagggcagaaactgcctttataaaacattttaccgaggccgggcgcggtggctcacgcctgtaatcccaacaatttgggaggccgaggcgggcggatcacctgaggtcaggagctggccaacatggcgaaaccctgtctctaataaaaatacaaaaattagctgggcatggtggcgggcgcctggagtcccagctcctcgggaggccgaggcagaagaatcacttgaactcgggaggcagaggttgctgtgagtcaagttggcgccactgcactccagcctgggcgataaagcaagaatccgtctcaaaaaaaaaaatttttttttttttacctgcaacaaaagggtgtgagggcctctcacggcccccttggcacactcaatagtggccgaaaggtggtgtacaccctggccatctggagtcacacttgggggcggggggaggggaagagcagtgagggctttaaggttctcctccccaagccagacccagggctgggattccagggcttggcctgcagccctggtatggacgcatgcaatgatggacataacaggccctacctgcagtccctacctcctgctaatcctctctgtacgtctgggtcacacattgctcagcacttgtccagaacgctggagcttttgccccagtcgggccgtcctcctgggattcccgatacattttctggcctccgcaggccagagtcccctgtgccttttacagcccagagggaacagcatgctgtccccacctcccctgggctgtagctgcttctatgccacttgggtagcagaggcccttcagggtcggcccaggcctgcaaactggactgcccctcctgtgcaggtccacaactccaccctgaattggggaccagtgagctctccccagatcgaatggccttagcctctgccactgtctggacactggctcaagtcccttgttctggacctcagtctccccaccggtataatggggttcacatttggggccaaggtgccctagggaggtgctggagaatccactgccaggtcgtcctctgaagacatgctgagtgcatgtgcaagcattggggactgtgcaaccgggtaccctctgctcctcacccacccgccctgccgcccctgcctgctcgctgcactccaggtcacagttggcacagcgcaccgcctccacgccatcccctgagctgtccaccaggaactgcagcagccggtccacyggcgggagcccgctgggacccttcagcaccgtctggtgtctgcagagaagcccaggccccgagattctgataccccttccccagggctccccacccccacccctcacattccaggctggagctaaaaatagctgtgttgggaggtggggtgcaccacagctctgggrtctgctataaatatcacagccagcactcaccctgccctggtccctacccttgcccagtcctgggcactcctgcagacagtggggttggtcccctagtatcaaaagcagaagctgctcctcgacatcttctcacggcattgggcaaatcagagccactcctgggttccttgagcccacataactgaaactgtggttttgtggacctaagacttctaggacccccaagcgagtaaccgggagcgtcctgaccagtgctggagccccgcccttaccctctgacttttgatgggaggtcttgggccagtaactgcaatctccaggcttcagttaagctgatctataaaatggaccgaagcctgcaacttctggcggggagagctaaggaccgggtgcagtatctcccagtcgttctgcctgaagttggagccttactctcctggcacctgggtcccagctcgggcagagccaaccttgggcccgggggatggggtctggggggttttggggaactttgggasacttactggcacagcgggcaggtgaggcggccgtcggtcgcgcggccacgcaggcagccggcacagaagtcgtggaaacagtccagaagacacgggcgctcgtactgcacgtggcacagcgggcacaccagcgggtggatgctcggggcatccagggagctcgggccctccaggggcccgaagatagctcccgacatctgcagcgacagcgcaagcgggcggctggggcacgcacggagccccgcttgagctcccgcggcccctctgcccgggcgcccgcgccctccctatcgcgcctggacccgactgggygtccagaggtcatggagtggggagccgctagggcccaggttagggctggggcctggagctccccggcgcagggagaacaggcagtgaggactggcgaggggcggggccttgtacctacccgctgggccgctttgctgggagctaccggtcctccgagcctctctcccgccgtccagcgctcttagtgcggctccgggccgcgctctgagacaccgcgcggtcgctctgccgaggagtagccggccctggaagttcaggcccgcaccgggcgatggttcccactctgcgcggggcctccctctgccgtggcctctcctacctctcctcactcccaccctcggaattccccgccgggtgtcctctgggtgacccgcaggcgacgccycttccggcatccaccttccccagggtggctgctgccttgaggcgcggcggggccgaaccgacctccgcgctcgccatctgctttgcgcactggttccggcccggccactccacctccagcccgcggggaggagaggccaggacgccaaggctccagggacggtgccaggcaagggtgcaaggatcggactggcccctgcccggcatgacagagtccggagccccaagaccagagcgccgcgcagagcggggccggaggaccttggctgcggggtcttcaagggtaggccgggcgcggtggctcacgcctgtaatctcggcactctgggaggccgaggcgggcagatagcttgaggtcaggagttcgagaccagcctggccaacatggcgaaaccctgtctctactaaaaatgcaaaaattagccaggcatggtggcgcccttcgggaggctgaggcagaactgcttgaacccgggaggcggaggttgcagtgagccgagatcgcgccactgcactccagcctgggctacagagccagactgtcttaaaaaaaaaaaagagtccaaaccccaccccctacccccgctaatccccactcttccatcccatttgggtctgaacaggtcatcgccgcctcatttcctcggcggccaattgggggcgccagagagcagcggacgcccctccaccgactttccagcgcttgggaggcggagtgagacgccctgyaatcccagccctgcctttcgctggttgtgagctcttggccatgttactgacctctcagagcctcagcgctgggttaaaatagaactggtgtcctgataatgggtgaggccccagtggaataacgcacgtgaaatacacatactgggcgtccacttaattaaggccctatcctcattgcctgccaagttcccaaaagagggatgggtttgggtgggaggttgagaggggaggttcccggcctttccagcagtgccccctctgccgtctgggcctggcagatgcgtgttgatcccagcgttttctccagcgtgcgctcgcttgctaggtcgacgtgatcagtgagctttctccgcccgtgttctcctgagtgtcctgagagcagcccgtttctgcccctcttgcgattacaaagtcaagcccagagcctgacccacagtagtgctcaataaaggcttagaaaaagctcggagatatttgagctgttttcgttttgttttgtttaagacaggatctcactctgtcgccgcgtgatcatatctaactgcagccttggcttccttccacctcagcctcccaagtagctgggactacaaccrcgcaccaccatgccyggctaattttttgtatttttagtagagacggggtttcaccatgttgaccaggctggtctcgaactcctgacctcaggtgatccacccaccttggcctcccaaagtgctgggattacaggtgtgagccactgaacccagcctttttttttttttttttttgtatttttagtagaaaaataaaaagtacaatgtgctgcacacatcgggggttttgctgtgttacccaggctggtctccaactcctgggctcaagcattctgcctgccttggccttccaaagttgctgggattacagacgtgagccgccttgcctggccttgagctgggttttgaaggatgcgtaggagtaggagtttgctaggagaaggaagtgaattctagagagaaactagctgttcttttgaggactgtccctagccctggttcttttttttttttttgagactgagtctcattctgtcacccaggctggagtgcagtggcgcaatctcggctcactgcaagctccgcctcctgggttcacgccattctcctgcctcagcctcccgagtagctgggactacaggtgcccgccaccacggccrgctaattttttgtatttttagtagagacagggtttcaccattcacaggatggtctcgatctcctgacctcgtgatccgccccaccttggcctcccaaagtgctgggattacaggcgtgagccaccatgcccggtccctagccctggttctatttgtggaccaaatcataatgacagtagtagcaatggctaatgtttatgtgtttataggccaacattcttttatgggccaagattctttttttttttttttttttgagatggagttttgctcttgttgcccaggctggagtgcaatggcgccatctcagctcaccacaacctccgcctcccgggttcaagcgattctcctgcctcagcctcccgagtagctgggattayaggcatgtgccaccgcgcctggctgattttgtatttttagtagagacggggtttctccatgttggtcaggctggtctcgaactcccgacctcaggtgacctgcccgcctctgcctcccaaagtgctgggattacaggcgtgagccaccacaccgggccttttttttttttttttgtacaaggggagggagggtggggagatatgggccaatattttattctaagctgtttaacttatattaactcatttaatctggagaacactcttaaaaagtagaaaatattaccccagaaagtggtggagctggtatacaaaaccgcgtaggtgctttgttaaggaatgatgcattagtttcccggtaggaggtgagtgcttcattcatccattcattcatgtctgcatctgttcaactagtatttacagagcatctaccatggrcacatagaagggaacacaccagccaaggttagtcaagtacacagattaacaaataatgacaggctgcattaactgcttggaagaaaatcataaggatgataggccgggtgccgtggctcacacctgtaatctcagcactttgggaggctgaggtgggcggatcacctgaagtcaggagttcgagaccaacctggccaacatagtgaaaacccgtctctactaaaaatacaaaaattagctgggcacgatggatcatgcctgttatcccagcactttgggaggccgaggcgggtggatcacgaggtcaggagttcgagaccagcctggccagcatggtgaaaccctgtctctactaaaagtacaaaaaattagccaggcatggtggcacgcacctggagtcccagctacttcggaggctgaggcaggaaaattgcttgaacctggcaggtggaggttgcagtgagccgagattgcgccattgcactccagcctgagtgacagagtgagacctctgtctcaaaaaaaaaaaaaaaaaaaaaaaaaaaggaaaaaaaggaaaaattagctgggtgtagtggtgcatgcctgtaatcccagctactcttgcgaggctgaggcaggagaatcgagatggcgccactgcactccggcttgggtgacagagtgagattccgcctaaaaaattaaataaataaataaggatgatgagatggagggcagttgggaggggctcgagctgaggaccacactaggtaaccatgagcagagagggggaactgagcttgagacccccagaggataagaaattaagaaaagccaggaaggctgggcgcagtggcccacacccgtaatcccagcactttgggaggccagcgtgggtgaatctcttgagcccaggagttcaagaccagcttgggcaacatagcaagactcccccctctataaaaaatactaaaacttagctgggcatggtggctcgtgcttgtagtcccagctacttgagaggctgaggtggaaggattgcttgagccaggaggttgaggctgcagtgagctgtgactgcacctctgcagtcccacctgggtgatagagtaagaccctgtctcgaaagaaaaacaaaaawagaaaagctgggaaaagttccaagcagaggcaagagcaagtgcaaagccccagaaatgggaagacatttagagactagcagatcaatgtggctggagatgaaggagctcagggtggggagtagggctgaacatggcatgggagtgaggatggaggatgggggtgaggctggagaggtgggggcggggcagggggtgtggggtgagggatgagggtttgagtgtggggaggtgggggtgagggtgaagaggtgagaatgggctcatgagggtcagggtgatctacgggacactagtctagagatgccaaggatgccactggctgtacctgtggggagtccagggaggggtagaggctgcacacattggcctggggagtcatatttaaagggaagagcatgtgggtcttgtctaaagatcaagtgtagataaggacgggaggaggctgggtgtgatggctcccgcctgtaatcctagcactttgggaggctgaggcaggaagattgctttagcccaggagttctagatcagcctgggcaacatagccatagtgagacaccaactctctacaacagcaaaacaaaacaaaacaaaaaaacatgcagctgggcatggtggtgcacacctgtggtcctagctactcaggaggctgaggtgggaggattgctggagcctaggatgtcaaggcttcagtgagccgtattcgcaccactgcactccagcctgggcaacagagcgagagcctgtctcagaaaaaaaaaaaaaaaaaagaaagaaaaaggaaagaacaataaaagtcaactgctgagagggaggtttaggaagaaggggctggcattatgactgaggtgtgaaatagtcttttgggccaggtgcagtgccttatgcctgtaatcccagcaatttgggaggccaaggtgggaggatcacttgagcccaggagtttgaggctgcagtaagctatgatcacaccactgcactccagccttggtgacagagcaagaccctgtctctattaaaaacaacaagaaagggaaatagtcccttgggggagagatttaggattgtcagtagccctgagggctcgcttagggtccgttatcagccagggtccagtcaaaagacaacacattatagtttttaactgagagaatttaatataaaggattgttaactaggtataaagatgtgtttaggtaactgtcggggtataatactaacagtagcaactgcaggaagtagctaccactggtaggtggtattattaaaatgtagatgcttgaggaggggcacagggaggtgaaactcagacatctgaggagagggtgctgctctgctagggctggtgtctctgaggagaaaacgaggctggttctgcaaatgttggaataagtgcagactggattccactgctgcttccagaatgttccaactgccacctccaggataaagaagcaagagtggatgacaccagacaggacaggagcaagcaggaagcaaagccccctattgatagagccaaaccgggatcagctggaaagcagaagtgtttgcagaggcccagcctgatcattatagagccaagaacagcagctggctttggagcttggtcaaccggcttgaggcctgagttgaaagctagacccatcagcacagtctcttctggtgattggacttttgctaggtgagtacactgaagccaggtaaagggagtggagagtgtgtgtgccactgagtgatttacaattcaggatcctggaatataattccgtgaggacgcagcgggtgactgggtgcaaagtagcccagttcaagggacctgtgggcctggggatgaggacctttgcttctccacatgcggtccatggactcgcagcatcagcatcgtctgagagcttgtgagaaatgcagaatttcaggccactgagaccgctggaattggaatctgcattttccagatctcctggtggtcctcaactacttactggtttgggatgggaaactagaaggcttgggctgggaaactagggagtggtgatcagcgagggggcggcctggctacagcaaaaaggacaggcactgggagacagcccctgggcatgagcttccaagctggggctttttgaggaagccatagtggtctggcattgggacctctgaacgaaatttcccggtggctacaaggaattttcccacttccccaaattagtagattcgatttccatcccactagctggtaatttacagtatagtgaatttccttatttcttttttcttcccaagactttcaaaaagtaaagccaacccctttatttatctttgggctcgtccagtctggcttcccccctccgatcrttcgcagtgggacagcccgccgggcctccttccttcmccagaaaccctccaggcctgggagaggacgcgttttgcattcaggaaaaaccaatcgctcccctatcgtacataacsaagagaaaaggtggcggacgaggggcgtggcaaagtgattagtgcggcctggaccctgcgtgccttgcgcgctgcgggctctttgcgtctgcgtagttcgctcacctccctttctaactccgctgccgccatggctcctgtggttagtatggctccgcgtgaggcctcggctccaggggaggcacgtgggcctcgcsgagcccggcatctacccaggctcgctgggkacggcgccctgcagcgtcctgctggggtgggctggcaggtcggccggagcgggccagagcccctgccgatcccagcacgttgtaggcggaggaggccgcggcccgaggctcgtgagggagatccgggaggtctcggaggcccggggccccagctaggggctagcggggagctggagcctggagactgcggtctgggccggccactggtcctcggaccccggccgggggcctgattacctgggtggagggcggggaagaagaacgggacctgctaccctggggagccgcgcattcggaagtccacggccaagactcggggacgaatccgcggaagggcggcttggtcggcgtgctttcggagaggaggcctgggtttgaggagctttttagcgtccccagaggaaatyagtttatcagggcgcactgtacagacccaaacgggtgttrcagtggtgtagggagaaggctctcattgcattctcctttagctatgytgggactgggctgtgcgrcgccctcctcctaggttatttgagaaagttgtttttccgtgttcttcgtcccaagatcctacttttcctcttttgttgggactccctggttaacatttccggttcttctgctctwtctgtctggttgggcttttgaatgccttttggtttaaaaccttgatggagaagtatcaagcccgttgtgggtaggtctcttgattgattgtgtgtgttcggaatagatcttaaagyayccctcttagattattactgcgaagagacgttgtaaaaaataaatcagtgatttttgtagtggccaaatgtttgaaaagttgatccagttaacacaagttttagatgaagttcttttaaacatgaagggaggtaagatgtgtttttggaaaagtctatttagttctgcagagcttttaaacgtgaaagtacaggttggtacgatgcacaagtgcattaatggtgtcaagtttgtagagagataagattaacacaagcttcttcgtaagagtgaagaaactggaaccttgtaggatgtgctttgccgggtggtttggaagtactaatgcatagatgaagcgaatcaaaatgtcagaagttcttgacggtagtgttgtaataagattctaggttttagccttaacctygtccaagctggagtggacaggcacctagaatactttgcaactcccttcatgagaaggtggatgagacaggattaagggagatgagctaagacggatcaggaccctactctgaacatgtaggacaaggattgatttcatatgaaaattgtgggtatgcaaggcattttgtatgcctgcactctaattttggaaaaatagtatttttttgaaattgggaatgttagggcaaacaaaaggaartgttcattttattgtggttcataaactaagagaccttcatgcctgtagagattggggagactggaaagtttgagtgagtcaagagtgctagaatgatttccccatcaaaagggcatgaccccaggccccaagcttgtacagcagcatctgccccattatacctctggcactcaggcagtgatgcctcttggccctctggcaaagggagcacacttccgttagttttgtatttgtatggacttttatacctatgacgtttctggttctgttaatcttgtttttcygactgaytgaaacttcatctctgttatcatttgtgtrttttcttagaaaaagcttgtggtgaaggggggcaaaaaaaagaagcaagttctgaagttcactcttgattgcacccaccctgtagaagatggaatcatggatgctgccaattttgtaagttacatccttattgccactcgggtggtcacgaacattttgagatactgttgagaaaacctactggggtacatttctgttttcaggcttataggcagcttcacaggtctggctgtatcatctcaccctgggaatgtgggcagattacttgtttgtttccaagtcttgtttcttcttgtgtgtgcaacagttgtgaggagtaaaaggagatgggcttagaataagcaagaagggctctagcacagaggtgttagaggactatcttgtttttctcctttagtttccacaaatgattttacttaaaagttacccagaaacaagccaggcacggtggctcacgcccgtaatcccaacactttaggaggctgaggcgggcagatcatgaggtcaggagttcgagaccagtctggccaacatagtgaaaccccgtctccactaaaaatacaaaaaaattagctgggtgtggtggtgtgcacctgtaatcccagctactcgggaggctgcagtagaagaatcgcgtgaacacgggaggcggaggtggcagtgagcagagatcgcaccattgcactccatcctgggagatagtgcgagactccgtctcaaaaacaaaacaaaaaaagttactgagaaacagacaaatttcactgggtccatggcatcccccttgctgtttggtgtgtttaagcataagtgagggaccctgatcctgactatgggctgcctctgtcctgggtctcactgctttgatgtggagctttggacaggtggcagcagttcccgaagcttttctatattatgaagcatctgagcttcagtgtttaaagtaccctgcttgctgaattgtaattggagcttttttttttttcttcagatcttgctctgtgctgattttttgcccctgtatttggcccattccccaatattcctctatcctattgcaatctagaaatattaaataatccttccgccacattttgactcagcagtttggttttgacattttattctttttcctctaatagccatgtttgggggattcagacttcgtatttgtgtgyagaagtctcctaaatttgcatttgctctaaattctccagaaggttgaactattgccaggatcagtatcattacaacaaaaataatttttaaacacaaaataattatggtcacgaattatccagaatggaatttaggtaacctcttatagtttattgcctttatgtagatgctgtttgcatctgtgtccttcaagaaatcccctatttccttagttctttctctatccagtgacttctggcttttctgtggcctcctctttttcaactttggtgtcttccagtttggtattcacatggtggccctgttctggcattattcctgcctccctccctctgagccattccctcagcccactcatctgtttgtgtgattgtctttccttctggaagcctccttaggatagaaaacttaagtcatttatgaatcttgagatgcagaattcaagatttctgacctaatcactctgtgccccatctatggttaatgtatactttttgtttattttattttatttactttgttttttgagaccaagttttgctcttgttgcccaggctggagtgcaatggtgcagtctcggctcaccacaatctccgtttccctggttcaagccattctggtgtctcagcctcccgagtagctgggattataggcgcctgccaccacgcctggctaatttttgtattattagtagagatggggttcctccatgttggtcaggctggtctcgaacccctgactttaggtgatccacccacctcggcctcccaaagtgctgggattacaggcatgagccactgcgcctggccattttattttatttttatttatttatttttgaggtggaatctcactctgtcacccaggctggagtgcaatggtgtgatcttggctcactgcaacctccaccttccaggtttaagtgattctctttctcagcctcccgagtagctgagattacaggcgtgtgccaccatgcccacctaatttgtgtatttttgtggtagagacggcgcttcaccatgttggccaggttggtcttgaactcctgacctcaggtgatttgccagcctcggcctcccaaagtatcgggattacaagcatgaaccgctgtgcccagccaaattttttttttttttttttgagacggagtcttgctctttgtcacccaggctggagtgcagtggtgtgatctcggctcactgcaagctccgcctcccatgttcatgccattctcctgcctcagcctcccgaatagctgggactacaggtgtctgtcactatgcccggctaattttttgtatttttagtagagacagagtttcaccgtgttagccaggatggtctcaatctcctgcctttgtgatccgcctgcctcgggctcccaaagtgttgggattacaggcgtgagccaccgcgcctggccccaaatttttatttatttatttattttgagacggagtcttgctctgttgcccaggctggaatgcagtggcacgatcttggctcactgtaagctccgcctaccgtgttcatgccattctcctgcctcagcctcccaagtagctgggaaacaggcgcccgccaccacgcctggctaattttctgtatttttagtagaaacagggtttcaccatgttagccaggatggtctcgatctcctgacctcgtgatctgcccacctcagtctcccaaatttttattttttgagaaagggtctgttgtccaggctggagggcagtagcatgatcctggctcactgcagcctcaacctcataggcccaagtgatcctcccacctcagcctctggaatagctggcaccacaggcatgcaccaccatacctagctaatttttaaatttttttgtagaggaagggtcttcctaagttgcccaggctygtcttgaactcctgggcttgagcaatcttcctgccttggcttcccaaagtgccgggattacaggtgtgagctactgcacccagccagttaacatattttgtattggagtttttaaacagaaaattataggaattttgagctgaaagggacttcatgtcattgccatagcaagaaaacaactaaaaaggtcctttttgggcaaagctttctgaagcacaaggaggtgaatgtcttgctgaggcccacacagtagtttgcagagaatatctcaggctcctgagtggctgctgcttctgctgtaccacacatggccctggaccaggtctagaattgtttcagtccctatgtctttgctctttctactaggttgaaggcttattttctgatagtgctgtgaacagtgttttatactccttagattcagaagttgcttttagctttggttgcatgtaccttgtaaaagtttgttttatttatttattttttgagacagggtctctctgtcccccaggctggagtgcagtggtgtgatctcggctcactgcaacctccgcctcctgggctcaagggattctcctgtctcagcctcctgagtagctgggactacaggcacatgccaccacacccggctaatatttgtattttttgtagagagagggtttcgccatgttgcctagcctggtctcaaattcctgagctcaggagatccacccacctcagcctctcaaagtgctgggattacaggcgtatcttgtaaaagtctggccttgggtttcctgtctagtgttgtccttctaagcctttcgtggcgaggcccagtcggccttgtgtggaagtagtcaagtacgtttacactgggatgttgtctcatagtatgtatgtaaatgggatttgttaccatttttaaaaaagactgaacatttaagaaaccgatattagggccaggtatgctggctcacacctgtaatccccacgctttgggaggctgaggtgggaggatcacttgagcccaggaatttgagaccaatctagccaacatagagagaccccttctcttaaaaatgttaagccaggcgcagtggctcacgcctgtaatcccagcactttgggaggcagaggtggacgaatcacctgaagtcgggagttggagaccagcatgaccaacgtggagaaaccccgtctctactaaaaatacaaaattagctgggcctggtggcgaatgcctgtaatcccagctacttgggaggcggagcaggagaatcacttgaacctgggaggcggaggttgcagtgagccgagatcgcgccattgcactccagcctgggcaacaagagctaaactccatctcaaaaaaaaaaaaaaaaaattgtaaagtcagctggggccaggtgggatggctcatgcccgtaatcctagcactttgagaggctgaggtgggaggatcacttgagtctrggaggtcgagacttgagcttgggaggttgagactgcagtgagctgtgattgcgctggtgagactctgtctccaaaaccaaaacaaaaaatgatattagttcagtgttgggagacagataaaatattctgttgagacagatgaacttgtcacttcattggtcaatttaatgatttctacaggagcagtttttgcaagaaaggatcaaagtgaacggaaaagctgggaaccttggtggaggggtggtgaccatcgaaaggagcaagagcaagatcaccgtgacatccgaggtgcctttctccaaaaggtacaggagggaagtgtgtgtgtggcctgcgtgcacccagtgcccagcccgccttttccctgcatgggagtgggggcacccgcagagtgattggtttgcatctgttaatttctggaactatgctcagtgcaggaggcagtggatgaatgctattatggttgttaacaatagtcaacttttggtggttttaaaattttgtctttcacaggctaaagtgttttatttttttttgagctggagtctcactccatcgcccaggctgttgtgcaatggcgcgatctcggctcactgcagcctccgcctcctgggttcaagcagttgtcctgcctcagcctcctgagtagctgagactacaggcacctgccaccatgcccggataatttttgtatttttagtagaaacgggggtttcaccatgttggccaggctgctctcaaattcctcccctcaagtgatccacccgccttggcttcccaaagtgctgggattataggcctgagccaccatgcccggccaggctaaagtattttaaacagtaaggtactcagacttgctttcaagactgttttctcaaaaatattcttggctgggcacagtggcttatgcttgtaatcccagcactttgggagggtgatacaggagtattgcttgagcccaggagtttgagaccagcctgggcaacatagtgagacccccatctctacaagagttaaaattagctgggcatggtgacatgtgcctgtagtccagccacttggggagctgaagtgggaggatggcttgagcccagcaggttagggttgtaatgagctgtgattgtgccactgcaggccagcctgggtgacacagtgagaccctatctcaattaaaaaaaaaaaaattgcctcctgtctctagatcacagtaagagcttactttttttttttttttttgaaaccgagtcttgctctgttgcccaggctggagtgcagtggcgccatcttggctcactgcaacctctgcctcccaggttcaagcgattctcctgcctcagcttcccgagtttttggaattgcaggcatgtgccaccacgcctggctaatttttcgtatttttagtagagacagagttttgccatgttggccaggctggtctcgaactcttaacttcaggtgattcgtctgcctcagcctcccaaagtacaaggattataggcatgagccactgcgcctggcccacacccagctaattcttgtatttctttttttttttttttggagacagagtctcgctttgttgcccaggctggagtgcagtggcgagatctcggctcactgcaagctctgcctcccgggttcacgccattctcctgcctcagcctcccgagtagctgggactacaggcgcctgccactgcgcctggctaattttttttttttttgtatttttagtagagacggggtttcaccgtgttagccaggatggtctcgatctcctgacctcgtgatccgcccgcctcggcctcccagagtgctgggattacaggcgtgagccactgcgcccggcctcttttttttttttttttttttttttgagacggagtctcactctgtcacccaggctggagtgcagtggcgtgatcttggctcactgcaacctccggcttctgggttcaagcgattctcctacctcagcctcctgagtagctgggattacaggtgtctgccaccactcgtggctaattttttttgttttttagtagagacagggtttcaccatgttggccaggctggtctcgatctcctgacctcgtaatccacccactttggcctcccaaagtgctgggattacaggcgtgagccaccgcgcccggcctaattattgtatttttagtagatacggggtttcgccgtgttggccagactggtcttgaactcctgacctcaggtgatccacctgccttggcctcccaaaagtgctgggattacaggcatgaaccactgtgtctgaccaagagctttccttttgaattccagttgtttcccttgtaagtgctactttggcactgaacaaggaatctgaagacctcagtttagacagagtccactctagttaattcctgggggcccattttctttcatttcaaaatggagacattaatttgctagttccctcctctgttatgtgttggtttttgaggatgaggttaaaatactttaccagttgctgaagaattggatatgcatatactcagctcctagcctggggctgtggcctgttaggagcttttaatcatactaaatcccagcactttgggaggccgaggtcagaggatcacctgaggtcaggagttctagaccagctgaccaacatggagaaactccgtttctactaaaaatacaaaattagctgggtgtggtggtgcatgcctgtaatcccagctactgggkaggctgaggcaggagaattgcttgaaccagggaggcggaggttgcggtgagccaagatagcaccattgcactccagcctgggcaacaagagcgaaactctgtctcaaaaaaaacaaacaaaagaaaaccaacatactaaatcaagtggtgggaaattttaaggtatgttagtacaaattggttgtagttaatgcttttatgtttagctatgtccgtgaagaagagactttgaagcttaagtgaagtcctcacagtctgcctgggaagcagtgagaatggggcttctggtgggggtacaaagcgtccggcctgctgggctgtagcagagcccttggggaagattctgctacctttctgtgacctgtttaccagggtgagggtatctcctgacatgcgtcacttgcgttttcacaaactttctgttctttatccagtggagtagggaaggtgccttaatcatctattacagctttcctttcttgatgataatagttaattttcctgaaaggttcaaggtgtcccgaatctagaactttttctgtctctgaatttgtacagggtttttatttatttatatttttgaaaacgagttttgatcttcttgtctaggctggagtgcaatggcgcgatttcagctcactgaaacctccgcctcccaggttcaagcaattctcctgcctcagcctcctgagtagctgggattacaggcgcctgccaccacgcccggttaattttttgtatttttagtagagagggggtttcatcatgttggccaggctggtctggaactcctgacctcaggtgatccacccgcctcggcctcccaaagtgctgggattacaggcatgaggcaccctgcctggcctgtacagggttttttttttttttttaacctgatttttttccccagtgtactattagggatttttttttttccttttttttagatagggtcttactctgtcaccaaggctggagagcagtggggtgatcatagctcactctagcctccatctcctggctcaaacagtcctacctcagcctcccaaatagctgggactacacgagtgccccaccatgtccggctatgtcagggaacatttcaaccacctgaaattttgaattaacctcatctgaatacaatatggtggaaataattgacaaaagtatactttttagatggaatgaccaaattgatttatctttgcttagcaaaaagtggacagttgaattgagatcttcacactttgtggcgattgctttgttggtgtggagattgctttgttggtgtggagattgctttgttggtgtggagattgctttgttggtgtggagcactgtcacagtgctccttttttggagatggtgagtctgttggttcatgacatttgggtcctgtgaatatgccagggatccatgctgagcgcggtggctcacgcctgtaatcccagcactttgggaggcccagacgggtggatgacctgaggtcgggagttccagaccagcctgaccaacatggagaaaccccgtctcttactaaaaatacaaaattagctgggcgtggtggcacatgcctgtaatcccagctactcgggaggctgaggcaggagaattgcttgaacccgggagacggaggttgaggtgagccggagatcgtgccattccagcctgggcaacaagagcgaaactccgtctcaaaaaaaaaaaaaatgccagggatctctctgagcatctcatgtaatccttgctatggtctgaagagatggttagtagcagggatcccctttcactgtgggagaaacagcttgggtagatgaattggctctgctgtgggtttgtgtgttgtgaaattccctctttatggcttgggaagattcggaatagcctcagggccacggaagcaagccggtgagagagctgccaagactgtggtgcacttcatcttttttttttttaattaaaaaaaaaaatgttgtgtagagacagggtcttgctatgttgcctaggctggtctcgaactcctagattcaagggatcctctcaccttggcctcacaaagtgttgggattacaggcgtgagccactgtgcccagcccttaggtcatctttatgtagttagggtgttgggcacaaaagccagtttttgcctttccataaagaatgagtgttttggctggtcgcagtggctcacagctataatcccagcacttcgggaggctgaggtgggcagacacttgaggccaggagttcgagaccagactggccaatatggcaaaacccccatctctactgaaattacaaaaattagctggacatggtgttatacacctgtaatcccagctacatgggagactgaggcatgagaattgcttgaatcctggaggcagaggttgcagtgagcctgggccacagaaggagattctgtctaaaaaaataaataaaagagtttttaaatgatccctgttgtggtgagtgtttagctctcacctggctaaagcagcaattgggcaggctgactgaaaggctttgtgctctctgggcgtgagcgcagtggcagggtggcattctgtccctgtgtgttgggtggtgagcaggagcgagtgtgtgcacacccctaagaagcagtcctcatcatccagacaacctcaaaagggggtttgactccgtgaggtgatgtgtgcgcagcgcttacagctctttggaaacccactattttctgcataaaaggtattgaggttgcgtacttaactgtaaatttctatcatgttatctttctccagtggtcactaaaaaccatgttataggtgtttgctgcattttcatggacaactggtacatctacttatctacttatctgctcttgttttttttttttgtttttttttttttgagatggagtcttgctctgtcgcccaggctggagtgcaatggcgccatctcggctcactgcagcctctgcctcccgggttcaagcgattctcttacctcagcctcctgactagctgggactacaggcgcccagcacgacgtctggctaattttttgtatttttagtagagatagggttgcatcgtgttagccaggatggtctccgtttcctgacctcatgatccgcctgcctcagccctccaaaatgctgggattacaggtgtgagccagtgcccctggcctagttttttttcttttttctttttttggaggcagtcttgctctgtcacccaggctggaatacagtggtacaatcttagctcactacaccctccgcctcctggattcaagggatcctcatgcctcagcctcccgagtagctgggattacaggcgtgcaccaccacgcccagctaatttttttatttttagtagagatggggtttcaccatgttgttcaggctggtctcgaactcctgacctcaagtgatctgcctgccttggcctcccaaagcgctgggattacaggcctgagccaccatgctgaggctattctaattgttactgccgatgtcgatggtacgtggctgataactcagagccttggctgggtgtatttgccttacctttgccatttttgaggcttgggaaaacaccttgaattgtaatgattttgagtgctgggttttataaatgttaaaatgttttagaatgcaagcaccaactgtctagtggagttcttgtgtcctttctctgcaggtatttgaaatatctcaccaaaaaatatttgaagaagaataatctacgtgactggttgcgcgtagttgctaacagcaaagagagttacgaattacgttacttccagattamccaggacgaagaagaggaggaagacgaggattaaatttcatttatctggaaaattttgtatgagttcttgaataaaacttgggaaccaaaatggtggtttatccttgtatctctgcagtgtggattgaacagaaaattggaaatcatagtcaaagggcttcccttggttcgccactcatttatttgtaacttgacttctttttttttctgcttaaaaatttcaattctcgtggtaataccagagtagaaggagagggtgactttaccgaactgacagccattggggaggcagatgcgggtgtggaggtgtgggctgaaggtagtgactgtttgattttaaaaagtgtgactgtcagttgtatctgttgcttttctcaatgattcagggatacaaatgggcttctctcattcattaaaagaaaacgcgacatctttctaagattctctgtgggaaaatgactgtcaataaaatgcgggtttctgggccattcgtcttactttcattttttgattacaaatttctcttgacgcacacaattatgtctgctaatcctcttcttcctagagagagaaactgtgctccttcagtgttgctgccataaaggggtttggggaatcgattgtaaaagtcccaggttctaaattaactaaatgtgtacagaaatgaacgtgtaagtaatgtttctacaggtctttgcaacaaactgtcactttcgtctccagcagagggagctgtaggaatagtgcttccagatgtggtctcccgtgtggggcccagcaatgggggcccctgatgccaagagctctggaggttcttgaaagaggggacacgaaggaggagtgactgggaagcctcccatgccaaggaggtgggaggtgccctggaaatagctgcctcatgccacttaggccatgactggatttaatgtcagtggtgtgccacagtgcagwggctagacaactgaaaggggctaccaaggctgggaaaaaaatgcaattgttgctgtgagtgactttgaaagactctggtgccttgtggtgcccttctgaaattcaaacagtaatgcaaaagtgtctgcattagaatttacggtgtctaaaattcatgtttttaaaagagcttgcctacagatggtttccacacttgaaattgtgccctgcgagttgcatagctggaagttcaatgctcagtcctaccttggctcccattaaacatttggtgctctgtggattgagttgaacgtgttgaggctttgcaatttcacttgtgttaaaggctctggcatttttccatttctatgcaaatttctttgaagcagaattgcttgcatatttcttctctgccgtcacagaaagcagagtttctttcaaacttcactgaggcatcagttgctctttggcaatgtcccttaaccatgattattaactaagtttgtggcttgagtttacaaattytacttgttgcattgatgttmccatgtagtaagtcatttttagtttggttgtgaaaaaaccctgggctgaagttggcatttcagttaaaagaaaaaaagaaactagtcccagatttgaaaacttgtaataaaattgaaactcactggttttctatgtctttttgaactcttgtaatcgagttttgatcatattttctattaaagtggctaacacctggctactcttactgtacgaggctttgttttttttaaggactggcatgtgaagaaaagctttgtcctcacgaattagttgctgtaccaacagttacgttggtctttattaggcttagaagaaaagatgtcctttatttccacttttcttcccttagttgtgctgttttgccgcagtgagattcaggggttggctgtcactgaactctgtgtagaatttctccagatccagagcctggggatcaactttgccagcaaatgccgttttctgatggggaataggtagtgtgaacttgaattccatcacaaccatgacaccagctgcgcccaaagcacactgtagaccagtttcctttgttttgactcacacctcacttgcctgatcgaaaatagttgaggcacaggggctgactggggtcgtggagagtttcaagccgtgatttaagttcataagagtccggaaacaggaggttggtctcgtctcagccaatgccagttacacaacaccttcacgcccttccctcgagtgtgctggtacagctgaggaaatgaggtttgttgatgtcactaagtgctacgaactagtcacttctaaaggcttcatgttttccctccaaaaagcctctgatcccccttttcccatggcacttccagtggtgaagtgtttgggttttgaggactgttgtcctcatacattttcaggagcagccaggtgttgaaatacgtgggtcctaactttgctcatgaatggtgtgtagcacagaggtggtcagaaacacggggaaagtgaggaagttggataataccaagtgtcttaagacagttgatatctggggctatctagagctcagcctttttaggggacacttgatttcctggagggtgataaggaccctggtgatggggaataatggtccggctgttgaagtcattgatgtcaggggagcctggaatttggtgttgacacctgatttcactttccatttgtacatgggactcagacccttaaacttgtcaagtattgtaaaccaagacctcccacaggagagggggacctaggatgtgggacagttacagatctggcagttccaggggacagaccatctccccagtaacccttggacagaatactggggtgacgagtcagaagctgcagggtaggggcaccacggcggtgagagatgggccaggtccctgaaggagagcctgggttggcacctgcccaggttgttcgctgagtcgtggtgatgggcctgtatttagtggaataaactgtggggttgattctctttgagggagaagagggtagaagagaggcttggtgtggggatttgccatccctgcaaggaggtagccctccacctacaggaaggaggtgaggactgcctgttaaacggtgcaatcatagtgcttatctctaggaacaggaaactgaatttctcatccagccattttcttgtctttgggatggatttgagaatacacattcttttttttcccccaggctattttgggcccagctaaaacagtctgtaaaggctgtgctgaccagcggagtgagttagctgccaccatagctagaacccagagaacacccataaaacgttctcaggcttacacaaggattttctcaggttcagggccatggcccagggctgcctttttgagaagctccttcctcccctgcaaccccaactgatttgaattcaggtggtgcagggtccacactttcggaaaaagccttcaagtgcaacgaaagtcttggtgcagcaggtgggcactgagccttcattgcagaggacactgcggtcctgagtgacgccgtttcacccctgccgaggaggaggtgtggggcagagttttgatctatgtgactcgctgtgaggtggtgtatgtacaagcacttcattgcccttgagaagctggtggtgccaggtggccacagcgtggatatgcattgttgaacgaaatggcctcaggcaggccttgggggttcctggatgaggagttcatttagtcctggaatggaaattgagtatggtatgtgcagaagacgatgagctttttccactctgttcttggaaaaagttttttttttttctatttttgagacagtctcgctctgtcacccaggctggagtgcagtggcgcaatcttggctcactgcaacctctgcctcctgggttgaagcgaatctcctgcctcactcgcccgagcagctgggattacaggcgcccgccaccatgcccggctaatttttgtatttttagtagagatggggtttctccatgttggccaggctggtctcgaactcctgacctcaggtgatccatgactgcccgcctcggcatcccaaagttctgggattacaagtgtgagccactgcacccagccgaaaaaagttttttccttgatgcttttgtaaccggtatattaaaaaatattttgattttggaattgtcactgaggtgtaattatgagctctatgatcagcaaacatgagaatcttgtctcctaaaacagtaaccttaatgataggcttgttcttgcaacgcagagttgcaagtttcagggattgcttttaacgtcatgcatttttggtccgttgtcattaaaatacccatttaatagtttaacaataataagggctcacctttaaaaatgactggagagccgggcatggtggctcacgcctgtaatcccagcactttgggaggccgaggcaggcggatcacgaggtcaggagattgagatcatcctggccaacagggtgaaactctgtctctaccaaaatacaaaaaattagccaggtgtggtggtgcgcgcctgtagtcccagctgctactggggaggctgaggcaggggaatcgcttgaacccgggaggcggagatttgcagtgagctgagattgcgccactgcaccccagcctgacgacagacaccatctcaactcccccccttgaaaaaaaaaacccaaaaaacctggagatttgtagtaaaaaaatccatttgtttctagcattccagtttttgtttcattttgcttttggacattaaataatattacctagttgcagtcatcgggaagaacaggatggggagaggattatgactgatgagcatctcggctctaatttgttgccagattaagcagttagaactgttctttcttgaacgatatcttgactttcagcctcgccttgggaattggagccagggttaatgatgggggcggctttctggtgatgagaagtattgtaaatcagagtttttctaccgaagggcaggggacctttgaaagggattagagaggtgttggggggctggtaactgaggggtgggcgtgtcagcttagggctttcttcccttgttggtcaccattcatggaggcagttggtctggaaagaacgaggaagaggcaggtttggttcaagcctcggtgatctggggctccccctggctagctgctctgtggggaaacacggccttgggaggggaggccctttggtttcctggcctgcttccctgaagagtgttcctttccccttgcaggcggccagcactgggctgacccggcttctctatctacagcgtagttaaagcggatctgggagatggaggggttcccaacaccccagtctttggttccagaaggctggaccgacctctccttgcccagggatgaatgcagagggtcttttgtttggggtttgctggcaataaaattgaacgggaagaagggaaactgctgccgatcctgcgtgtctcaggtgggttcccccagtgcccctgcgaggcagtgagagggggccctcccttcacgggccttctggggttagagagctggcggtcggccagcccctggaacttttgcgttcttaaggtagctttaagacttgccgccgcggagactggaggcgctcatttaaaattccagtcttgctcccgagggctttggcctccatcttcacctttaacgaccgagggctggtggcggcggctccttcctgctctgcgacaggtgtcgcttctgagcgggagttttgggcacagacatcgcagatccgcaccacccctaggggtctgcatgggtttcagctgcacccagcctggaggggctttttggaagggggcacgtgggcggtgggagcggggaagcaggtgaggggagcccgcctgcgcggatttttctgctgtaaatcagacccacagtctccagagcgtcttttccccaagtgtggaacacatttttcttctaatcctctttggagagggggttaggaacgtgccgaggccggagccgggagcggggtgggtcccggcgcctgtgaaccgagtgggggagcgggccgcgcgctgccctgaagaccctgcctccgcgcccttgggggctcggggcccagcgccttcgcaggcgagcggcggcggctggctctgcccggggtgcgcgggggcggtgtttcctcgcctccccctgcgcccgggctcgccaagccccgactgcccgctcggccgtcgggtccgcgggcgcgcggacgcctcgacggctccccctgccggggcgccccccggtccccaccctcacccggcggctcaggactagtcccccaacttgttctctgctgttaactagtcgcgctgccggaacgatgggatggggttgccacagcaaccagactggacgtcacaatccgggcatgtgtgccgcccccccgccgtgccgccgtgcctctggcgctgccgccgccaccctcggccggctgcgggactcgggctgcggggcgcggtgggaggagcgcccgggctttgcggggagcaggctaaggcggccgagagaaaggggggtcgagacgggggggtggaggtttgggggggtgggggggcaggcggccgccatcttctcgccgaggccgcctcgcccgccgcgcgcgccggtccggcagcgcacgggttaaggctggcaccgcgcccggcgggagggggggcgcccacctcccctcctccccgcgccgggcatgcggggcccagtgggcaccgaggaggagctgccgcggctgttcgccgaggagatggagaatgaggacgagatgtcaggtgagcggggcgcgggtgcgcctggggccagagcggcgggggcgccgagacgggccgggcccagggcggagcgcgggcggcgggggcggcgcggccgggctggcgcctcgcaggaggggcacccgggttgcggggctgcgctcccgccctgctggcgccgcgcggccaagggcgaaggctgggtgagcgcccgggccggcgtgagggcggctaagggcggggtgcgatccgggccccccgggcggcgacgcgggccaggcgggccagaggaccgcgggccggggcctgcgctggggggcgcggcgctgtcagggtcagcccgcgtgcccttgaagggggcgggaatcgcgctagctcccggagcggcgcaccccgcgctcgcgtcccgccgccgtgcgcctctggcctcgctgcgggcaggcgggacccggcccctggcccatgtcggccgcggggcgggctgggtggggcccagagaggggcgaggaccggcggtgcttggggacgcgttgagcgcccaggatggggcggcttccctcccggcccaggaggactccgctctgggacgcacgggctcggacccctgctcctctttcctggcctctgtgcgctgtgaccgccgctcccaagcactttacccgggccgccggcgtccttctggcgcgacctagcgcccgccgctgtctccagcctcaccatcgcccagggtggtggccgttcccagcccaccctgccttggctacgggcctgacgccccagggccaccgcccctgcccctaccatctctctccttttatctctctcagaatttagtatacacagggctgtgcgccaggggttgccttgcgggacagttctttagttaactgctcaccatttgtttgggacgttttccctcctggcacagctgggtagggccccaccctgt

SEQ ID NO: 97121 - DNA, 16023 bp, Homo sapiens
agaacccatttactttgggagaagatttaagccttatgtaaagcagggctacatgagtggaggagcaggatatgtactaagcaaagaagccttgaaaagatttgttgatgcatttaaaacagacaagtgtacacatagttcctccattgaagacttagcactggggagatgcatggaaattatgaatgtagaagcaggagattccagagataccattggaaaagaaacttttcatccctttgtgccagaacaccatttaattaaaggttatctacctagaacgttttggtactggaattacaactattatcctcctgtagaggtaagtttagaaattttattactatgtcaatacttggactgactgaattttgttgataaaaacatgttaatatgtgtatgtttctttagtaccaacaacaaggactcttccttagtctttttaaatagagtggcagtataacaaaatagatgagaacagggacatcagcaatcagcagtagtcacttagcaaatagctattgatgctgttatatgccaggcactgagaatgtagaagtaaatcacagccaatttccagttctcgtgaaccttacattctggatgaggagatatacagtaaacaggcagacttgtaaatataaaataggattttagtagtaagtgccctgaagaaaaataagccaagtaaggggatggagagtgacccagagtgggatggagtcctctggtttgggtgattaagaaggcctctcaaagaggtgacttttgagcagaaacctgagtgttattagagagcaagttgggtgaagatctgggtaaagagccttctagtcatcaggaggatttaatggaggttcagaaagacctagagtcaaatcctgctctctcacttaatagccgaacaaccttggatggacaggagccttggatgacatctgagcttcagtttcctcatttgtaagatggacataatgtacctgtcttatttagttgttgtaattacaacatagtacagcccttcacacagtaagcatttaataagccttggctcacattcctgagaattttatctaaagtgcattattttaggaagtattccagtagtacaaatatttcagaatatacattgtacttatcccctgtctttaccaaatattaatctttttgccacatttgtttcagttatttaaagaagaaaatgctatagtattgtttttcagatttttaaataaatatctttctacaacttgcccttttcacacaacattgagatttatcaatgttaattacatgtctgctgtgttcactattataagcattgcttcagtgaataactgaatgagaccaggaatcatggaacctagcttttaggctcagttctgttactaataatgcctttaggcaagtcactagttctctatgccttcttttctgtggacctaacgtataaataatacacttcatgctactactgtcatcttcataaggcaatgctttcaaatcatcatctggaacagtgattctcaacccagggcaattttgcccccagaggacatttggcaaggtctggagacatttttggttgttacagctaggaggctgctactggcatctaatgggtagaaacccactacattataaacctactaaatgctaaacatcctaaaatgcacaggacagcctcctacaacaaagaattactctagcccaaaatgtcagtagtaccatggttcagagaccctggcctagaacatctgacccaagctttaggtaatcagctttaaaaggaaacttttgatagtctgtttttctattttagtgagagtactactttggatgcttttttgatgtaaacttttcttaatatattttgaccattccaagatgacttgatcttttttccttaattctgtatccttttcccatataaaaaatttacccaaattcaagaatataaacatgtagcaaatacatccaaatgcatataagatcttactaagagtatctgatgttggatacacatacagtagtagcaaagggacatcataattggcaaatttgttctttctctagaaatttatcaaattatgttgaagaccataaaacagaattagaattcagagtaccaaaattgacccatcaatctgacattgcctgttctccctcaggagattcttacataaacccaacgtgaaactaaaattctattattatccatctatcatttagtaagttttcttccccctaaatgagtttaaatcttatacatactttttttttctatatactaattactgaaaatacagaaaatttttatctagcaagtcagggtaaaagatattctaattcatgaaagagttacattcctaaatttcttgttcagaactgactcttaagcagttcccttcccactccaccttcttagtaatagacttttcaccagagaagttgcagtgagtcttaatatggtagatttaaaatatatgtgtaattgtttacatatatatctctctctacatgaaaaattgacttttctgtaggtcagaaatggtcaaatatgatctactttattcagttttatttacattattctatctgaaacatattagtacataagtgaggtagagagctcctgatttttttaaattgttaactaattattctactaccattttttaactcattactgatttaaaatgtcccccttatcatacactgtaaccttacttatagtaggatctaaatctgggatttcatttctatgccattgttctcatttgattttggcccagcaccatattgttttgaaccttgtagctttacagcagttttaagttactattctaagggcaaattaactcttctttttttctaagtgttttggcaactcatttctttatctttgcatacaaactcattaatttagggacaataacatctttgcccaggattttttgtaagtcaccttttaggtcctttggtcaagttttataaactatttccataggtatgcaatatttttgttactgttctacttgggcttttaaagacttaactttttactgatatatatgaaaacttatttgtttgattttctttttaagcatctttaaaatctggctttgtaactgaattctctatttctgatgattcttcacttgagattcttgagtttttttgggtaaccataattgtctgctagctcttgttttctaataattatagctttttacttttattgtcttttattgcataaatgcttaacagaatcctggccatccagtaaaatataaataaataagagcaatataattaatgcagtaaatcttatcaaaaatattattttacagaatataaaaattgcttccagaggtcagcaatttataactattactggtctagtccttaagtttaatatgcactggacagtatagtagccactaagtatgtgtggttattgagcacttgaaatgtggctagtccaaattgagatatgctgtaaataaaatacacacctaatttcaagaaaggtttcattaatcatcgcaaaactattgcatgttaaaacagtatgatgaactttttcagttaaataaaatgaaattaatttcacttttttttttttttttttacatttttaatgtggctactatatggcttacatatctgttggacagagctagtttagataatcacaagttgacttatctggttatttttcctatttgcttttattctgatatttcctaaaggtgcaagagtaggttgtctaagaatctacatatccagtgtgtgtttcaaaggaaagtttagagataacagcagagaaaacgcagtggacagtttgataatttttacacactgtaagctacatacttccaaacataaattattagatttattaaatattcagtcaatatgaatcttctcttggaacttgccagactatctccctcattctttacaaagatgtcagatggagcctgaagttttgttggagtcacctggatgacaccaacattctccagataccaattctgactctaggttgactgcttaattcatctctttttctgtcttcttaattttcttgctttcttgttcgttgtattgttgttgttttattttaaactttgttctcataccaaccctattaggaatttatgagaattacataactggacaaaggtttaaatctgacctaccttagggccacctgatatgatttttcagtcaataatagctaacatttattgggcatttattttaagcaaagggtaatttacacacattgtctcctttaaataaccaccttttacaaatgtggaaattaaagcttatagagattaaataacttactcaaggtcgtatactagcccacaaaatttgggttcaaacccaagtctaggttgagagctttgtctcaaatactgtactgtttgggttgatacatatatagatgaagtgtattgggttgtagacacctaatgggcaaggctttgtagtcattgaatgccctagaggtatgtttccgagtatgagccacacaaaaaattacagtgagaaaatgaggaagagaaagcagatgttggagaaggagatttctccttgtatagctgctcctttgatttgaagaaatctcagtaattttatccgctaaagagtgtgagagaatattgtttcatttaaaaatactttccacagtttcacttggtttcaccaatttcaattggttttaaatcattaggatgtctaagtaaactattgatttcttccacaggtctagtacattaggttcctctgctttaccttgccatctttaatgtttgtattcttttaaaattagctggtcctttataagtatgtaaatattgtagctagcaatgtgctgtttattaacaatacctgtttccactacttttttagggtcctggttgctgctctgatcttgcagtttcttttcactatgttgattctacaaccatgtatgagttagaatacctcgtttatcatcttcgtccatatggttatttatacagatatcaacctaccttacctgaacgtatactaaaggaaattagtcaagcaaacaaaaatgaagatacaaaagtgaagttaggaaatccttgaaagaaaatcatgaatgaacaaaggtaatatgtctagcactgcactgaaaaaggacttctgcatttctgacatagaacactggaatcccagtgaggaattctaagtgaacattccttatagaaacctttcacatgaatgactataaactgaagctttaaatgagctgtgaagtgtgttaaaatgtgttttgatacagtaatatataaatatgtctatatatatgaggaacttgtgttttttaaatggtggccaggtagaggaactagaaaagagattttgttgcctgttttctgaccatctgtgttattgtcactgagaaactaaaatagtaaatttactaaaactacactgcaccatgttagtaataaacagatctgccttaaagaaaagaaaattttagaaagaaatattgttgctcagtgttgttaatatagctcaagaattgagtttatatttgcagtatgctataaatgatacccccctaccacacccacacacacagtttttgtctaatgaaaatgttgctgtgattatttataattggtagtatttcttccagaagaagctaaaataagactggcacttaccctgaagtgcattaataaaaccacactttaaaattatcatgggccttgactatattatatacttgattctaattagtcatcttttacgcaatctctgttgtctcttttctaaatgtgtttagccactcttgaataccattctccactattaacattaatttactcaaaccgttcatagcattctgtaaacatgtattttacatatttgttcccaaatttgcccattgttcattatgggtaactaataataaatttaatgctgtttcaggatgcttttcttataacagtgccactctcaggaattactaagtgacattttaaattgatattttaaactctttccaactacatagttatggtttatttcattctcatcctgttgggatgagaacttgtttgtgcctttcataacttgtttaaagcagagttttaaaattagtttataggatctgaggtggctattagttacagtggcaagattatttagaaagcaagattttgatgagaattaaaaacaatagaaaatgtagagtgcttaaacaaaaatgttatattttgaaagagtagatacttaatttataaataacagtctgaaggttgatgctattttgggataattgttttgctaatggataattctaacaaygcagaatacctagtcaagactgtcatcaaaaacattcacaaatgtttcattctatttttagtgactctgtttaaagagtttctgaaaggaaagaaattttttatttttattatctttagcagtactgagtgtcatagcagaatattttacagactttctatgagattatttttatggtacaaagtatttacatttccctcatgtttatcattatgccaattttacrtggcagtcatgccactgactctgctatttagctaagtaatttcttttttcggagactgtctcactctgtctcccaggctggactgcagtggtgcgattctcctgcctcagcctcccgagtagcggggattacaggcacgcgctgccacgccccgccagttttcatatttttagtagagacagggttttgccgtgttggccaggctggtcttgaactcctgacctcaggtgatccacccaccttggcatcccaaagtgctgggattacgagcgtgagtcacagcacccggctaagtaatttctatttattgtgccaaaacatgtcaaaatcatgacctctttgaatggtatatttgagaggatrttcatttcattggttaaccatggactactctgtccacgtagtgaaaacatgcaccagtttttacctattatcatggtagtatcatctgccaaaatttcaaggcattcattttattctttgaacaactcttcaccatggtgtggacatgaattttcatatgtgttacttgactagaagtataaatggtttactatagatatccaaaaaccttgagatttgctcataggaaatgaatattgtgatgaatcctgggctctagagtcagacttgcttgggtttaaattcttgctctaacacttactgtttttgtaaccttgagcaattttaatctctctgtgtctcaatttcctcatcttttaattagggatgataatactacctacctcacaggatttttatgaggattaaataaatgtaaggtttttagaacattgatagggagcaataaatagaagattgtattattattctgttaccttggagtgtaagtactgcatttaagtgaatgaaaaatttgctttgaccagatactgaaggaaataagtaatagctagtatttatccaatgccaactgtatgctaggtactgtgcttagataatctgtgtataatagtgttaatcctcaaaatttgggtgttatacccctattatagataaggaaactgaggctcagagamaaagtaactttgtcactgtcacaaagctagtaagtaacagaggtaggatttatattcaaaaccctgtgtgttcattggaaccgtatcaggcttggggctattcatgtagcattatttccatttttatgtatatgatatatgacgtctgatgcattggccagtaatagtcaaattaacccagccaaattgtcacagtgattcttaaactgtggttctcacacttgcccaggatgttgttaaatgcagatctgaagaccccaatctcagaaattcaaatttaagcatggggcccaagagtatgcattcttaccagataccttgggcagtgactgtcaaaagtttggtcccaacaaacagcattaacgtcacctgggaacttgttggaaatgcagcctctctcggggcctcatctcagatcagatctactaaatcagatactctaggggcaggggcaggggcaggggctagcagttgtgtttaagcaaactctgcaggtgtctttcttatcctagtttgagaaccaatacccaacaacctacgtgattttggtgcaagtagtgtttgaaacacactgaagattactgcccwattactaagacatttttcaaaaagcatgttttaaatcagtgtagtccaggatcacactatattaaatataaagataacttaaaggatcattggatcattcattttggccaaatttttagcttctccaaagtgactaacatcagggcctacaataaaatctgtaattctccaagtttagtaattttatattgaggcaggaagggctcattaagtactaataagtacataatttattaaaaacatacataagtgtcatcaaaaaggtccacaattgttagtaaaaaaaattaaattgaagtagtaaatgctgttttataacatacatttttctgctaattcattctgttttgtgtgacctaataaagcaaaagaaaaataaaaaagcaattctccaagtacttcatagagcacataaaaccagatttcatgatgatgatgtattcactatcttttagattaagatctttgttatttggtaaatgatttcagtatggttttaaaacataaggcttttgatgtcttatgttctctaataatggtatgcttgtattttctagtgggaagttcatagataaagcagatttttgtcccagtttgctttcaaatataaatttcagagggctttttcttactgtaatgaggtatgaaaataaatcattgatcagctcttaatattttttgaatacagaattggatttgagcagtaaatttgctaactggttattttcacaattttcttgaatattaatttttcacttctttgagactgtcaaactatagttactaccaggttgatgcactgtacttgaaagaatcccttgattaaattacatctagcattttatttgccatttcaattttcagttcattagactataattctttgacagtttctgcctggtgtttattgcccttctttgtttgctttattactaacttccattttctagttactcttaaatgctgccttcacaaggttaatttggctgttaatagtgattagaatttttatcacttaattgataattttaagcctrctaactagggttccctatgaaattgaaagtaaaagtctaagaataatgcctgctggctctcgagatacttgccctacttaaaaatctataatttaaaattaattctatgtctacaattattaaaggaagtaaagttatttgggttcttccactcacccttttctcaaaaacaacaacaaaaaacaaaactcattttatttttctactttatagtaggcctgacagaaacatagtgaagcaatctgggaggcaacctgtggtagattttatgctaaatgttaatgtaacctctgttgattttttaaaaatgtgtttatatataagatttgaaataaaaactttaatacaggctagaataaggaattttacaaattctctttagagcaaccaacattaaagttttagagttgaattttgctctatttcaactcccttacctctctagttttcagtttatattaagttttaataactttgcggggccctgcaaattaataatctacatgaagtatattattagagggaaactaatcttactgctaagcagtgtgttgtactacatagtgaatgttcgtgttttkgaatttaaaaattatttaaggtaatggtgttaygaatggtttaaaaatgtctggtgacttgcttatttttaagtgatcaccattaagtcagaaaaatgtatttttaaatgtttcttgaagtgccttttgaacatttttaaacagcggatttaaataatgcataaaataaattgccatgttcaaagttgtttcatctgattatttttaaccaatataaaagttgtgagataaatgttgtcttttatgggtagtttggggttatttttccaaaagtttaaaattgttttcccatcaaagctatttagtttgaattggctttcataagttttactgcaatatatgtattatttactttaaagcaacaaaatattccacctctgactgagaataatatactgtaaaaaaattagaaacactgtagtctaggtaagtgtgtctagatgggtgggggtggaagaggggagagaatctcatatatttagagagagattgcttctgtgctccttggtatattttgatctatctcatacactgagaaattagtttattcaacaaatacttatgccaggcatctgctagaaatacagtggtgagcaagacatacaggatgtcttaattctagagttagaaaataagctagtagatgaataaacaaagtatttcatagagtggtattaggaaaataaaaatattatcagaacaattttctggatggggtattaaggaagactaggaagtaacatttgagcagagacttgaatgttgaataacagacattttatatacttcagaagttacttttatctatgaaattatttgctccaactatgtgttaaaaaaaaaaaaactttccacccttgcttaatcatgctgtaggtgtaagtgaaggcttactgaaatgtacactataggctaaaaaactttgtgtttttaggcatacttcatccagagctcaggtgtattgatagatttgtctgggagtttcagaatatgaataaaaatagacctagtattttatctctttctgggcaaacagttacaaattccataaggcccttgagtctagcctatatgtcttgatttttcagtaatctgctacccagtatgttattagcatgtgtgtgtgcacacgcaagcatgcatacacactgttatttggattagacagctttagaaaagctgaggagataaataccacttcatactactttagtagtagagttgtataatttaacatattcagacagctaaatattttccaaccagctgtactgataattgttaagtcattggaaagtagatatatttacctaaatatatacaattaaacctattttaagttttccaaaggtatgacttcatagtactggaaagcatacaagaagattcttgctgaatttatctccttgttaaagggaagtactctacagagctcaacatagtggtcgtcttaaagtctaataatgctgacaatatggattgttcaagggaaatttttttagtggttaagaatgaactaacatttaactactaaagttgaatgagttcagcaacattggcattctccagatgcatctgtattagtaaaacagaagtgaactttgttttgccatgagtttattactaattaacgcattttgtattgctgcctagaacttaaaactgtctctgtgttgcatttcttctacaaaatgtgctagtgtttcttgtattattatcaatattgcttttctccaggactgaaaatttgtccagggcattatatactttcttatatattgcccctgtatagtgcaggttaatacaacagcttactttgaaataacaaaatactcatattttaaaaaatgagattcaatcctagaacttaggctctttggcttttctaatgaatgcctagtgaaagattaacagtacttcatttctagaactgccgaatgatgtgctatcgtagaactaatttgggtacagtgtcttcatttttacaactaatcagtttttgactttcataagcttcaattttttttcatagaactacctaaactgcattgtctccccttctatacctctaacagttcattcttattaattttcttgtctaattgttagattgtggaaaggtggtgataaaatccagaacataggtttggaagagaagtaatatgcaacttttcctttagttctacacatgactctcttccttgtttttatactttttggtggggtgtgggtaggtgagtgtgggtatgtatatgtcagagacaaagaaaaaggatggttatgattatattttaataactggatttttaatgtaattgaagtattaaaaccactgcattttcatgttgattaggtttatataataagtggtttatttgatgaagtgaaggtaactatgtgtttagaataattggccacagatataattcctgatttttaaagtaatttttacaaacctacttgcctgacggaatttctctcttttttggcctttgaatttatagctcttggaaccttctcctactcatctctcattccatgtttttttcttttaccctttctttttcttctgattggcagcagcaagtctttagtttcttaagactttttattgcccccattctttttttttttttttaagtagggacagggtcatattgtgttgcccaggctggtctttaaacagtttggcctcccagagtgttgggattatatgcatgagccaccatgcccggctgcctctattttctatcaaaatggatgtgtttaagactttttaaaaaattgtgtatcttttgtgaacctcagttccctctcaccagcctagaagttgctgaaagaaagaagagatagcactcaaagaatcgatgcccacattatcctgcagtttcctctttcttaaggaaatgtttccttctagaacctactcagtgaaaatatgggtgcttaaatacctgaaaaccagtggggagaaaaacttaatctttatagataaaagatttcagtgttcagtattaaggcagtcctctctcacatcttaaaaatggtcactatgacctgttgaataaaatgaatataacctcagattatgtgaccttccacagcctgacctagcatgtattccctttttaaaaaattgctattccttacctaaacgccagacaatttagctccaaatcatttaaccaacatttgagtgcctactaaaagtattgagctagataatagggataaagtggcaaattatatttgttgctgtcaaggaactcaccttctattagaagcaaagtacccaaaaaagtagttgtgtgcagtagagttatactctcaggcagtgtgctaattgttttacattgcattatcccatgtaattcttactacaatcctggtggatggattatactatccactgtttcaggcttctactggggatcttggtatgtatccccccgtggttaagggggaactactgtattttgttaacctccagcactttacacaaaaggggaactgaaagtaccagatgctacatagaagaaagaatggagtgtgtgaagcaagagactcttctcgaaaggggccatttaaatcatttcatttccatatgcagccataaccatgtaaaaacttccatccacatcattcaatggcttttatactcttaattcatattgctaagaaaacttctggcttattcttcttgttaaagtttatgaagtgtcctgatatggaggggggaaaatgccatttctatgacataagcccattaacccacccaagttgtcagaatcaagaggaggtgtttgagaaattgtttcctctttttaaacatttaacatttttcttttgtgttagtttttcttcaaaacgtacaaaaaagtacgcatcattgtatcttgtgtatttactaccagcttttactagataagtcatctttccattgaaaaagtgataagctccattattttaaaaaaaacttaaacattcattgcagatgaccatttcaaagatgaaaatttttaaaggaccccaaaccccaccaccccccaaagtaattccaattaatgcataaatataaattggataggaagctaaatagatagaaatggttttattaaagtgagatcgtgtaacaaatgctaattttaacattataatttcaaaaaaatacagttgctcttgatgtggccaaaatctgcaaattgtcctgggggcagggagaggggaatgtcatcttagcagcaacaaaattgagtgatttctttgggagggggagatggagagaggaagaacggactggacttaggcttctctgtagcaacattcagtgctaaagcagagtgaagcaaactctaccagattcttgggggaggaagaagccaagtgatttcaaatggaagggtaaattgaaagagtgagggtggacacttcttgaaaaatctagatgatgaagcccatctaaagagataaatggacaaacattgagaacaggactggtggtggttaattatttaactatgtagctatagaattatttaaataaggctatagaagcatattgaaatgttataaatcttgatatagaaaagatgattaacaagttagaaaatagaatatcaaagacgaggtaatatatacatgccctaattggttttacttttcagaatagaaattttgtaaaattgataatatatcaagaaatagggatgtaatattctgaatagttatgaaggtaatcaccaaaactgtaagcctgataactattaaaatgaaaacacaaaattaaagataacacaggccatataagagagctaaagggagaatttaaaatagatgacagaattaagaccaaacatagatatgatgtcaaataaggaaaaatatgatttaacttataaatgtatgaatatacaaaaactgttggcagtacctttggggaagggtactaggattggaaagaaattcaataattcactgttttcctttttgaacttttaaaaaatcatgtttatactgtcacagtttagagaagtaaagtgggaaaaaaaagctgttggccctggctccctagggtttttacaaccagtggtgaagaatgtccacagacattcttaagcagcagtagaggtaagcaggtacacacatgagctggaaagatctcaaagctgatttggattcttttatcttgccataagaaattactttcttcaatcaagggtataaagactgctgaactagttcataatgagggtagatgaaggaggtatccatcttcaagagtggtaaatagttgacccatacaaaggaccagcagcctcatgtggacccgtcttagcatccttctctccttctactccaagggtgaagagtactcggaagttactatttattctcaaatccttgtgtcagattattttcatatctttcttagatctgttctggcttaagtcttattctcttattcatggaaatagaagacactgagccctttcccacataaaaatataggactactgatttctagagcttaaagatgttctaacgcctcgtttgaaagattcagaaacagatctagagatgttaaagtttagaaaaatgacacaaataatgccagaagtggcaacagaactcaattttcctgactcccaggttagtggtctttgtactaaatgcaatttcttatcttccctgaacaacctgagctatgtactttaacaaaattttttgtgggtacatagtaggtgtacgtatttatagggttcatgagacactttgatacagccatgcaacaagtaataatcacatcatagaaaatggagtatccatcccctcaaatatttatcctttgtgttacaaacaatccaattatactcttttagttatttttaaatacacaattaaattattgactatagtcaccctattgtgctatcaaatactagatcttattcattctttctgtttttctttgacccattgtactgctagatagaactcacatatttggtccctgccttttcccaccatttgcaaatagattctaggaacgatcctaatagttgccaggcactgttatcagagatcaaatctgtcttgtttccaattgtgcctgggacataataggatttttttttttaaataacaaagccatgtgtagtgctgcatgcctgttgtcctagctaccc

SEQ ID NO: 97122 - DNA, 13426 bp, Homo sapiens
ggcccaacacagataagtaaactttcttaaaatattatgagagtttttggaatttttttagctcatcagctatcgttagtgttatatttattgttagtgtttcatatttagtcactaccagagtaagttttctaattttttatttcccatgatttcaataaatcattttttatgatagcattatgcttatttctactttgtttccatctaggttcttcctaatttctgctgtttcattgtaggtcatttctgtatctaatttcatttgcttatatataaaagtgtttaagtttctttgaattattgtcatctgacttgggaagacctattttattgtgtcttttttcctttataatctttgaagttgaagaaatacttgaacaagcagactacctgtatgaaagcggagaaacagaaaaactttatcagttgctaacccaatacaaggaaaggtaagcaatgtaggataggcctaggcttgtggtttcctcaaaatttttgttatttaacaattaaaatgacccttagtgcttgaggttttaaaaattgattattgtagtttttacttcaaaatatttcttagagtttaatttataatatactatttgtttcttacgttaaatgctgcatgtatctcattgatttagaaaaggtgttactactttagtggaatgttgaaattttttttgatttttccattttgctttagatgatacaagatagttattgaatatatgtttatcccttctagctatattgtatatttctcattgtttttcttttaaagtaactttttattggtatagattaaatgaattcactgagatgtaggatgttgcatgccaccattgagtggtaactgtgtattactttagaaggatagtctttcagagaaaccaaaaataccccctttttctatttttattattagattgtatgtttagtgtagaatatcagtgtgtactcatttttgggaggagtgtggagcgagagaaagactcaaccctatgaagtaagtcatatggctaaatagcatttctagatcactaatctacctcatctcctaaactaaaaatattgagtcattttcatctgccttttttagattttcaaaaccagttttctccccaggacccatcaattttactttctaaatatctacaggattgatcttttcttctccattcttcccttagtaattcaaggtggctggtttggcattttattgtcatttcattgataacttgaaaaataagctgtaaggtagttactccatattcattgaatgataactatcttaattaaaggaagctttagcttcaaatttttttttatgttaaaaaaataaagttaggattaaaggcaaacatttaataaaaaagaatttattatttattttattttattttatttttttgagacagttttgctcttgttgtccaagctggagtgcaatggcgcaatcttggctcactgcaacctctaccctccaggttcaagcgattcttctggctcagcctcccgagtagctgggattacagacatgtgccaccacacccggctaattttgtatttttagtacatgttgatcaggctggttttgaactcctgacctcaggtgatctgcccgccttggcctcccaaagtcctgggattacaggcgtgagccactgtgcctggcggaatttaatttttacaattatttctgtcagttgtggtggttaataatttattaaccatttcttatgtcattatatggaaatggcagttcttcaaagaatccaatgctcttacttgaagtaacccatgcatcatggcatggtattcaaacataggatttattttgagattacattatattcaaccattcattcattagcaaataattgtcaaaaactattttgtgtcaggtgctgtatttgagactagggattcagcagttttgtatttttagaacatgaccctgtctataaaatttatgtattttatgatactgtatgaactactgagtgagttatttgaaacacagtgccagtgaggccaaacctcaagttaatatgttgagttttgtagggcaaatgttcagagaatttgaatgcaaagatatttttgaaagaagtattttagatactagaggtaagttaatatttatggatattagacatttttataggaaattttagcaagtaaaggttttatattaaagaaaataataaatttagcattattactaatggcttttgatatcatgttgctagcttcctaagctgaaagaccataatgtattcattagtaatgtaacccttaacaatttttaaatgtgagctaaaatggttgttttatattttatttcaaattagtgaagatgcagagttactgtggcgtttggcacgggcatcacgtgatgtagctcagcttagcagaacctcagaagaggagaaaaagctattggtgtatgaagccctagagtatgcaaaaagagcactagaaaaaaatgaatcaagttttgcatctcataaggtgagttgcttaactaagctattaaccatgtactgagaggtacattttctatatttttctattatctctgatttacattggaagaacaatttctctattttaagtttttttttctttttattcaatcttatatcttaaggataatttctctattttaaagaagtagggaagatagttatttttataagtttttcaaaaagaagtctttgtttttgtaaacatttggtctaacttcatatgtatttgataaattacttttgtgaatgcttatttttaaacaggagtttagtaatttcatgaattacctatatctatattcttagtagtataagcacttcacagatgttttctcattttccttacgttatatttctgttttatttagaggtaggaatataacagctagacaactgagacctagaatgacttttcacatgtaacttagctgctttcaggatttcttgttggttcacaacaacgtttttcagtaaatcgtacggggagacgaggtggtcattagccttctggattgttggacttcatagaacccaaaggcagggtgaagttggaccttgggaaacaattggcttgattgctccgaggcttcattaattgtttctctactctgctgttacctgaaaatctttttcattgcagacattttttttctccttatcctaagtcttgtgactttccacagcacctgggtttttgaagtgtggctattttagattcatttcttgggaaagaaactcaggtcatctcagtttgggtctgccgtccaactgtggctgtggagacaaggtcacagttgacattgtggctgttcttactataacaatgcaatgtgagagtagatggaactccaagaaaagagaatgagaaaataaaacattcaattacatattcttctaaattgatactcagaccataaacatgaaccattatctcattgtgttggtaactttcttggaaaattcaccactttctaccttgtattatagttctctataaacatgtcctatccctgaggtttttttgttttgttttgttttgttttagacatagtctcattctgttgtccaggctggagtacagtggtgtgatcttggctcactgcaacctccatctcccgggttcaagtgattcttctgcctcagcctcccaagtagctgggattacaggcacatgctaccatgcccagctaatttttgtatttttagtagagataaggtttcaccatgttggccagggcctcaaactcctgacctcaggtgatccatccacctcggcctcccaaagtactgttacaggcgtgagccactgcgcccaaccctattcctgagtttctagagggccatgtccacttctctttatatattccattacatttaatacagtttttatgctcagtaactttttgttggatgagaatgactattgaagaatattatacagttttaccttgtattgaatggaatattaagaatattattgttcttacacttttttaaattttcagtggtatgcaatctgtcttagtgatgttggagattatgaaggcatcaaggctaaaattgcaaatgcatatatcatcaaggagcattttgaggtactgatgaattattcaaattcatgaattttaaaagtcatatttttctgaatagatttttgttttcattatctattgctgtatatcaaaccacctatgataacagtggagtagagccatgacagtttgttatttcttttttttttttttttttgagacggagtttcgctcttgtcatccgggctagagtgcaatggtgctatctcagctcactacaacctccgcctcccgggttcaagcaattttcctgcctcagcctcccgagtagctgggattacaggggcacaccaccacatctggctaatttttgtgtttttagtagaggtgtggtttcaccattttggccaggctggtctcaaactcctgacatcaggtgatccacctgcctcggcctttcaaagtgctgggattataggtgtgagccactgtgcccagccgacagtttgttatttcttgcaattctttgggttaactgagcgcagtggcacttctacattgcttggtatagctggggtcatttagacagctgcattcacctgggccctcagctgagactacagtgtccaagatggcctcttacctatgagagtttctcctcacttgtttttttatcacttagttgtctagctcaaccttcattatagcatggtagtcggcttccaagaatgagtgttccatgggaaaagatccaatgtacaaagttctagcaagcctctgcttgcatcacacttggtaatatcctgttaatctaaacaagtcacaagggcaagcccagtttctgtgggaggggagcattgacacaagttcctgaatatggaaagcgtggtccagtgtaacagtctttaacacaattgacacaccactccttgtagtaataattctatttaagattgatatctgtgtgtatattgtatgtgtgttttattaaaaatattttcccctaaagttaattatttatagtaagctgttaggtgcaaagaattgcataggagtctgtatatttcttaacatggatgaacttcattgtctcaaaaaaaaaaaaaaaactaccacaaaaataccagcatatttatttctcttttgagattataggaaggaaaaatgatggaaacatacatagggatagtgctgaatttgctatttaaatagtttttcataattttatggtttagtgtcaattcctagtttatataacaactagtgaaaaagaatgactgggagtccagagacctagcttttcttgttcaggtatggatagtaatatatacataataactgacattttataatgtaacaatttacctgtttcacagtttaaaatccttgaaatgagattacatgatgtaattgctggaaccttacattgtagttggcagtgatactttctttcttagtggcacataaactaatggtgtgtcatttttgatattttagattcagggaaatacagtaattttctcagtggcattagataaattgcttaatttctctgtgcctcaggatgtagaaatacatgacataacttccaaagggaataatgaagaactgtagaaaatacacaaatgtatactttccatttttttaaaaaacagtgaaggttatagattataaaaaactatgttttatataagctttcaaatgtacatgtttatattttaaatggcaatatttagtatttacatataaaaaagatcatttatactgcttacatttcaaattccattatatatctaaagtggtaacatctttggattatttttgaaagaccagtggcaggaaggattgattataaaagagtttgcttgaaagtacccctctcaacccttctcataagaaaattaaacccgggcctgggcggctgcctccacgatgccactgctcatcgaggggcagcgagtgcggctgccacagtccgccggggacctcgtccgagcccacctgcctctggaggaaacagccagatgtatcagaggtcagtctgttcaacaactgggaccccagggccttctgtatgttcagcaaagagagctcgcagtgacctccccaaaggatggctccgtctccattttgggttctgataatgccactacttgtcacattggggtcctgttgcacacaggttatggsgccacctgcttgacacattgtgatggaaccgacaccaaagctggggtccccttgatcatgaactccataaagtctttttccgactgcgctcaatgtggaagcctggaagtatacctcgtgggaggcttcagtgatgtgggaggcagttgtcacaaaaactcactcattaacttcttagtgaatttgacaggcaagaagatgacattcacttagtgatactatgattatgtgtgacagaattaaatgaccaggaagaaaacgaataacactttctaataatatatggcattgctgtcaacttaagactgcaaagatttacagagcctcctttcttttttttgtttgagacagagtctcctctgttgcccaggctggggtgcagtggtgtgatctcggcttactgcagcctctgcttccagggttcaagtgattctcctgcctcagcctcccaagtagctgggattacaggcgcccactgccacacctggctaatttttatatttttagtagagacagcgtttcaccatgttggccaggctggtctcaaactcctgacctcaagtgatctgcccacctcagcctcccaaaatgctgagattacaggcataagccaccgtgcctggcctacagagcctcctttcaagatcgaggtccagaggagcagctgcgtgccgcgtgagctttagcaggaggaccagtgattagcatttacgatgcaaagacagaacaacttcgtataggactgtactcctggacaccatttccacatgtggatttctgcttgcagcaagatgacaagcaaatactagagaatctttccacttcgtgtctggccaagccaccccactttgttgaacatattagatctaccttgatgtttttaaaaaaaaatactgctccaactaacacactgtttcctggaaataaagccctactctacaaaaaaaatgaagatggcttgtgggaaaagatctcttctccaggaagctaaaaaaataggaattaccaaagaaagcagaaccttcttggcctgacagagaccattggtggggccagcaagaatccaaatttggaacctacatccattgggtcttargtcttctccttccttcctcagtgtttttcaaatgactttcaaaataaaaccttattttggcaaaggcaaaaaaaaaaaaaaaaaaggaaaattaattaaaccctgatccccccaggcatccattgtgatgaattaacttccttcctatgcatctagaatgggactacagtatttctgtatcattcttaggaaatagaaaaaaatagttacttacacaatttttttgtagggcttaatttttagtggaactcccaattgagaaaggttgcttagagcataagttgcatataaacatgttaagatacttatttattttttaccacaaccttatgagttaagtacatgacttttccataaaagagaaaaaactcagttgtggtaagaatatagatcttgcaaccagttcaaggtcattaagctgtgacttgaatcctggcagtctggtttcagagaccatgctcttaaccattacaaatatttgaaaatgtgtacctcacacattactaaactgaaagcaaaagtgtgggtttatagaaaagcataaactaggaaatcttaattttttcaaaaagagtccttttaatatgaacattaatctgtaagatttctttagttgttttcaacaaaataatggataaaaggaggaacagtttctttattctgtagtttatattcacatagtaaatataaattagggagattcaacatattttacattgcacataattattctattaatattctataaactgtttatttttcctttggtaagtacagatggggaagttgaacaaaatctgcatacaagaagactttctaaaaatagaaaagactttctaaaatctgcatagaagagactttctaaaattacattttttctaaaaaactaaaatgcacttttcttctttaggaaagaatgacttttattcagtattcatctacagtttgccaagaaagtacttccttatccatttttcctttaatttggaagaaacattaagagctatagattaatttgcaagattaatttgcaaaattaatccatttatgtatttcatgttttttctcatcttgatagacacttactataaatgtctgaaccatacaaaatagtaacattagtataagtcattaatagtgttttgaaatgaatttaatcaaagaatcaggaggaagaaagttgatattataatgggagaactgaaacacacagttgcattttttaaaaaatcatggcttcttcagcaaacacagtaaagcacttattggtgtttagaaaacaaatatgatttatttttctcatttcttgttagaaagcaattgaactgaaccctaaagatgctacttcaattcaccttatgggtatttggtaagaaaatttctttaaatatttcagtagtatttagtgtgatattttgtagtatgtataaatatcttcttttgcatatataaaagatattaaatattttaaaatattatctgacagagcttagagtgctaaatccattaactagcccttgtatatatattgttagaacatactaaatttgattatgaccatgttaaacattgttattcaggtcatttagaaacatgtacagactgaaaagactattcttatttaccatgctaaatgaaattagattaatgtaactatagtaaaacagtagaatgccccaagagggtctttgtatcttcaaagtgtgtcagatacagtcttgattaatctgaggaaccatataatctgattttcagtatctttctatttttatgtgatcttatgtccactgtagattattattttgctggtatgaggctttatcaaagtgttacgtacttgatggtttaagagtctgttttgagatagatgggacactcttttgagtatagcctgcagagctgaatatttactgccatctaagaagggtaccagtgtaaactgtcctgtatcaaactcttttaaaagagaaatatattcttcaggataaaggacatattaagctaacactcattcactgaggattaatgataattgaggggcagtcactaagtcagatgctagtaagcaaacccaaatgaaatagcaatttctgccttaaggacttcagaccctagtcaaagatgcaacactttctttcctacttatttctgaaagttgtaaagatctttggaggttaatcatttgctttgctgctttaaaaatagatttaagttgttggttgctgttatttatacatttgatgtttagctttgtcatttttcttgtgtaaggtttaacttctctgagtttttcttataagaaaaataggggaaattatcctatctcatatataattgttacaaggaataaatgagagaatcaacccactacctggcacaatgcactcagtggtagatgtatattatattactgttattagtatgactgcttactatttatatttaatcacaaaatacaccccccagctaaaggatcactatgtcaatctctggattacctagtagatatcatgtaaagcacaagttgtttaaacatacagtagaagattccttttatagtattaagatgcttagttaactttaagagaaaagaaggtacaatttgaatgtataaaattgttttatttccctgtaggtgctatacatttgccgaaatgccttggtatcaaagaagaattgctaaaatgctgtttgcaactcctcctagttccacctatgagaaggtagtatgatgtcctttgttaagttagtacggatttcttaaccacagcgccattctaccatgtgttcacacatgtggagctctgattcagtgagggacttgagcaatttctaatgatccaattcaactgtgttatcacaaggcttaacacttattatccttgactggtgagtggttttctttttccccgttaggtgagtggctggtaattctggaatactgtcatctaaaatggctcgtggctaaaatctaccttcattttctgtttgaaatctaaactatattgaagtcataaaatagaacaagaaatacagcatctgttacccagcatgttttagctgtattacacacaataacagaaaagtaaagcagatgcttaagttgataaaagaagaacactcattataacttctattttaaaaagcatatgaaaggttcatattctctcatattttcaaggccttttgcttttcttgttaaaaataagatttgagaggaatttctggttaaactttgggtttactcatcacaagcttttcagagtaagaaaacaggcaatcgaaaaagctgtacttgtattatttacattataacaaggagcttttttttctttctgggaagctatagtgtagaaattgatgtaaaaaatacttagttgtattctttacacacagttgagaaatattattaaaataatgcaccaatattttataatggtattattaaaataatgcccatttgctggacacggtggctcatgcctgtaatgccagcattttggaaggccaaggttggtggatcagttgagcctgggagtttgagaccagcctgggcaacgtggcaaaacctctgcaaaaaaaatacaaaaattagccaggtgtggtggcctgtgcctgtagtcccagtcactcagctaagctgagggagaaggatcacttgagcctgggaggtcaaggctgcaataaacagtgattgcgctacagcattccagcctgggcaacagagtgagacctggttctttttttttttttttaagacaggtcattttaaggacaaaaaatatagtcagctctactttatcaaattagttatgtttctagaaatcaaatgtcattagagaatgcattacaaaaacagtagcttaagtaggacaaaaagagtttcagacttaacattgtatgtaggaatttcaataataatggactcttaaaaattcactagtacaacgaataaattcagcttttgattatattttgtttttactaaaaatcactagttatgatttaagagaactgtcaaaatagctgagttacacgtgataatgttctttcctttctgcacatgatgttagtttggtacaagttctaaacagcaaccaagttattaccagaagtagtccatatattgtaatcttgatgattgaagtgttacgttcactttgggtgttaactctcactgttgaagaagtgaccattattttaagatgatttacttcctgacttaaatataatatagcagtagatctttgagacaatgcttttttaatattgtcttctttaatcttttttattatgtttgggctctttgtttttgacaggccttaggctactttcacagggcagaacaaggtaaggtatttttgattacacatattaatatagttaaaattgtatgaatgctgaatatatactataatagcaatgtctaaagcagttgtttattctgttatacttatttttgtgctagatactgtaaaacaatttttaaagtctttattcagtaaagatcacctgaatgagaaataggctgctattgaacttagagctgcagttctggaatgtctatcatttgatgtaattctgcttcctttgtgagagcagtctctgacatggtaattgtcttattcaagactgcacatattggccagatgtggtggctaacacttgtaatcccagcactttggaaggccaaggcagaaggatcacttgaacccaggagtttgagaccagcctgggcaacatagcgagacctcatctctaccaaaaaataaaaataaaaattagccaggtgtggtagcacacacctgtagtcccagctactcaggaggctgaggcaggaaggtcacttgagcccaggagttccaggctacaatgagctgtgattgcaccactgcactacagcctgggccacagagtgagacttgtctgaaaaaaacaaaaaaagattatgcatctcattagaggcatttaaatgggaattctgctattcagccaggctagttctattgcagatattgtgaaaaagagtttcgggttatgtttgttttgaaaaaatgactagtcctatgaaactgccaccagcccatcctaaatttatcctttttaatattcatacaccaagtgggggagataagagacataagcatatgataccaaatagaccataaaaaccattgaaatatattctataaaacttaatcaggagaagacataccatgtttattaaatttgagatcccacacataatggacttgttcatttcatgataacagttatcttctacagaattttatctgaatgttttatctctgtaattcatcaattctgatttattcattattaccttcactgataccctctcttgatcatactgtttcacatatcatgaatatgaatctagggatgactttttttaacagatttaaaagttaattacaaagtaaaaatataggaccttagagacttaagggttgggggtgttgagaaaaacatggtcctaccctcatggagctaaaataatccctggtaacttcagtcattcttgagtgaccttaccttatttctttctggcctatattcagttcagaggctcctctgatgcccttagtatcttttatttttccagtgatacttatcactcaatactatgaacatttacatgtgtaagactgtacattctgagaagatgtggactttgtcttttctggctcacaattgcacactcattacttggcacaatgcttggcaaatctgttgaatgactgagtaaatagatgaatgatcggatgattgaatatacgaatatatttaaccccaggacaacttaagtatatcaacatggcatcacacaaatctgctcaaataaaagaagtaaaacaattttggttaaggagcaaatggagttaatcattaattgtatacaggaaaaagtatgctttgaatacagaggatctcagattgttagggggacactttgtgaagaattaagttggtgagataattccatgttttcattcataggctttctgtttatgcttttctttcagccaagaatgttctccacttttttt

SEQ ID NO: 97123 - DNA, 14472 bp, Homo sapiens
atagtagcatgatttataatcctttgggtatgtacccagtaatgggatcactactgaatcaaatggcatttctagtactagaggaataccttgaggaatcaccacactgtcttccacaatggttgaactaatttacactcccaccaccagtgtaaaagcattcctatttctccacatcctctccagcatctgttgtttcctgatttttaatgatcgccattctaactgctgtgagatagtatctcattgtggttttgatttgcatttctctgatgaccagtgatgatgagcattttttatgtgtctgttggctgcataaatgtcttcttttgagaagtgtctgttcatatcctttgcccactttttgatagggttgtttgattttttcttacaaatatgtttaagttctttgtagattctggatattagccctttgtcagatgggtagattgcaaaatttttctcccattctgtcggttgcctgttcactctgatgatagtttcttttgctgtgcagaagctctttagtttagttagatcccatttgtctattttggctttcgttgccattgcttttggtgttttagtcatgaagtctttgggcctgagcttttctgctgatacatcaacaaaacatcactgctttttgcataaaacttcctgggcttttgagtcctttccaccacccttgttattcctcagagcatactgctttcagggagatggtatcaatccccctatgttcagaatgagaatccagcagggaatgggtcagggaacttctgggtgatcactcactcccatatcccattagagtttgggagtgggggtctggcttagcctgcactgtggggccaggtatgcagcacactccaggtactgcccagcagcagctgcttctgctttacttggttcatttcccacacgtccctgtggtttgtctgattggggatctcttgtctttgcaggttgctttcacaaccaaaatttatcaccctaatatcaacagcaatggcagcatctgccttgatatcctgcggtctcagtggtctccagcgttgactgtgtcaaaaggtagagatgctgatggcatgctctgtgtgctcttttacacatgtttttaccccagcactgactgagtggaaatggaagctcagagaaagaagtcacctttcccaggtcacatagccctgtccactgctgtgcccttaagtggatatccttacacgcctacgaggcagcaccagcagaactttgtgccccgctccctggcgcttctcagcagtcaattgccctggtgtgctcaagactgtcacatgggtgcaagaagaaaatactgattctacttatatttttttatccaaaaataagaaaggcaaatattacattaccttctctgttccctcatttattcatctaataagcacaaaacggactgtgagtcagccctgaaggaagatacagggcatgcctccgggggcctcgaagttggtggagaaatcctcccttcccaaaataaatgatgttgagcacatgtctttggttgaagttgaagaaaccagtctaaactgagcttagaaatgcagatattccttctgaattaagatgggctgtgcatgggctatgtatgcacgagagacctgaatgtagatggtgcagtatcctggcaggtggagcgtgggaggatggtgaaaaatcaacccaagagaaacagagcctggcctaaattttaaatttttctgtagaggagacagggtctcactttgttgcccaggccattctcaaactcctggcctcaagcagtcctcccattgtggcctcccaaagcactgggattataggcgtgagccactgtgcccagccaagtatcttaagaaaggcaaacctgcccctgtcatttgtagctttatgtgtggggacctgtggtcagaactttgatggactcactgaatccagtttgtttggaatcatatggtgagtcgaaagcaaagccaggaatgaaagtgtgcatttctctctgggaccccaagaatccaggcaccacaattccttctgctcctcaccacagccctagtgggtgattcccttcccctagggttgctgagagccacattgagtgcacatcttagagacggtgctggcacagaggaggatgcatctgctttgcagttagaaggacctggttcagaatttctttattttttttttgagatcgagttttgctcttgttgcccagggtggagtgcaatggcgcgatctcggctcactgcaacctccacctcccaggttcaagagattctcctgcctcagcctcctgagtagctgggattacaagcatgcaccactatgcctggctaattttgtatttttttagtagagacagggtttctccatgttggtcaggctggtcttgaactcccgacctcaggtgatctgcctgcctcggcctcccaaagtgctgggattacaggcaagagccaccgcacctggtccagaatctcattttaatccatttattgggtgttccaagtctgtgaccttggacaagttacttgaatgctctgaattcttgtttccttaacagtaaacaggactcctaggactaaatgccagaggttcatgatgtagggtacagacaaggatgggagggcagttggagactaagatggggtgcttcagtggagaaggggaatgagaaccaggatgcacccaggagggaagtatcctagcacagcatgcctcaggccacacagtgaggaccacctcggctgatacatgggacggggcaagtggtgcatcaagcaatttagattgggctgttgaagggaagacaactgcttggtcaaaatacagagtgcaagttcagggaagtttacccaggggtgacccagcagcttcgtggctacagctgaccaaccttttcttttcttcccagttctcttgtccatctgctcgctgctctgcgaccccaaccccgatgaccccctggtgccagagatagcacacacctacaaggccgacagagagaagtacgtgtcctctttgggttgcctttgcaccatggctgccccaggcagctccatgcagtacctgtgctctgagctggtgcttctaggctgcaggttcccacagacatcttcctgcccatgctgagccatgtgcacagagggtgtgccctgggcttggactcctggctctctcactaacatgtcctttgagtctaaggagggaaaaggagataaaagcagttcccctcctggataactcattagctgctgctactgtatatgaaaacattgccaagccctgccctcaagaccagcaaaatcagtggtcagccaagaacagactcagaagaatctgacaacaagaaaaattctgatttaaattctagggtttatagcctaagacaaggggatgtctgcttggctataccgaaggtgaggctgagggcagtcaaggtgggaaacactgctgtggtcagttcgctggctcagctcagaagtcagcagtgtgttagaccttcattgccagctctctgtttaaacaccaattaacagacccagaattgtaaaattccgaccccctaggccaggcacaaccacatgcactgtagcatgagggtgtctgtagttggtggggcaggcacaaggagtcatcgccaagtgttagtctctcagtgctgacagcactgtgaaagaggcccaggtgtggcaggggccgcagtccagtgagtggtgtgaatctcagttgtggaccttcagggaaggtattgctagcccttttaaaagacatcttcagtgagtgcattcttcagttcattactcattacttcttttctgtctgaagagattagaatagagtatgtttttcccttttttttttgagacaaggtctcattctgttgcccagtctgaagtgcagtggtgtgatcacagcttactgcagcctcgatcttccaggctcaacctatcctcctgcctcagcctcctgagtagctgggactacaggcgtgtcccaccacacctggctaattttttgtagagacagggttttgccatgttgcccaggctggtcttaaactcctggactcgagcaatctgcccacctaggccacccaaagtgctgggattataggcgtgagccaccacactcagccacatgtttttttcaaattatatttttcttaagacctttatagatcttattatttccctcattggagttttctcaataacagtcaaaatttttaattgactgggtttgtttattttaacactttttacaagatattttagacataccaaaagtgattttttttcagtgcctcttgtaactataaatctctctaatttatagtctcatagcatcaagtgtcattacaatgatgagagtaagtgcacacacctgcatagtcttcaatggatgcctggcctgctccatgtgctttacatacagacttctctagtttccccacaagcacacaaggcagatactttccccatggcaagcaatcaaaaaagccaggacacagaggggcggaacagctgctgaggactgtactgatgcacaccccggtaggcagattcccaagcccttgttctggagtttgtgtgctggacggcctgtaactagtacaaactgacctttgtgtgtctcttctctgtcctccctgcatccatattgtaggacaggagaaagaaagggaggaagtctgttgcattattaaatcttccacagcagatagttatggagaatcaacagtttggggtttacacatgaggggttcacccagctgggggtttacagccatgtctgatgtgctcctgctccagggaaagcctttattccactcacccatcagccgtagatgtttgacaagcagcagcagcagcattccccacatcagtcctgttctctgcagcacattgaagggaagtgaccatttcaagtgagggtgtcacttcctctgcttttttattccaggtacaacagactagcaagagagtggacacaaaaatatgctatgtaagtgccttggaggttttacatgagacactgtccaagagaagctggcagagaggtcttcccttaaaactttgggctgttggctgagccattcaaagagcatcatctgttcttcaaacaaatgttggtcacccactctctccagctgcagcatgttggtgccattttcagcaattacggctttgacagtgccacctctttgatgccaaatcagcaaccattgttgttatgatctgcagtcttcctggtgacactggaatctctctctctgccgcctcagtttgtctgctggtctcttggggggccaggccctgcacgtctctcctacccggcctcaaatggtgctgctgcccatgatggtaccacaccagggcctcagcctggcccctcaccacataccctttgccttttagaactcagtgccatcctgggtgcccagggcagagcaggctttgttcgcacctcatctgctgcagaaccacatcctgaggagtctcagcttatcctggagggaattgggaacagtgtcactgggaagtgaaggcctagccctgtggcttccaccagtctcctcctgcagtgccacgtggtggcatttctcgcctcacaccaagaagcagcaagtggaaaatttcaggatacaaagcacataacaccccataagagatgattatgtttttagaagcaagagcaaaattatgaaacctctagagatttgggtcatgttactccatttgatgaagattctcactaccgcccgctcctcccataggagcctacactaagtccaagtgtgagccattcacagactagaacacaaggagggagagagactcttaaacgtaaataaaaatgcaattcactcacaactctaaatgataattgacatttcagcctctttcttttaggcaaaacagaagatacacactattaacagttatttgaagccttaaattacaatagcctgttaggtgatcggctttctgccttggctttctgatgcagcacattttaagatttgcctttaaagctttgagccttgagattaggttagttaggaagaggacaacaaagggaagagattattctaataaaacttccacagagggaagaaaattgaggagcttcagatctctaaagccaaattcaacctgatctttctaggttggttataaagctggtccacttccaggaagtgatgtgtaggtgaataggaacaaaaggtgaagaagcagtaaaactgtgaccaagtggccagatggggcttttgccggctgattgaaaggaagtctacagacctaacataagcagtcagccaaaggtggctgtgggaggttgatttcttccagaaacttccaagttgtggctacaaatttattgccagatattttcccactgagaatactgaggttattcacataatcacttccttaacaaaggaagaagcacttttaacttgggctgcattccctttgtgagggtccacatttaggatcctcctgctaccataaggccccttttggggttctttgggtgtggctgcatctcaccatgttgaggattgccttttttttttttttttttttttttttttaacacagagccttgctctgtctcccaggctggagtgcagtggtgcgatcttggctcactgcaacctctgcctcccaggttcaagcaattctcctgcctcagcctcccaagtagccggaattacaggcatgtgccaccatgctgggctaatttttgtatttttagtggagacggtgtttcaccatgttggccaggctgttcttgaactcctggcctcaagtgacccgcccacattggcctcccaaagtgctgggattacaggcgtgagcccccgtgcccagcaaggattgctgttttaattcttgtatcttcgttgcttctttggtctttgcttaaacaaaacaataaagcttaatagttggggagaatgctgttaccagtgtcctctaggaaggctgttagcatatggctctactgagcagcagtgccatctggtgcctgagatcatgtgcttcaggcagttgtcacactgcatctacagccaagcatcacagaaacacttcactcatgtggtcagggaaggtgggactgattcacatgttagagacaggtcagatgggaaaattaaggcccaacttggtgttggggaataaccatactctggtctttcaagtgtagtagctgatgattcccaagaaactgatgaattttctgagtccagacaaaatttccccaagcctgctctctctgttggatatacataatagagaaagtcaaatcagccctttggggtttgtggtaaaaattcactcacccattgaagcctaaggtggctttgtaccttccagatctctcagcaaatcycctgggcagaaatgtcacctgcttgccatgtctttgaggggttcaggtcagcctggagaacaggctccttaggtcaaaaaccttgttttaagagccactgtggtacagtcaatgtaacccacttgtgcagaagccatgcttccaaggaaggtctcaggttgacaactagacatcaaatctgagaagccaactgtggagtaatgtgtttttttctctgtggacaagagtgatcagaaaggtgcttgatcttgaacaattgatccatgatgaaaaaatgaccattagctctcccccagaagcgtctgtgtttgctgaatggagctgagattttgatccgctatcagactccagaaagatccaggagttccaagaacatggcaaagagtcaaaatcttaggacaaggaattaaaatgccagaatgcaaatgtccaacaggcctggtagctcacagctatcaacaccctagaattccacactgcctcactgcagttgctcaaggatgggtatgtttctgtctctgaaattcgggaaaaagccttaagtgccagagaaggtgcttccaagactgtctgcagaattcctttcctagggtctgtctctggtacccaaaagggcagagaaggaaccctaagattagcatagagccactcatctctcctcccctccccaccccttcttcccctgcttccattccccatggctctctcctctgactgtgaaacacttcctctccagcagtgttgggaaagttctggacytctactggatctagccataaatggtggtcttcagaaaaatggagattgtggctgccagcacccacaagacagcagcctcatgccatgcaggcagcaagccatcctgaacagcgttcctcccagagtctgtttcctcacctgctgttcactggtgagaggaaaagggacttgttctcccttgaccagttttctagttttcctgttcccaccctggtctttgcctgatgacagagaaactttctaaaaaaaaacaaaaacaaaagctataaaaaatctgcaaaacaccctatcagaagtcaatgatttccttaaaaatacatctacttccttcctgtccttcttatcttctcccttgccccagacaggtgtgcttgcaggcatccagctgcctgcatcagagctccccttgaaggcaggtgcgcagctgggctccacgttggagggcaacagcagagctgccacttatagccggtctttcaaccctgctgtcccccagcccacccacaatggctcaaaaggctggtcttctgagaaagacttgctgctagccaatcatcacagtcactttccagttatgttaagtggcatcagagcattgattagcacttacggtatgcaagatatggtaggaggaaaagggaattatagacagaaaccatgtgaaagtataaaagtcactgatagactagatacacgaatgagaaacaaatcaagcattatcatcacagaaaaccaccaaatcgcaaaagataagaaagggatcaggcatggtggctcatccctgtaatcccagccctttggaaggctgaggtgggagaactgcctaaggtcaagagtttgagaccagccaaggcaacatagtgagaccctgtctcttattaaaaaaaggaaaggaaaaaaatttttcaagaggaagaaagtaacaaaggacatataaaacatcagaaaccaattaacaaaatgacaggaataagtcctcactcatcaataacaaccttgaatgtaaagagttcaaacttcccaattaaaatatatagccttgtttagccgggcatggtgccacatgcctgtaatctcagctactcaggaggctgaggcaggagaatcacttgaacccgggaggtggaggttgcagtgagccaagatcatgccactgcactccagcttgggtgacagagtgagactctatctccaaaaaaatacaattaaaaaaatatatatatacacacacataatacccttgctgagtgggttagaaaaacaagatccaggcgaggcatggtgactcacaactgtaatccccatgctttgggaagctgaggcaggaggatgtcgcttgagttcaataccagcctgggcaacagagcaagaccactagctctaaaaaaaaaaaaaaaaagctgggcctcgtggcatgtgcctgtagtcccagctactcgggaggctaagacatgagggttgtttgagttcaggagttgaaggctgcagctgagttatgattgccactgcactacaacctgtgtgacaaaacaagaccttgtctctaaaataaattttgtaaaatgaatttaacaaaaacaagatccagctatatgctgcctataaggaactcactaaaaagatgcatacagactaagtgatgggatgaaaaaagatattccactcaaatgtaaactaaaagcatgcaggactagctatacttatatcagacaaaatagactttaagtcagtcaaaaaacaaaaagagaaaaggtcattatataatgataaagggatcaattcagctagaggatataacaattgtaaatatatatgcactcaacactggagcacccagatatataaaataaatattactagagataaagagagagatagaccccagtacaataagttggggacttcagcacctactttcagcattggacagattatggtctagaaaatcaacatagaggcatgagacttaaaatacgctatagaccaatgaatctaagagacatttacagactatttcattcaacagctgcagaatacatattctcatcagcacatggaacattctccaggatagcccatatgttaggccacaaaataaatctcaacaaatatttaagaatcaaaatcctatcaagtatcttattagaccacaatggaataaaaagcagtatgttgcagcctccagaactgtgagaaacaaatttctgttctttctaaattaaaaaaacaaaaagcactagaagtaagtaacacaaggaactctggaaactgtacaaatacatgaaaattaaacaacaccatcctgaaagatcaaggggacagtgaagaaattaagaagaggctgagtgaggtggctcacacctgtaatcccagcacttcaggaggccaaggagggcagatcacttgaggtcatgagttcaagaccagcctggccaacatagcaacacccccatctctactaaaaatacaaaaattaacgggccaggcatggtggctcacacctgtcatcccaccactttgggaggccacggtgggcggatcacctgagctcaggtgttcgacaccagcctgggcaacacactgaaaccccatctctactaaaaatacaaaaaattagctgggtgtggtggtgtgtgcctgtagtcctagctactcgggaggctgaggcaggagactctcttgaatctgggaggcggaggttgcagtgagccaagattgcaccgctgcactccagcctgggcaacagagcaagactctggctcaaaaaaaaaacaaaaaacaaaaaaacgaaaaagatacaaaaattagctgggtgtggtggcgtgcgcctgtaatcccagctactcgggaggctgaggtaggagaatcgcttgaacctgggggggcagagccaaaattgtgccactgcactccagcctgggtgacagaatgagactctgtctcaaaaaaaaaaaaaaaaaaaaaattagtgccgggcgcggtggctcacgcctgtaatcccagcactttggaaggtcgaggcaggcggatcacgagttcaggagttcgagaccagctgatcaacatagagaaaccccatctctactaaaaatacaaaattagccaggtgtggtggcgcatgcctgtaatcccagctactcaggaggctgaggcaggagaatcacttgaacccagaaggcggaggctgcagtgagccaagattgtgccattgcactccagcctgggcaaccagagcaaaactccatctcaaaaaaacaaaaaacaaaaaaaacacacaaacctaaactgcctctgtaacactaatgaaaggccaccaggttagaaggatgagaggggcctgaatttgtagttaaatgattactgccattattccaaaggtcacaagatttacaacttcccccaataactcctgtaaataacatcactattgtggaacctaagattggccttttgagatgtcttttcaggcttttgcatctctgataactggatggccccagttagactcctgtggccccacccagaagcagacagcacatgaagaccattttccacagccctatgactgcaccccaaaccaattagcagcacccattccctagccccctgcctgccaaactattctttaaaaatcttagcctccaaattttcggggaggctgatttgagtaataataaaactctagtctcccatttagctggctctatgtgtattatactctttctctgatcttgatagatcagctgtatctgagcaacaggaaagaagaacccattgagtggttacaggacagccaacaggaaacttaaacaagaaaaatgggagcatgagagggataagggcgagggggtctacatagggcaggccacatcctctcctctttaaaacccatcagggtttccattacacatagaataaaacccaaagcccttcccttggcctctccttctccctgtgtcccacttctcagaccaattaagctggctcctacctcagaacccagtctctgctccagggttagttacctcctctaaggctttccctggcctatcaagctgaaacaggtttccatacactgcaacaggaagcagtatcatgctccctcaaacttctcaccactagagactcctccttatagtcttctctacatggagcttggtcacctcactgagctgatctaattccagaacacagagacctgcttctttggcctgcacaacctggtttcaggtaagggtagcttctcctcaggtagactaaaatttgaaaagtgctcccagacctcctagggcttccacctgggactggtggccaaacgggtgaaggaacctgacaactagaaggtgattaaataggagtattcccagacaaagaagagaaaaaaaggtatgttcaccaaagagaagacggtataagtaccataagactgatggccaaactcctctagaatatggagactgggggcagagggatgagggggcagaaagtcacctgagggtctggtctgaaggaaaaacaagcagagatgttactgaagtaaggggggaaaagactgaaaattaggagatctggagagcctctatttatgtaaattcactttttctaatgtaaacagtagtgaagtcaaagtagagaagtagggagacctgcactgtggaaaagagaaaagattgaaaagaagatccaggacgaattcaaaggaggggtgaagactgcagactggactgctaaggagaagagatattttgccacaacttgagacttctccaggtcaggatgaagtaactgttttcctctcagaaatgtcagagcttctgcctgtaagacaaggcagtggttcaaatgtgtccaccaaagttcatatcttagaggcttgatctccagtgtgatggtgttgagtggtgggaggtgggaggtgctgaggctctcatgaatggattaatgccattattttagaagtgggtttgttacccgagaagggtgtccaggttcttggtgtcatgaacaaagaattggacaaaatgcacaaagaaagcaaggaaagaatgaggcaacaaaagcagagatttattgaaaatgaaggtacacttcacagggtgggagtggcttgagcaagtggttcaagagcctggttaccgaattttttgggggttaaatatcctctagaggtttcccattggttacttgatgtacacccttgtaaatgaagtagtgcccacaatcagtctgattggttgagggaggggacctatcagaggctgaagcaagtttcaaagttacaccctatgcaaatctctgattgattgggaaaaggctgaagtgaagttacaaagttatactcctatgcaaatgaagacttggcccatgaccagcctcattggttgtggaaagggaccaatcagaggtactttcaatttttcatctaccatgcagaaaaaggttgggggtgggggttgcaaaggaagtagccaaacaaactctgactacaaacagaggtcccagtgggtagggggctgggacaaagcttttgggggagggggaggacagaggaccttggggctgggggatctaagctggcccctcaataaagggcctcctcgccacctcccagcccactgtcccacctctgcccttggctctgttccttgcctccctcctgtctgaccccatctgcctcctacaggaggagcccacccacccccaaacacctcccagtgttctgggcccagctccttcccaggcctcactggtgcgactcagctccagctggaagagcaggtccaggaagtccttggccagcccctgccccaggaagagcttgagcaggttcgtggccacgtcctggcgacactcggtgctggttgtctcctcgatgagtgggatcagctgccctgggccctgcagggagaggcacgggggatcccgaacctttccctctgaggacctcagagcatcccagggaaagaggacattttcccaaggggtggctggggatggggccctggacactggccagctcctcacatccccagacctcaggtttctgctctgcagaatgggtttagaaggacaggcgcacaggcctactgccactggaccctcccaccctgcccaggccccctcacctgcatgcccagcttgacctcgtggcacagcaggtgcaccagtggctggtagtagctggagggcagcaccgtctcgtcccgcagccgcacctccagctgcaaggagcccaggttgcccctggaatgggcagcctgtgacctctccaccagggactcaggccac

SEQ ID NO: 97124 - DNA, 68993 bp, Homo sapiens
actatttcacctatatcctttaagtttatattgtcaagcttgccccaggaatactttttaaaatctcctcattgggaaaaatgtagactgccttattgtggggcaatttacctaacaagcaatatgcctaatatttatgtacgtagggtcctttaaaaagtttgcgggctggatctcccctcagcagacatttgctcacacttgtaatcctaggtgtggcttgggtgtaatatggtggctcacacctgtaatcccagcaccgtgggaggctgagttggaaggactgcttgaggccaggagttccagtccaacctgggcaacatactgggtctctgtctctacaaaaaacttttaaaaataaaaattaaaaaaattagatgtggtggtccatgcctatagtctcagctactcaggaggctgaggaaggaggatagtttaaatccaggagttagaggctgttagagccataccgcactccaggcatccttttaaaatctctatcagattgcttgtaaaagttttttgtaattcagaaattttctcagtgtgtatctaggttacttttcactaattgtgcttagaacatgatgctacatatacacatcttttttgaatcaagaatatcctacgtatgtatcacttctatttcatttgttgtggttttgtccttaggaaataccagatatctacgtgccatattgctgcttcctaccctctgtgtctttcctgtactctttaaatgaaaaagaatggtttcgtatttatcaccctttttgttgttaggagagcaccttacatttatcttccatatcagggactaatttttccacatctgctcagtattccctcccatgtggattttaatttttctacagtattttttttgtcatcttgaaatcctttgatatcgtttatttttcttttaatgtacctcattctggtgcatgttagcttcaagtggttatccttaggattttgtttggttacctctacctttctccatcatcatggtgggtgtggttgactcggtttcttgccatgtcttctcacaagactttcaggatcatgtgattcctggccaagaaataaaagcaaaatcattttattccccagtggattcggatgaaaccggtgataaaatcaggtacaactccaagaggagacattggagaacaggcatgctgggtctgtaaggaactgcacgttaagatggcacatatacttatgctgtatcaatcaaggtcgtccctgtatcaatcactgtcatcttaccttttcaagctgaaaatgtcccatatgttcaggcattttttactgggaaaatggtttttctctttgtttctgtgttcttcactcataagctgatgcagtaataaataggtgagaccttttatttggggaaataacctttttcgttctattaaggatgttcttattaaggatgtattaacagctttctgaactttttttctggattttgttgttgataattttcagggctgtgctttccttggagtcctctggattccattcccaggtcctcgagtgatcatcataggttcccttttgtcttttccttccttacctttatttttttttggcagggggtgggggtggaatctagctctgttgcccaggctagagtgcagtggcacaatctcggctcactgcaacctctgcctcccaggttcaaacaattgtcctgcctcagcctcccgagtagctgggattatatgcatccgccaccacgcccggctaattattatgtttttagtagagataggggtttcaccacactggccaggctggtctcaaactcctgacctcaagtgatctgcctgcctcagcctcccaaagtgctgggattacagacatgagctaccatgtccggccttggttttctatgtaaaacaatttgcattatttttagccatgaataagaagtcctcaagtaaaacgaatatttctgtcttaggcttttacttgaacttagtctgctttcttttttctataggacctggtcatcttccaaccacatgtcactatcctcttcctgctcatcttgtaagtgcttcccttgacaacatacattgtgaaatgttgatctctttgtcatacctagtagatctggttagagctctatcttgtagagtgttctgaatatagttttctaataaggaaaataaagtacttacgtgcaagaaaaaaattggatttaataggtacttcattcaaggattttttttttttttttttttggtgggagagacagggtctcactttgtcacccaggctggagtgcaatggtgccatccatcttggctcactgcaacctctacctcccgggttcaagtgattctcctgcctcagcctcccaagtagctgggattacaggcctgcgccaccacacccagctaatttttgtatttttagtagagatggagttttgctatgttggccaggctggtctcaaactcctgacctcaagcaattcacctgcctcagcctcccaaactgctgggattacacgtgtgagccaccacctccaaacttggaatttttaaagcctctctttctggctttcatgctgatgtaattatcaagtgtttgttggttgggtatttattccctgcttcattccagaaaggacttgtggcatcttacaaaaatacaatgcaataaaacgtaaacatctaacagaaagggaaaggaaataaaggtagaaactgtccacataatctataaaatttcaccttcaagaaatctctcagcattcttgcccttgtgtcctatgtagaaaccctttagttgatgcctaaacacagatatgcatttgtttgactcaatgctcgctgcaaaaataagtgtttctaacagtataaaagaacagaggctgggcacggtggctcacgcccgtaatcccagccctttgggaggccgaggcgggcggatcacctgaggtcgggagttcgagaccagcctggccaacatggtgaaacctcgtctctactaaaagtataaaaattagccaggcttggtggagcgcctgtaatcccagctacttgggaggctgaggcaggagaatcacttgaacccaggaggcggagtttgcagtgggccaagattgtgccattgcactccagcttgggcgacagagggagactgcatctcaaaaacaaaacaaaacaaaaaaaccctcagtatttcccacgctgttttctgcagagcaacaaccactagcccttgaaattgaaagagataaaaatatgccactctgctatattgatgatttcagttaaaggcatttgaaaaatggcaggtgcaaaaacagcactctgaccttggtaccgtttcttaaaaacaaggtaaaattctcttgtgaaatatgcaacattgttgtcctccaggagaagtcaagacctggagaattctgcacaggacttgttaagataacgcttatcttttaagcctccccacataatttcacttcttcacaactatttgtccaattcagcataggagagatggactctaactgctgcttcaggtcttcattttttttatgagggctcctgtgccacataaaacttggactcaataaatgtgtgtgcttttctcccgtttatcttatgttagtttaattctcaggcccagctggagccctaagagaatggaggtggagttttgccacccctataatatgttgctggaagagaagacaacaaaggcttttgactataggactttgcagtctttcacaggtcccaaatctaaccccttctcaccatggtcaccacgatcaccacatggtccaagtcaccatctcccatctgaactttcacgtttgctggcttggtgcggtggcttatgcctgcagtccccatactttgggaggccaaggtgggtggatcacttgaggccaggatttcgaggccagccaggccaacatggcgaaaccccatctctactaaaaatatgaaaattagccgggtgtgatggcaggtgcccgtaatcccagctactggggagggtgaggcagaagaattccttgaacctgggaggtggaggttgcggtgagccaagatcgcaccgctgaactccagcctgggtgacagaaggagacacgatttcaaaacaaaaaaaaaatttacaaatgaacttttacatttgcctcctactgatctgcttctactgttgcccctttttctgacccttctcaacagaatggttgatcatttaaaacacagaaggatccgttaaaacagaagtgaaatcatgccactgttctgcaaagccctttgtcttcctgcctcattaaaaataacatctgcattcccttcaactgcctgatatatgacactcccctggccctgggatcttattgaatccccctcctgccaccatcactcctctagcttccttggtcttcctcagagctagctggctgtgggcttgggggcctttgcactcctcacataccgtcactaacctatgggcagagctctctctctccctgtattcaactcagcaaaaatgtccctccatcagacacagtgcctcatgcctgtaatctcagcactctgggactccgaggcaggaggatcgcttaagctaggagttcaagaccagcctgggcaacgtagtgaaatcctgtctaaaaaagtgaaaaaaggccgggtgcagtggctcacacctgtaatcccagcactttgggaggccgaggtggcggatcacttgaggtcaggagtttgagaccagcctgggcaacatggtggtgaaaccctgtctctactaaaaatacaaaaattagccgggtgtggtgatgtggtcctgtagtcccagccactcaggaggctgagccaggagaattgcttgaaccgggaagaggaggctgcagtgagctgaggtggcgccactgcactccagcctgggtaacagagcaagactccatctcaaaagtagccaggcatggtggtgtgtgcctgtagtcccagctgcttgggaggctgaggcaggaggattacctgaacccaggaggtcaaggctgcaaggagccatgattgtgccactgtactccagcccgggtgacagagtgacaaccagtctcaagaaatcctctcctcagccgggtgcagtggctcacgcctgtaatcctagcactttgggaggccaaggtgggtggatcacaaggtcaggagatcgagaccatcctggccaacatggtgaaaccccatctctactaaaaatacaaaaattagccgggcatggtggtgcacgcctgtaatcccagctactgaggaggctgaggcaggagaatcacttgaacccaggaggcggaggctgcagtgagccgagatcgtgccactgcactccagcctgggagacagagtgagactctgtctcaaaaaaaaaaaaaaaaaaaaaaaaaaaatcctctccttaccactgaacatcctccatgacatccactttctctctgcttagcattattgttttcttcatagcacgtatttaatacgtgacataatttgtttctctgcctctaccactaacacaggggctcgacaagcgcaggaacttggctccttttgctcattgccatattcagttctctagaacattcttagcaacttataaatgtttaagaatttattgaacgattgacaataaatacactaatataaatcatgaatctcaagtaatatgcagatttcttgaaatttcaaaattctgtttgagcacagaattttttttaacagaaatgcctattagtatctcataggacagagtttcagagtatttggggaaatgctgccttaattataaaatggtaaaatcagattcagtcttttcctttacatatttttatcttttagtccaagaccctgtgtcatcccatcagccagtttccttcagtactaccaagtatcacatcacaggtaacatcagccgcatctgaacccagcagccagcctctccctgtgataacacagctcaccatgcccgtgtctgtcacgcatgctgggcaatctctggcagaaacaacttcaagcccaaaggaagaaggtcatccgaataccttcacctcttatctacaagtgtcattgcagraggcatctggtcaggtaaacatgggaaattcaagtcacaggtagctttgtgacccccaaaaagtacttggttcacccatttgcctccctgcagaactacacctaagaatgcctgacagaccagcgtatatgccaatccaaaacaaaaactaaacaagtccatggaaacagccaatttgacagcacwtatacagcccaacgtttcattaatgacactatttaatgctattctatttaatgcttcagatggggaagaagttctgttcacctaccctgctttttcagcagcagcaaacctctagacaattcctcctactcactgtcccctctctccgccttgtttccttcctcccaaaaacatggacaaggcagccaggctcactgagtcacgcctataatcccagcatttgggaggccaaggtgagaggatcacttgagcccaggagttttagaccagactgggcaacgtagcaagacctttctctactaaagttcaaaaaaattagccaggcacagtggctcacgcctgtaattccagcactttgggaggccgaggtggaggatcacgtaagcccgagtttgagaccagcttaggcaactttatgagaccttttctctattaaacttcaaaaaaaaattagccaggtgtggtggcatgtgcctgtagtcccagctacttgggggtggcggggcaggggctgaggtgggagggttgcttgagcctgggaggtccagactgcagtgagccatgattgtgccactgtatactgtaggctgggcaacagaacaaaactctctctcaaaaaaaggcaaagtccctttgacagtattgactgaagaaaataatcctgcttccctcatgcttttttttccctaaactcaaacgagccctgtttatatgcagttgaacatttccctgctaaaacaatcctgttcactctggatctgcttgcaatggtaatggaaattcggtgttctatttgggggagaaactgacctacaggagtttaaacaaagatttttgtttttgtttttgtttttcttggaaatcctgaagtacagaatatctaaaaggatctataataaattattagaaatattaagaggatttagcaatgtcagcatttaatcaagatttcttgaatatgtggttgaattaggctgtgagtgaggtattctccagaaatggaccatgtagttggcattaatggtgattgtctcarggttggacttcgagttcaagtgcagtagccacttaagctttgggaccgcggscatttgctcagtctgtttcttagggcagggaggttttctgcttcccacctcttgctatgagtcattttaagtcattacctcttgaatatggactctttttttgagacagattctcgatctgtcgcccaggctggagtgcagtggcgcaatctcggctcactgcaacctctgcctcccgggttcaagagattctcctgcctcagcctcccgagtagctgggactacaggtgtacaccaccaagcctggttaatttttgtatttttagtagagacagggttttgctatgtaggccaggttgctcttgaactcctgacctcaagtgatctgcctgccttagcctcccaagtgctgggatgacaggcgtgagccatcacgcccagccttaaatacgaatacttgaatggagggaaacacacacacagggaagcctgagaggaaaacrtacttctgaatagaaaagtttggttttggctttttaatttccaagtttccctcatcttcatggccttaacacttaaagttactgctataaatcttatttccagactcatttgcccttggagcaatcattatataatctcgttattcattttctctatcgtatggaagaagtagaaataaattctgtccactcgcagaaaagcttctgaaagtaatcactgttttagagagctgtggttcatagggtttataaagttacccaaggtcaacttggatgaaaataatctccctgactactacagtacagtaattttgtataagtaattttgacaacttctttgttcccaataggtcatagatgagatagcagggaacttcagcagagcagttcatggtttgcaagctcttaacaaactacaggaagcttgtgagttcctccagaaactaacagccttaaccccaagattttctaagccagctcaggtaagtggagggtgactgggagggaagaaggtaggagagagggaaaagcggaaaacagaaaaagagaatctgaggctgggtgcggtggctcacgcctgtaatcccagcactttagaaggccgaggcgggcggatcacatgaggccaggagttcaagacctgactgggcaacatggcaaaacccgtctctactgaaaaaacaaaaattagctgggctcggtggcgggcacctgtaatctcagctacttggaaggctgaggcacaataatcacttgaacccaggaggcagaggcaatgagccaagatcccgccactccactccagcctgggtggctgagagactgtgtctscaaaaaaaaaaaaaaaaaaaaargaaagagaatctggagattgtgccttatgccaagcttagcattataaagactgtatttaaattttagsaagcatatttttttacctttaaatctggaaagttatgaattaaattgatcagtagtgacattgttggatatactgtgtttatgttcatttgttgattaatcagctggtactgccttgctgatgcatttgttagaagtctgtcggcattcagtggaacacattggctcccacctgtagtcccagcactttgggaggctgaatcaggcggatagcttgagcccaggagttcgagaccagcctgggcaacatggtgaaaccctgtctctatcaaaaatacaaaacttaactgggtgtggtggtgctcacctgtagttgcagctacttgggaggctgagatgggaggatggtttgagcccggaaggtggaggttgcagtgagccaagactctgccactgcactccagcctgggtgacagagccacactctgtctgaaattaaaaagacaaaaaactcagcattggtcttttcttcattcctttttttagtctgatggtattaattggatatttggtctactcaccactcaaaaagaattgtcagtttgtcagaataacatgaaatatgaatcctcccttataggttatatgarataatatattctccttccctgtcaaattgtaactttttttttataaaatgcatttgaaatgtataaagaatattaagctgctaataagaagtatgcaaattgaaaataatcatgtgctaggtgtgtggctcatgtctgtaatctaaacactttgggaggccaagacaggaggatctcttggggccaggtgtttgagaccagcctgggcaacacagtgagcccctgcctctacaaaaaatttttaaaaattaggtgtggtggtacccacctgtgtcctagctactggggaggctgaggaaggaggattgcttgagtccagaagttcgaggctgcagtgaggcatgattgtaccactgcactccagacggggcaacagagcaagaccccatctcttaaaagtaaaattttaaaaagcaatcataggctgggcgtggtggctcacacctgtaatcccagcactttgggaggccagggtaggaagatcacctgaggtcaggagttggagaccagcctgaccaacatggagaaactccatctctgctaaaaatacaaaattagttgagcatggtggctcatgcctgtagtcctagctactcaggaggctgaggcaggagaattgcttgaacccgggaggcagaggttgcagtgagtcgatatcacgccattgcactctagcctgggcaacaagagtgaaactctgtcaccaaaaaaaaaaaaaaaaaaaaaaaagcaaacaattcaagggtgtatgtttgctttctaatcctcccaggttaatctcatcaattcccttatttacctgagtgaggagttactcaggatcccatttcagaacaacaacagtctgggcttcaaagttcctccaactgtctgcccctttcattccctcaacaatgtcaccaaagctggagaaggaagttggctggaatccaagcgtcatactgagccggtaggtgccagatatgcaggtggccagatctgcttagaagcattttaatcttgacaggtccaggtatcacagcctctccccagacctttaaagataatcttgctgaagtttctgctgcagaagaaactcctctgccatgccttctccaaggtctccctccccaccccaccagtgagccaagactccctagtgctgtaatcaagtgaaaaggacttaggggctggacccggtggctcacacctgtaatcccagcactttgggaggccaaggcaggcagatcacctgaggtcaggagttcgagaccagcctggcccacatggcgaaactgcatctctactaaaaatacaaaaatgagccaggcattgtggcacatgcctgtaatcccagctactcaggaggctgaggcaggagaatcgcttgaacctgggaggcagaggttgcagtgaatcgagatcatgccactgcacacagcccagacaacagagcgagattccataaaaaaaaaaaaaaaaaaagaatttaggaaagtgttggcataaagcagacactcaacaggttatgtttgctattcacatgaaaagatgctcgacatcattggtcattagggaaatgcaaatcaaaactaaaatgagataccacttcacacccaaaaagacagaaaataacaagtactggcaaggatgcagagaacttgccacgttatccattgttcgattgtaaaatgatgcagccactttggaaaacaatttatcagttgcttaaaatgtaaaaaatagaatcgccatgtaacctagcaattctactcctagtgtctacccaagagagttgaaaacatgtccatacagaaacttgtacactcaagtttgtagcagcatggtttaatagctaaatagccaaaaagtggagataacccacacatctatgatctaatggatggctaagtagaatctggtctattcatacaatggaatattattcagcaacaaaaaggaatgaagtcctggtacatgctccaacatgagctttgaaaacattatgccaggtgaaagaagcctatcacaaaagactgtatgttgtgattcatttatatgaaatgtcccaaagaggcaaatctgtagacacataaagtagattcgttgttgcctagagctagagggactagggatgggggaatggagagtgactgctaatgggtaccaggtttattttattttatgagacagagtctcgctctgttgcccaggctggagtgcagtagtgtgatctgggtgctctgcaacctccacctcccgggtttaagcaattcttccacctcagcctcccaagtagctgagactacaggtgcacaccaccatgcctgcctaatttttggtacttttagtagagacagggtttcacaatgtcggccaggtaggtctcaaacttttgacctcaagtgacccacctgcctcagcctcccaaagtgctgggattacaggtrtgagccaccacacccggccaccatgtttattttagggaggatgaatcctaaaattagattgtggtgatggttgcacaatcctgtgaatatactaaaaaacgttaaattatatactctgagtggatgaactgtatatgtgaaagttacctcaataaagctgtcatttaaaaactctatcgtgagcaggtctagggcaattatatgatggggcaaaggcatatttccttggccagccctcttagtttggttcaaaggatgctaagtctttagccaggttgcaagtactttctgtgagattccaaggtcctctctaaggaatactacccttcattacaacactgtgaaaattccccttccaatcttctccaaaacattattttactaacataagacactgaggttttacaagtcacacactgttttcctttccatgcaggtagaagacatcctggaaatgtccttggtggagtttgggaatatcggggaagcatttctagagcagaaccagtctcccgagtcttcagtgactttgacctctgccaatgctactctgctgctgagcaggttaatgggaagaaggaacggggagagtttcactgtgtttttcactttcagaggacacacaaaaattgacttccattttaacttttctcattagacaaaacatatcaastttaccgctgagctcttacactctgggtcacccagcccctgtgaggctaggctttccgtcggctttagctttgaaggagctcttgaataaacatccaggagttaatgtccaagtgagtgtgaaattgattgtgatcagaatgaaaatgggatctgatggccatgtaggcatttgggtgaaagtaatgtatcatgaaatgtaaactgaacagaccagatcagatgagagagtttatgtagcattcatttttattttacrctggcagggatagaggcctcttaaaaatgatccactgtagaagttgggaacattaaacagatttctggatttaactaaatttgtgttgtaatttgaattgatttcaactctgcagtttgttttttgttgttgtgttttttgttttcttgttttgttttgttttgttttrtcttgttttgttttgttttgttttgttgagatggagtctcaatctgtcacccaggctggagtgcagtggcgtgatctcggctcactgcaacctctgcctcccaggttcaagcgattcccctgcctcagcctcccaagtagctgggattacaggcatgggccaccatgcctggctaatttttgtatttttagtagaggcggggtttcgccattttggccagactggtctcaaactacggacctcaagtgattcacccacctgagcctcccrtagtgctgggattacaggtgtgagccaccatgcccagcctctgcactatttacaaaaagctgagactatctaaataattattgactcagtataccaacccagtcatatcaatatattgtattcctttcagcagttacctgacaaatacaagtagcattgttgccttatcctgaagagcagaacagttacttcctagtaaaatagaatcctctagatataaagattaaaaataataattctggggatcccaackataattcatctttaatttactgtttctcatagaggttataaatggggaatgttatttcatttgcggtattagtarggggcacatcccaatatttaatatatgatatccggctgggcatgatagctcaagcctgtaatctcaacactttgggaggctgaggcaggtggattacttgaagccaggagttcgagaccagcgtggccaacatagcgaaaccctgtctctactaaaaatacaaaaattagccaggcatggtggtgtgcacctgtagtcccagctacttgggaggctgaggcaggagaatcgcttgaacctgggaggtggagattgcagtgagccgaggttgtgccactgcactccatcctgattgacagagtgtgactctttctcaaaaaaaaaaaaaaaaagtatgtatgtatgtatgtatgtatatatayayacacacacacacacacacacacacacacacatatatacatatgtatatatgatatatctttctagtggggtcacttaaaaatatttcagcaatggataaaactgggcttctctttgtctttagataacaggactagctttcaatcccttcaaggatttggacaacagaaacattgttggaagcattggaagtgtgttactaagcgctaatcgtaaattgctccaagtccatgatttaatggaggacattgaggtaggaactgattcttagggaataaaatagaagagaatgggatattctgcaacaggatggaaggatgcaacaacttaaagggaattatgttagattgatggcagtgccattgttttgttattaacatcttaggaacttttacaaagagatacaccttatccttagaaaaagtgttttaaagggctgggcgcagtggctcatgcctgtaatcccagcactttgggaggctgaggcaggcagatcacttgaggtcaggagttcgagaccagcctggccaacatagtgaaaccccatctctactaaaaatacaaaaattaactggcatggcagtgggtggctgttatcccagctactctggaggctgaggcaggagaatagcttgaatccaggaggtggagtttgcagtgagctgagatcgcactgctgcacaccagcctgggtgacagagtaatgcttggtctcaaaaataagaagaataagaagtgttataggtctgggactatgtacttatccttaaccccagcagtattagctactaacatccaatgaggaagacctggctgggcacagtggctcatgcatataatcctagcattttgagagactgaagcgggaggattgcttgagaccaggagttcaagaccaacgtggccaacatagcaagaccccatctcaaaaaaaaaaaaaaaaaaagaggaagacctaggaygtttccttaccttatcaatataaaggattttgaaagacatcaatggatggaccattataatgattaactgtctcttattctagatcatgctctggagaaatgttagcttggaaacccatcccaccagcctcaacatgagcacacatcagcttacaatcacagtgaacgtcacttccttggagaaatccytgatagtgagcatagatcctgacagtccccttttaatgacactctacctggggttccagtatcagcckaactgcactcamttccacctgaacatcacccttccaaaggataaggtgtggcaaaaaggtaaaacccaatcagctgtcagaaacttactttgatttctttttgcctaggatgtagtgcagtggcaccatcattgttgactgcagcctcaaaccgtcaggctcaggggatcctcctgccttagcctcttaagtagctgggactacaagtgcgcaccaccacatctggctaatttcttaaaaaaaattttgtgggccgggcgcggtggcttgcgcctataatcccagcactttgggaggccgaggcgggcagatcacaaggtcaggagatcgagaccatcctggctaacacagtgaaaccctgtctctactaaaaatgcaaaaaattagccaggtgtggtggcaggtgcctgtagtcccagctatttgggaggctgaggcaggaaaatgtcgtgaacctgggagatggagcttgcagtgagctgacaccgtgccactgcactccagcctgggagacagaggcagactccgtctcaaaaagtggagacagggtcttgccatgttgcccaggctggtcttgaactcccagcttcaagcaatcttcctgtctcagcctcctgaagtgctgggattacagacatgagctacttcatgtggccacttttttttcttttttaaaaaaattttcattttgagataattgtagattcgcatgcagttataagaaataacagagacaggccaggcagagtggctcatacctgtaaccccagcactttgggaggctgaggcgggtggatcacctgaggtcaggagttggagaccagcctggtcaacatgatgaaaccccatctctgctaaaaatacaaaaaattagatgggtgtggtggcgggcacctgtaatcccagctacttgggaggctgaggcagaagaattgcttaagcctgggaggcagaggttgccatgagccaagatcgcaccattgcgctccaggctacagarcaagactgtcttaaaaaaaaaaaaaaaaaaaaaaaaaaaagacaggctgggcactcagtggctcatgcctgaaatcccactgtaatcctagcactttgggaggcagaggcaggtggatcaacttaggtcaggagtttaagactacgctggcccacacggtgaaaccccatctctcctaaaagtataaaaattagctggtcatggtggtgcacacatgtaatcccagctactcgggagactgaggcatgagaatcacttgaacccaggaggcagaggttgcagtgagctgagattgtgccactgctgtccagcctgggtgacagaccctgcctcaaaaaaaaaaaaaagaacagaaacagcttgtatacctctcatccagtttctctgaatggtagtatcttgcataactagagtatatcacaaccagaaaataacattaatacaatcactgattttattccgatttcaccaggtttacaagcacatttctgtatgtgtgtgtattgagtcctgtgtgattttaccacmtgtgtagacacgtgaccataaaatcatttttttttaaagatggattataggatggataaggatatgtatgtaaggaagcagacttagtaggatgttaattgtagaatctagttaatggttatatggttattccctgtaaaattctttgtatggttgaagattttcataataacatgttgagacccacagcagaagtaaggctcacagcaccatgagttaaatatacttcacatttacatattgtagatgactatatatgaaatatgtcctatgtatttcaactttatttctaatcttagatttgaggaagaaaggcctgatgatatctcagtatgccttggtataaaatcagaatgaatgtattgtagtttagaaaagttaagaatttctgagacataacattacagttaaaaatgtctggcctggtgtagtggctcacccctgtaacgccagcactttgagaggccaaggcaggaggatcacttaagcccaggaatttgagactagcctgggcaacagagcgagactctgtctccacaaaaaaaaaaaaaaaattagccgagcgtggtggcgtgcacctgtagtcctaactacttgggaggctgaggcaagaggattgcttgagccaaggagttcaaagccacaatgagtttcgatgataccactgcactccagcctgggtgacagagcaagacactgtctctaaaaaataaaaattcctgatatatataaatagtgcccagatatacttgatcaaaaccatgctctgtgggtatcaactttaaatatagtactgaaaagtcttaataagagctacacttttgtatttatttttacgttgggaaaatgaatggagaaagcatgctacagtctcccgtcatgaccaccttccatactggaaagaactttctctggctctcgcatgggcaccactcacacaggaacaatcacttctaagttcttgcttttaggcaaagtccccgaggcagcaatgctcactaccaggctgcccactacagaatctgtggaaattaccaacgggccctttcccaattccaaaggtgtactcagttttgtttctgtttctgttttgagacaggctcactgtgtcgcccagggtggagcgcagtggtgcgatctccactcactgtagcctccgcctcctgggctcaagcgattctcatgcctcagcctcccaagcagctgggactgcaggcgcatatgccaccatgcctggctaattttttgtgtttttagtagagacagggttttgccatgttcgccaagctaggtctcaaactcctgggctcaaataatcctcctgccttaacctcccaaagtgcttggattataggcctgagccactgcgcctggccatggactcagtttttcttggtgatcttggcaatgatatgtcattcagagccggaaggggccttcaggaaccyttttttgagagacaggactatttgaaagatgagaaagctgaggcccagagagactggatgactcaccttagcccctaccagccagctggtgacagagccaggcccgacctccggtccctagcgtgcagtcctgggctttgttcctgaagctgccctatctctatgtttgcttcaccctggggtttgttaccttagtcttctatctgctaacttagatatgtgctcatttcatttttctaaacctcgtaatacattctaaatcattagacctaaatgttcacatgttcacataccagaagaatataattttttttttttttttgagacaaaatctcactctgttgcccaggctagagtatagtggtgcgatttcagctcactgcaacttccacctcccaagttcaagcaattttcctgcctcagcctcctgagtagctgggattacaggctcacatcaccacaccccactaatttttgtatttttagtagagatggggtttcaccatgttcaccaggctggtctcgaactcctgacctcaagtgatccgcccgcatcagcttcccaaagtgctgagattataggcgtgagtcaccacacctggccaaaagactgtagttctttactggaacagtagtaatccagagcccagggttgtatcactggtcattttctttcaaatcatttgtgactctagtttcatcatggtctcatttgtaaaatattaataatagatcctttagaagagaggttcattggtgtttttgttccatttgatatacaagtaagcactcttctttgttctaagatgaggagtacacgtggatgctgaatccagagcatctgcagcacgggattggcacctactatataacagctgtgctgagtgagaggcaggagggtgctcagcagacacccagcttggtctcggtcatcaccgccgtcactcagtgttactactgggagatccacaaccagacatggagcagcgccggatgccaagtaagaaactgagccgcttcttgggcctctcttctgccatagctactgttaagcccaatgcatccgttatctcatttggggcagcccagaaagaaaaataatcaggtggtttgaaataactctgcctgggcaaaaggagggaggagggttgtgtgtggtgggcagggcaagtgtgcctcttcgaagcaggagcagctttgtgctttatctttgtgatttctttctcaaacacagtccagggtggatctgacaagtgtggataaaatagcgtgtggaagccataaaattctacaagtattaaatatgttgtgggtgggtaaaatgaaacctcttgctaaacraaggagaactttcatagctcaagaaatacattctcagattcttttacgttccaggccaggtgaggacaggttgtcacttttgtaattatcaccttgttcctggtgtccaactgctttaaaccagcactattatatttgcacactcgtgattctgtgagatcctgcctgatgaaagtcctggtttggttgctcaaagaatgtggtgtaaggtcttgcaaatcagcaagctgttctaaaaagagctgagaaagtgccatctagattggaaagagaaggaaagataattttcttttttttttgaggtgggatctcattctgtccctcaggctggagtgcagtggcatgatcacggcttactgcagcctcaacctcctgggctcaaaagatccgcctgcctcaaactttcaagtaatgaggaccacaggcatgtgccaccatgcctggctaatgttttagatttttgaacagacagggtctcgccatggtgcctatgctggtcttgaacttctgagctcaagcaatcctccctcctgcactttgggaggccagaaggaggaggaggaggatgatgatgattacttatagagggagtttccctcttgttgcccaggctggagtgcaatggcatgatctcggctcaccgcaacctccgccccgctgggctcaagcgattctcctgcctcggcctccccagtagctgggattacaggcatgcaccaccacacccagctaattattgtttttttttgtttttttgtgtgtttttttgagaccagtcttgctctatcggccaggctggggtgcagtggcgcgatcttggctcactgcaaactctgcctcccaggttcatgccattctcctgcctcagcctcccaagtagctaggactacaggcacccaccactgcgcccggctaattttgtgtatgtttattagagacagggtttcaccgtgttagccaggatggtctcgatctcctgtcctcgtgatccgcctgcctcggcctcccaaagtgctgggattacaggtgtgagccaccgtgcccggcctaattactgtatttttagtagagatggggtttctccatgttggtcaggctggtctcaaactcccgacctcaggtgatctgcccgccttggcctctcaaagtgctggaattacaggcatgacagagagaggattcttaggaaggcatctgcaccattcatagcctcaggcagtcatagctggacaatggctatcaagcaaatctataatcagtttgttaaaatgtagattctgaagcagtagctctggtcaggcctttctaacaagcttccagctgatcccagtgctgcttgttagggaaaccatactttgagtagagaagcttgagagcttttctcctctcacagcacagaccagttgattgcagaaggcatcggatatttcccacctccttgaagcacgctgaagtgcttggactccatgaaaggaattgagctgccccaaatacagcgcaagagttcttccaaaggcagactagattgggcctccaggacttaattctgtgccatggaaagaagtagtcataatgacagtactggaggcttttcacccacgaaaccaaacacagaattggtagcttccatgtaatcacctactgacatatttttaaatattatgcagaaatgttccaacatatggaaagccataaagaataataaaaaacattgaatgcacattcagctttatcaaagttagtattttgctctgcttcatattttcttaaataataaaacactcatgaataattgaagccctctgagtatccctctctagtctctctccttccttcccttccaccaaagggtaactactggcctgaatttgaggggggaattcattctttcaccgaatatttattgagtgtcttctacgtgccatgcccaagtctaggaactagagacacagcagtgaacaagacaatcgcctcatgaactgacattctggagagggaaactgacaatgaatagataaataagtgttttgcatgcttcttaggctttgggcaaatggcattatactgtacatatctcttgttgtattcacttagcatttatccatgttgatacatctacctctaattcatccattttttaaaatttttatatttatgtattatttatttattttggagacagagtcttgctctgtcacccagggtggaatgcagtggtgtgatctgggctcactgcaacctctgtctctcaggttcaagcaattctcctgcctcagcctcccaagtagctgggactacaggcatgcgcctccaagcctggctaatttttatatttttagtagagatggggtttcaccatgttgtccagsctggtctcaaactcctagcctcaggtgatccacctgcctcagcctcccaaagtgctaggattacagatatgagccaccacacccgctgattcattcatttttaactgctgtatagaattcaatcagtttgcctctgcttacttatgtacttgttcatttgtatgttctgctattgaacatgtaagttgtttcctatttttgataattatagacaaaggtgacaaaacattccttttcatatatcttcatacacatgtgcacagttcccctagaacatgtatacactcagaactggaattgcaggattcaaagagtttgttctgcttcagctgtactagatgttgctaaattactttccacattggttataccaatttacgccatcaccagctgtgaatgagagaaccagatacctctttccatctctaaattgctggtgtttgttttatgtctgtcccctccttagcactctgtctgactagaatcaacgtcttgattctaattccaggttgggccacagagcacaattctgaggacacagtgtctctgtaaccacctgascttctttgccagcgacttctttgtcgtgcccaggaccgtgaatgttgaagacacgatcaaactgttccttcgcgtgaccaacaatcctgttggggtgtcactgctggccagccttttaggattttatgtgatcacagttgtgtgggctcggaaaaaggatcaagcagatatgcagaaggtaatgagactttgatttcaacagatttgccatgatgttttragtaattaaataagatgaaggaaaaaacaccttcgtcaaaagcagcaggaagcctggtactgggaggcatagaaattcaagtgaaacttttcttaaatttatcttcgtgtctgctgactcaagacctgagaactttttctctctatttttttttcctttggttccaagattggaccttgcaggactccttttaggacaggaatgagccaaaagaaaacactagccaggtgtagtggctcatgcctataattccaacacttggggaggccagggcaggmggatcacttgagctcaagagttcaaggccagcctggccaccataacaagaccttgtctctactaaaaaaaaaaaaaaaaaaaagagcctggcatggtggtgcatgcttgtagtcccagctacttgggcagctgaggtgggaagatcgcttgagcccaggagccttgaagctgcagtgagctattgttgtgccattttactccagcctgggcaacagagacccagtctccaaaaagaaaaagaaaagaaaagacctagagagcttaactaaagttaaatgcaagtttatcttactttatacattggatatgaaagttacatgtaacttggctgggtgcagtggctcacgcctgtaatcccagcactttgggaggccgaggcaggtggatcacctgaggtcaggagtttgagaccagcctggccaacatgatgaaactccatctctactaaaaatacaaaaattagccaggcatggtggcatgtgcctgtaatcccagctgctcgggaggctgaggcaggagaattgcttgagcccgggagacagaggttgcggtgagctgagatcgagattgccccactgcactccagcctggccgacagagtgagattctgtctcaaaaaaaaaaaagttatatgtaaatcaaattgtaacttaatgtaactggctgggtgaagtggctcacgcctataatcccagcacactgggaggccgaggcaggtggatcgcttgaggtcaagagttcaagaccagcctggccaacatggtgaaaccctgtctctactaaaaatacaaaaattagccggctgtggtggtgcatgtctgtagtcccaactactcaggaggctgaggtgggaggatcacttgaacctgggaggcagaggttgcagtgagccragaatgaaccactgcactccagcctgggcaacatagcaagactccgtctcaaaaaataagaatataactataatatacaagaaatttatatggcatgttttttaaaacaaaaatcttttgacagcctcttctttccatgtgtttgttcttcctatgttttcttgcacttggaaattctagaatacgccaagtgttcacttcttgttgccctgggtgtagggttgtcagcattagtaaacaaaaatacaggctacytagttaaatttgcattttaaatgaacagtgcatcgttagtgtaagtgtgccccaaattattcatagtttatctgaaatgcagatttagctgggtattctctgttatctggtgactgtacctaagtgggaaggaggtggaaggatttagaggcccaagacctgatcgggtgattctatgactgtttcacttgagaggcacaggmcctggaggttcaggcctcatccccactttagtgacttaggtctgctcatgtgtctgtctgctgcccacacctcagccctgctttctgcagggctgccagacacctgccggagttcatcctcctgctcctcagcyggaggaggcaggaactataccaagtggaggcctagtaagttgcatggttctgcttttcttgcaggtgaaggtcactgtcctggctgataatgaccccagcgctcaatttcactaccttattcaggtctacaccggatatcgaagaagcgctgctacaacagctaaggttaatgaaataaatgtttttcacattgccttgtgtcttctgccacatgagacacactctgagttggtgatatcctggcaaccaatagcactttaaaagagactagagattggtattttctagttctaaactgtacatgtgggccgcacatgggggttcacgcctgtaatcccaatactttgggaggccaaggtggggaggtcacctaaggtcaggagtttgagaccagcctggccaacaaggtgaaaacccttctctactaaaaatgcagaaattagctgagcgtgatggcccatgactataatcacagctactcaggaggttgaggcacgaaaattgcttcaacttgggaggcagaggttgcactaagccaagatcacaccactgcactccagcctgggtgacagagcaagacttcatgtcagaaaaaatatatctatactgcatatatgaagaattatctatgcttgtctaagatccgaaagacttgatctaaatagttttctatgtcttcgtctttctccttagggataaacccaaagaattgtgttaaaattccttatattttatctttccctgtctcattgtaggttgtcatcaccctctatggatcagagggacggagtgagccccatcacctctgtgacccccagaagacagtctttgaaygagggggcctggatgtcttccttctcaccacttggacctctctagggaacctgcacagccttcggctctggcatgacaattctggcgtcagtccctcctggtgagtacttatatcctgttggctgttgctgctgctttgtggatccaagagagaagaaagaagatcaccacaataaatcacagtaaagctttgagccaaatagtaacaaatgactattagatttcagtttcaaagctgtctacacagaataagccctggaaagaagtgtgagagattaacaatgtgattttttttggatagtagaataatagatgttttgttttctctaatctcattttcattaaatgtcatgattgtgaacagcaaataacaccaatgaaatattgcctgaaagtgccacaaattaaaagtatttctaaatatgaaaaaatatccttaaagactaactttagtaaacaactgtctactgacagtcaaactttgagtcaaatttaagagcttaagggcagggcgcagcagctcacgcctgtaatcccagtactttgggaggccaaggcaggaagatcacttgaggccaggagtttgagaacagcctgagctacataggaagaccccacctctacaaaaaaaatttcaaaaaaaatcgccaggcatggttgtgtgcacctataatcccagctactcaggagactgaagtgggaggataacttgagcctcggaggttgaagctgcagtgagcatgtctgcaccactgcacaccagcctgggcaacagcaagaccctgtctcggagggaaggaaaaaaaaaaaaaagtcaagatcttaaggaaggagaaagaattactgtatgagatgtgcctaaggagttagagaaataactagacgatgataaagtccttgaacctaacgtgttaggtttgaatgattcagtatcttccttsagcagcacccagaattaggagaggtgctagagaaagtagatgatacaattaattaagaatgaggattactggttccttggagttaggaaaaaagagaaaaatgaagtagaagtcttaaggctcaggcactcaatctgttgccacatgttgcccacccacaaagagcatatggtctccctaaatttgttagcaaaatacatttttccccctagctagacataccagccactgggctggtagagcctaataacttccttgctgcttccattctgttccagtatgcacaaatcagcttgtaaaccatccttccagttttatttaaaaaagtgaataatgtatagtaagcacttgaaaagatgttcaacctggttagtcatcagtaaatgaaaatgacagcactagccatccatcagaatggcttaaattaaaaactctcacaaaaggccaggcacagtggctcacgcctgtaatcccagcactttgggaggccgaggttggcagatcacttgaggtcaggagtttgagaccagcctggccaacatggtgaaaccctgtctctactaaaaatacaaaaattagccgggcatggtggtaaatgcctgtcaccccagctgctcgagagaccgaggcaggagaattgcttgaacctgggaggcagagattgcgttgagcagagatggtgccaccgcagtccaacttggcaacagagtgagaccatctccaaaaaaaaaaaaaaaaaattctcacaaaaccaagtttaggggaggatggggagcaactgaaacactcacacgcccctagtgagagtgtaaaatggtatggccacttcagagaacagcttgccagtttcttgtgaagttaaacatacactgaccatgtgacccagaaatcacactcataggtatttacccaagataaacaaaaacatgtgtccactgcaagacctgtacacatatattcatagcagctttattagtagcccaaaacagaaaacatcacaaatgtctattgaatgaataaacaaatgttagtgtattgattcaatgtaatactactcaacgaaaaggaaacgattgttacatatgactacgtggatgaatttttttaaattatgcttagtgaaagaagctgtacataaagaatgtataggccagacacagtggctcacacctctaatctcagcactttggggggccaaggtggttagatcacttgaggtcaggagtttgagaccagcctgggcaacatggtgaaattctgtctctacaaaaaaatacaaaaattagctgggcgtgatggctcatgcctgtactcccagctacttggggggctgaggcgggagaatcacttgagcccaagaggtggaggttgcagtgagccaagatcgcaccgctgcactccagcctgggcaacagagcaagatcctgcctcaaaaaaaaaaaaaaatacatatatatagagagagagcatatgattccacacacataaaattccataaaaggctaactattctataaagacagaggacagcagatcattgttctcctaaggccaggaatgagggggcaggaggtgactggaaggagggatagggagcttttgggggtgatattttgatggtgctggtgtataaacgtttgtcaaaatacattgaattggccaggcatggtgtctcatgcctgtgatcccagcactttgggaggccagggcgggcagatcacgaggtcaggagatcgagaccatcctggctataacacagtgaaaccccatctctactaaaaatacaaaaactagccgggcgtggtggctccttcctgtagtcccagctacttgggaggctgaggcaggagaattgcttgaacctgggaggtggaggttgcagtgagccaagatcacaccactgcactccagcctgtgcaagagagtgaaactctgtctcaaaaaaaaaaaaaaaaaaaaaaaaaaaaaaaaaaaaaaaaaaaaaaagattttgacgagagaaatttaagtggtttcatgacaaacacagacccttggggaaaatagcatcattacagtaaaggaggaggtttgccgaatagttgtgaggtgaaatcaaacaggttgaataatcaggtgtcccagaggacaggggtgtgaacggctgaagttagcagagaaattagtgataaaacactggttgggaaaaggatgagctctcagggcctatggctctgtgaagtggagatgaggcctgtgaagcggagatgagactaagtagagtgagaagtcattaatgtaaatgataaagactacaacccatttatgccccctgatgatgaaaggcagatggsatatttgaaaaggtggcaagccactgtcacatatgggacagagaaaggttataaaatgtgtagatacatactkatctattcataggtgagaaaggtttgcagtctggtgtctggtacatgaactcccttagaagttgggaagggaaagataagatctactctcttttctttttgttttttttgacasagtctcattctgtcacccaagctagaatgcagtggtgcaatttcaactcactgcagccttgacctcccgggctcaaacaatccttccacctcagcctttcaagtagctcaggactacaggtgcacaccaccaygcccagctaatttttatatattttgtagagttgggattttgygacgttgcccaagctgtgctcaaatgcctgagctcaagcaatccacctgcctcagcctcacgcagtgctgggattgtaggtgtgcatcaccatgtctggcctcaactttctttcctttccttagttcttgccttgcaatgaaacagttcatttacttggacagtttactaatggtctgagattacgtcttactacagacaactgattcaagcccatctccctaatgtggttatcttcattttactataggtatgtcagccaggtaattgtctgtgacatggcagttaagaggaagtggcatttcctgtgcaattgctggctggctgtggacctcggagactgtgagcttgaccgggtcttcatcccagtttcaaagagagagctcttttcctttaggtactgttggaaaattactattaacagtgaatattgatgttcactattaattgaattgttcacgattgaattgtttttaatgcaaattaacattttattaatgtattatttcaaacatacataagcattactgttgtggttgtaactggtgtaaccattaccttaaaaatcagaaggaagacaaaaagagattcgaagtataaaaattataaatattgcccttattttctgaaactgtttacctagagaatcatttataaatttactaagatatctaggaataaaagaatcactcagatcaatggaatataaaaaggataccactacttcgatgatacaaatatttatgagaacaaaatataaaaataaaggaaagtattagagggctgtagccttcaactgactttcaaagacactagtaaactggccaggcaccgtgactcatgtttgcaatccctgcactttgggaggctgaggcaggcagatcacttgaggtcaggagttcaagaccagcctagccaacatagcaagacctactaaaaatacaaaaattagccaggcgtggtggtgcacacctgtgatcccagctactcgggaggctaaggtaggagaactgcttgaacctgggaggcagaggttgcagtgagccaagattgccactgcactccagcctgggcaacggagcgaaactccatctcaaaaaatgcaaagatgttagtaaaccaaaataattaaagcaatgtactggtgaattcacagaccaggagaacggtataatatacgtatcaacttctgtatctttctaggtatccatgtatctttctatgtctcctgaatgctaaagatgagaatattcctaggagaatatacctctgctatctgacctccttcttaccttcagctttctggttcaatattacggctctcggctttttcctcatgggaacaagatgattgcaagaggcccacacaccatgtcctagccgggcatggtggctcacacctgtaatcccagcactttgggaggccgaggtggrcaaatcacttgaggccaggagtttgagaccagcctggccaacatagcaaaaccccatctctaccaaagtacaaaaatwagccagacktggtagcatgagactgtagtcccagctacttggaaggctgaatcagaagagtggcttgaacccaggaagcggaagttgcagtgagccgagatacagccactgtgctccagcctcagtggctctatcaaccaaacaccacgtccttacattaaaatgcctaaaggcaaaaaaacatggaactgtttcttctggtacttgactcccagaacaaacaagaaatgtgtatttctttgttaagatctgctccaattacaattgcggcatataagaaattactcccaaaactgagtggattaaaacaaccatgttacttttctcctggttttgtgggtcagaaattcagtgaggccatggctggggagttttcccttgggatctttcatcctggctgggtctgttactcatctgtaagctcctctgtrttagatttccaaaaatgattcgctcacaaggtcagcagggggcgctggctgtcaactgagagctcatctgtggctgtcaacaaagcacctattgtatggcttctgcgtggcaacctcaagagagtggcattyttcayaggggtggctgtctccctccagaatgggcagttcaacagaactaagtaggggctttagccttttatgtcctaactttgaaaatcagattcaaggrgaagggccaagktacggtgtctcactcctgtaatcccaacattttgggaggctgaggtgggcagatcacctgaagtcaggagttcgagaccagcctggccaacatggtaaaaccccttctctaccaaaaatacaaaagttagccatgcgcagtggtgcacgcctgtagtcccagctactggggaggctgaggcagggaagttgaacccgggaggtcaaggctgcagtgagctgagatcacgccactgcactccagcctgtgcgaaggagtgaagactccatctcaaaasaaaacagagaaaacaaataagtcttgaaactaaaaatcatggactctcagcaagaagtgggaaaaaaaaaatgagatcctgtctctaaaaaacaaaccaaaaatayatgttttaaattgtgtgttgcttgtgtataggaataaactggtagaaattttctctccttcaccaaaacttaaggggtagcgaatactatttcccctccctagacctgatacagttctaggtttgttttgttttgatttttgagatagggtctcactgtgtttgccaagctggtcccaaacacctaggctcaagcagtcctcccacctcagcttcccgagtagctaggattacaggcatataccattgcatccaaagttctagtatttttaaaacatatatagacatatttattcaaacatactcatttttgttgcagaaatgtgattttttatctgtttaatctctgtgtttccaatagaggaatgactgtgagtttaattctccttcagttatgtaagtttttaccgtatagacatattttatatgtctattggatgtttattaggagcatttaagtgtagtgttatttcttctggatasttttttttttattatataggtctccctttgatcctgttgacactttgtatcttaaattccattttatattaactaaagaaagttgacatactgatattatttctattgtttgttcttatctttttactttcagccctttttatggttttgcttagagttatgtcttgcaagcaacatataactggatgtttaaaaaaccagatctaataatctcttttaatacatgagtttaatatgtttacattaaccatgattaccaatccatttggacttaatttaccatattattttgcattatttgttataatccattctytttatctactttccacattgtcaaattgacaggttttgtagttttttttggttttttttttttaaggttctctgcctcttggtttgttggttggttggttgtttctttcagatggggtcttgctctgtcaccccagctggagtgctgtgacatggatcacagctcactgtagyctcaacctcgccagcctcaggtgatcctcccacctcagcttcctgagtagctgggactacaggtgtgtgccaccatgcctggctaattttaaaactatttttgtagaaacagggtctcaccatgttgcccaagctagttcttgaactcctgggttcaagtgatctgcatgtcttggtctcccaaagtgctaggattacaggtgtgagccaccatgcctgaccacttcttgtatttttaatctttgctggtttagaaactatacattgtattttttcctctttctcctcttgyttttccacttcctgcttctgttcctcytcttcctcttctaattctttttattggttacttttaatttttaacacactttttctccatattaattttctaagaataaygtttcttctgcctgaacatgacaaagaattagcaatgctttaaccgttcttgagtaacctctctcccaattcccatgttttaaattactctctagtgttatggttttaccattttgtttttagatgcacaaaaaaggtttttcctttcatatttcacagttaattaaataaataatatcaatttctctgtttattctagttttctgtattctttgttttttgtttgtttgtttagttggttggtttttgagacggatttttgctcttgttgcccaggctggagtacaatggcacgatctcagctcaccacaacctccacctcgcaggttcaagtgattctcctgcctcagcctcccgagcagctgggattacagacatgcgccaccatgcccgactaattttgtatttttagtagagacaggtttctccatgttggtcgggctggtctcaaactcctgacctcaggtgatccacccaccttggcctcccaaagtgctgagattacaggtgagggccaccgtgcccagcctagttttctgtattcttttagtgtcttttttttttttttttttttttgagacgggagtcttgctctgtcatccaggctggagtgcagtggtgcaatctcagcttactataacctctgcctcccacgttcaagcaattctttctcagcctccggagtagctgggattacaggcacacgctgccatgcctggctaattttttgtattttattagagacggcgtttcactctgttgcccaggctggtctcaaactcctgcgctcaagcagtccacctgcctcaccctcccaaagtgctaagattacaggtgtgagccacygtgcccgacttttttttttttttttttttttgagatagagtcttgctctatcgcytaggctggagtgcagtgacatgatctcggctcactgcaacctccgcctcctggattcaagtgattctcctgcctcagcctcctgagtagctgggattacaggcgcccaccaccacgcctggctaatttttctatttttagtagagatggggtttcaccatgttggccaggctggtctcaaactcctgacctcagggtgatccactcacctcggcctcccaaaatgctgggattacaggcatgagctaccacgtccagccagttttctgtatttcttatcattactctgggcttttttctccttgttgaagtagctcttttaatagttctaatgagaagtgtgtgtgtgtccatcttttttttttttttttgagacggagtctcgctctgtcgcccaggctggagtgcagtggcgggatctcggctcactgcaagctccgcctcccgggttcaagccattctcctgcctcagcctcccaagtagctgggactacaggcgcccgccactacgcccagctaattttttgtatttttagtagagacggggtttcaccgttttagccgggatggtctcgatctcctgamctcgtgatccgcccgcctcggcctcccaaagtgctgggattacaggcgtgagccaccgcgcccggccgtgtgtgtccatctttactcttgactcatagttagctatttaastggatagaaattttttgttatttttcccttaacactttgaagattttaatacattgtcttctgcctgtggagcagttcctaagcagaaacattgtgacagctatatggctggctagcaacacttccacttggcttgtaagaagacagcacagatgaatttatcttcttaattgaccctttaataaaatgtctttrgctctagtaataattcttgtcttgaagtatattttgtcctatatgagtatagccactccagcccttttttgattgctgtttacatggaataccttcttccatctttttagtccagtggcttgatcttggctcactgcaacctcctgggttcaagcaattstcctgccttagcctcccgagtagctagaaatacaggcatgtgccaccatgccttgctaatttttgtatttttttagagatggggtttcaccatgttggccaggctggtctcgaactcctgacctcaaatgatcctcccaccttctcctcccaaagtgctgggattacaggtgtgagctaccactactggcccatccttttaatttcaattcatttgtgtcttcatatctaaattatgtctcttgtagacagaatacagttggattaggcatttttttggtccattctgccaatctctatcttttaatttgtgagtttaacctatttacatttgatataattactaataaggtaaggtttatatctgccattttgctatttgttttctatacgtattgtatcttttttgttcctctgtttctttatcactgccttttttttaatcaccatcacaaatggggttcaacagttrcccacacctactggcatagaatctcccagaggacatcactgccttctctgtgttaaatggatattttctagtctaccgtattcttttgtcgtatcttttactatatatttttaaattattttctttatgcctcccctggggattataattaaaattctaatttatgaaaacctagctggattactatcaacttaatttcaatagtatacaaaaacttcactcctgtagctcagttcctttcccactcttttgtgctattgttgtcatacaaattacatcttcatgcattgtgtgtccatcatatagattcttaatcactgctgcatgtagttattttttaaggcagaagagttrcaatctatatatttatttatgtgtatgtttacactgtttttacaacttttaaaattacggtaaaaacacataacatttaccatcttcaccatttttaagtgtgtagtgcagtagtagtatatatattgacactgctgtgcaacagagctccagagctttttcactttgcaaaactgaaactctacacccattgaacaacttcctgtttcctcccccttccaacccttggcaactattctttctatttctataaatttcattacttcacattcctcatgtaagcagaaccatacagtatttgtctgtcggtgactggcttatttcatttatcacaatgtcctcaaggttcattcatgttgtagcatgtgcaagaatttccttcctttttgggccgggtgcggtggctcacacctgtaatctcagcactttgggaggccgggtcgggtggatcaccagaggtccggagtttgagatagcttggccaacatggtgaaactccatctctactaaaaatacaaaaattagccaggcatggctgtggttgcctgtaatcccagctacttgggaggctgacacagaaggattgcttgaacttgggaggtgaaggttgcagtgagccaagatsaggccattgcactccatcctaggtgacaagagtgaaactccatctcacaaaaaaaaaaaaaaaaaaaaattccttcctttttaaagctaaatgatgggccaggtgcagtggctcacacctggaatcccagcgctttgggaggctgagacaagtggatcacttgagctcaggagttcgagaccagcctgggcaacatggtaaaactccatctctacaaaaaatacaaaatttagccaggtgttatatttagtctattctcatgctgctatggagacgtacctaagactgggtaatttgtaaaggaaagacgtttaattgactcacagttaagcatggcttgggaggcctcaggagacttacaatcatggcagaaggggaagcaaacacatccttcttcacatggcagcaaggagaatgagtgcccagtgaagtggggagcaccttataaaaccatcaggtcttgtgagaactcgctcacgatcacaagaacaggatgggggaaactgaccccatgattcagttatctccacctggttcctcccatgacagaggagaggattgtggaaactacaattcaagatgagatttgggtggggatacagctaagccctattaggtgtagtggtgtgcacctgcacaccactgaggtgggaggatcacttgagccagggggatggaggttgcaatgagctgagatctcaccactgcactccactccaacctgggtgacgcagcaagaccctgtctcaaaaacaaaaaactaaatgatattctgttatgtgtgtgtgtttatatacacccctttttttgtttgttttttagatggagtctctctgtagcccaggctggagtgcagtggtgcgatctcagctcactgcaacctctgcctcctgggtcccattaaattaatttcttttgggctggattattactttccctctccctcccactcctctccctgccactgcacctccacacacacacacataccatcccttccaccccttccaccacaaacaccacccgtgactggttttgctactgttttcattccaacccttcacatctccagtctagaactgggccttattatatgggaccttggagctcctatttttcaatgaaattaatggaactaggagtattgcagatcttgtcatgagccttggatctcttgacttagttcctggtcatgaagctgtcctttttttctcacctccttactataaatgtgtagccctacagaggtttttttgttctcaagtatcctttcatgagctccaggctcaacactggcttctagcaatgaagttggctttgtccctcccttttctgcacccagtgaatcatttttagtttcagttactgtacaaaagtcaaactcccacttttgtactaccttcctccaggtctggagctcagtamtcctgtggcttctacctcactctgaccaccttgttttctcattctgcttctcttcctcagaaaaggtttattttgtgtttaagcccagcaaagtctttttggttctttctttttatatattatttatagttcctccatatttggagtagagaaagtgctcagagtatgaatttaccaaactattttgagcagaagtttaatgtaaacttttgaagagtaaaagattcatcaaaactcttataaagctaaaacaaccatttttaattttaaactcgcatagcatataaattatcctcaacaaccttttatcctaaaacaacaaaagaatcttacatggacacattcgggtgatggtaaaagaatttaaaataaaaaaagaattaaaatatctgaaagcttattcacagaggtgttgaatagaggcttgggagttgctatgtcgcttgttgctgggcaaatcacatcttaaactggtgcactttcagaataaaatctcatgtatttcctyttctgatttctcttttcagacatctgttttcctccatgattgtggaaaagttcacccaggattatctgtggctttcaattgcaactcggcatccctggaaccagtttacaaggatccaacggctgtcttgctgcatgacactgctactctgcaacatggtcatcaatgttatgttctggaagataaacagcaccactgccaagagagatgagcaaagtatggatgagccctgatgtgtgttgtttgtagtaagcaatccttttttttttttgagacagggtcttgctctgttacccaggctggtctagaactcctggcctcaagtgatcctcctgcctcagcctyctgaagtgctaggattacaggcatgagtcaccatgcccagcctactatgcaatacttttactaaactccactacccttactttcaggattagaaagaaacagaatcatgtggtgtgatatggtttggctctgtgtccccacccaaatctcacgtccaactgtaatccccctgtgttggggcggggggaggacttgctgggaggtgactggatcatgggggcagtttctcccatgcttttcccatgatagtgagttctcatgagatctgatggttgaattgcttaaacccaggaggcggaggttgcagtgagccgagattgcaccactgcactccagcctgggtgacagcaaaaccccgtctcggggattaaaaaaaagtgtgtggcagttcccctgtcactcttctgccaccatgtaagatggtttgctttgtaaggcatgtaaagtgttaatgccaggtaaggtgctttgtagtgctttgtaatgctttgtaatgccatgtaaggtttcttgcttcctcttcacctcctgccatgacagtgagtttcctgaggcctccccagccatgaagaactgtgagtcaattaaacctcttttctttataaattacccagtctcagatagttctttatagcagtgtgaaaacagactaatacattgtgccttcatttttcttccactgccctaacgttagaatactctaacaaattttctcagtgttctcattcattaacaaatgaagcagtattaggaacacaacatggtctttactgccaggataattttatctctagataaacgtagttaacttcctcagtaaatagttaaacctaggagaggaatgactttgcgattattttaattgttgaagatgaaagttgatgtcatgcttttctttcagtgcgtccatttgctgtggcctggtctgaactgctggtcagcatccacactgctgtcatcctcttcccaatcaatcttgtcatagggcggctcttcccgttgattgagccacaggagactctgcccctctttcctcccatccaggcctcctgcctctcagatgcttctgttgagcctctctctgccacaatggtagttgaggtaagattggtatcaaattttattttatcttattttattgcctgcttgtttgttttgacatagggtctggctctgttgcacagactggagtgtagtggtgcaacctcggctcactgtggcagcctcaaactcccggctcaagtggtcctcccacctcagcctcccaagtagctgggactacaggcatgtgacaccatgtctggctaatttttgtatttttttgtagagacagggtttcaccatgttacccaggctggtctcaaacccttgggctcaagccatcctcccaccttggcctcccaaagtgctgggatttcaggcgtaagccaccgtgcccagccagtatcaaattttacagataaattacgtgctcccagctgggcacggtggctcacgcctgtaatctcagcactttgggaggccgaggcaggcggatcacgaggtcaggagatcgagaccatcctggctaacatggtgaaaccccgtctctactaaaaagacaaaaaaataataattagccaggcgtgatggcatgcatctgtagtcccagctactcaggaagctgagccaggagaatcacttgaacccaggaggcggaggttgcagtgagccaagattgcgcccctgcactccagcctggcaacagagacagagcaagactccgtctcaaaaaaaaaaaaaaaaaaaaaaaaaaaaaatgacatgctccctttccccacgcagtggaagagagcagtgggaagaatctcatgggaggctgtcagggtcctgttacctgtaatatatttttcccaattcctgtgccctgagccgtgatcaaccacatgcttagcttttactcttgatgattaagtattctgagaactaaatgggagtgcatggtaccactctggccttgctttagtctttgatgtttgatcaaattgtctcttttttcattctgtattgtctcataaaactggtattgcagctaccatgagctgtgaggtgactgctttctgaaaaattagaggaacatgaaaaattgaggttctttgtgctaagcatatccccttctgacgaaagggaacggccttaccacctgtaattggtacaaatcctgggttaatgaaaaacaggctgatttttctcatctggtcctacattcaggaattaaaggaaactgtgagattcctgctcaggagaaatacatacctactctccaagtgtgagcagccgccatggagttcttgggacattactaagctggtgaaacttttatccagcctcgtatcatctcacttggagggtcaaggctgtcatcagcagggagagcgccactgggcacgtggtaaacttcagtagatttcagtaacgaatcttccatctgcctcccactcccttgcatatgtcttactttcttactcattcataaccgacaggcctgatacaaccttctggttgttttaatttccttaagcttctagtatagagttgatagctttgttctccttgatgacttgtagacaatctttctctatctggtgaaacaaagtacaggattaagaaaaaaacacaagccagatgtgggtcacgcctgtaatcccggcactttgagaggccgaggtgggcagattacctgaggtcwggagatcagggccagcctagccaacatggcgaaaccctgtctctactaaaaatacaaaaattagccaggtgtagtggcgggcgcctgtaatcccagctacgggggaggctgaggcaggagaattgcttgaactcaggaggcagaggttgcagtgagctgagatcgcgccactacactccagcttgggcaacataggctctgtcttgaaaaaagaaaaaaacacacgtcgggcagggtggctcacgcctgtaatcccagcattttgggaggccaaggcatgcagatcacctgaggtcagaagttcaaaaccagcctggccaatgtgacaaaaccctgtctctactaaaaatacaaaaaaaaaaaaaaattagctggtcatggtggcagatgcctgtaatcttagctactagagaggctgaggcaggaggatcacttgaacccgggaggcagaggtttcagtgagccaagatcgtgccactacactcagcctggacgacagaccaagactccatctcaaaaaaaaaaaaaagagagaaatacaaaaaaaagttttctgtattatacccacatatcctttctgctttgtcaaaggctgttgaaacttgtcatcctttttcttttatgagatgatgagattatggaatttatggattctcaaatactgtttgagtctcctgggcacttactagtataggtcacatgtactgccattctggtgaagaactcaataaggttttaaaagtctttagatcaaagcttagaattttacaattgttaaaaattcaccagcatccttagagaagatggtagtactgcaaatgtggggtacggtccaatctctgctagtagtgggaaaatatagcctcatcatccatcaatgaattgttaatctctaccactaattgcttcttattgaaatccacttgtgaaagtgtcaacttgaaatatattttcagttgttcctgaaaaccaccatcatttctgctgttacctgcatagagttctgcagaggctgaaatctcacttaggcacgctgggtctcacccagggtcaccagtcctgtgacttcctagatgcagccagccaacttcaaaaactccaggaactcttggaaacacatattcttcccacggagcaagagccatccaggtaatgcaccacaccaagccttctttatcccctgtaatcttcctcatcctctatctcagccgatgcatacaagattattccctcaacwtttgtgcttcagggaagtcaccagttttgccatcctgagctcagaagaaggaaaaaagcccatctcaaatggcctgtccaaatggttgacttcagtctgctggctcctcttaggtttcactagcctggcttcagccttttttacagcactttatagsttggaattgagcaaagaccaagccaccagctggatgatttcaattattttatcagtgcttcagaacatcttcatcagccagccagtaaaggtatgtgagggatgggamgaaccattggagttgcagaagttaggggaactgaggtccctgggtgtcaatccaaggtgcctagtggttttgacaatgtaacataaacaacaaaaaacaaataggcaaaccaggctgggtgtagtggctcacacatgtaatcccagcaatttgggaggccaaggcaggcagattgcttgagtccaggtgttcgagaccagcctgggcaacatgatgaaactccatgtctacaaaaattagaaaaaattagccaggcatggtggtgtgctcctatagttccagctacttaggagtctaaggtgggaggattgcttggcccaggaggtcgaggctgcagtaagccgtgattgcgccactgtactccagcytaggtgacagagtgagaccctgtctcaaaactaaaaaaaaaaaaaaaaaagcaaactgacatttaactgacatttgttagggataagtgtaattcatgacagaaaaaactaagaagtatggcagaaaaggattgaggagtgaagaggacagtaacaaatcaacaacccaaagcactttgaaaaaaataaacaacaaaaaacttaaaatgtttttaattaagaaaaatgtcaaacccacacaaaagtgtagagactagtacaatgcattctaaagtcgtaccacccagcttcaacaataaccaactcatggccaatttgtttcatctattatttggggggaacaatatcagacttcatatcattttatccatttcatgtacttcagactttatatttctaaaagatacagactgttctgtatcttttagatatggaaaataaatataaatacaaagggacagcctgagggaattttgggggtgatgaaactacttggtatcttgactgtagtggtggatatacaactctaagtattaaacaacactcatggaattacacaccaaaaagtgactttttttttttttttttttttttttttactatatgtaagttaagatataaattttttaaagcaaaacctgtaattgcagtggccaaaacacatgtaagaaattcagtttcactagtccaataaaatgataatattgcatttttgtttkaataatggcaaagaaaaataataatacacagtaatgccaaggaaatgaacagccagtgctcgttaaggaaaatctggcaatatgtagtgacaacctgcaacttctgcaccttttgctagagaggtttcacatctaaggatccatctcaagaaaatccatagtggctgggcgcagtggctcatgcctgtaatcctagcactttgggaggccaaggtgggcagatcacttgaggttgggagttcaagaccaacctggtcaacacagtgaaaccctgtctctattaagaatacaaaaatcccaggccagctgtgggggctcacgcctgtaaacccagcactttgggaggccgaggcaggcggattacctgaggtcaggagtttgagaccagcctggccaacatggcgaaaccgtgtctctactaaaaatataaaaattagccaggtatagtggtgagtgcctgtaatcccagctactcaggaggctgaggcagggagaatcacttgaacccgggaggcagaggttgcactgagccaagatcgtgccgttgtactccagcctgggcaacagaacaagactctgtctcaaaaaaaataataataaaataaactgggtgtggtatgcacctgtagtcccagctactcgggaggctgaaggaagagaatcgcttgaacccaggaagcggaggttgcagtgagccgagattgcgccactgcattccagcctgggtgacagagcgagactccgtctcaaaaaaaaaaaaaaagagtctggatcttcatcagaggttttccaaagatactgagagatgttattgaatagacaacacaaatcgtttgacagtgtaagctcccccagccaaccagattaagaactataagcaaaaaatatgaatattagcattatttagagtctgatggtccttctcctggtccccatcattgtgcaaaaattactgtgaaattagtttttcattaaaatgaagagccaaataattgaagtttttcatgagtgcccacctcttcctttacatacggtattatcttcctgggtctgtaatgtctgctcacgatgttctgtgattctcctgcccaggtggtcttcttcacattcttatactcactgatgatgagcaggatgccacggcttaacaaagagaatgaacaacaaagaggatcttggcactcttgggtaactcaagtagttctaacaactacctaattttgcaaaaagcaaattagatctggccaccttgctgactcgataaattaacccattcaaaggacttgtctctaaccaactggttatttctccttttctgcccaagactaatgcccttccagatgaggatcttcacctcagtcatcmcatcctctctcccagtgcttcatctctcccctgcattttatttaattttatttttttgagacggagtttcactcttgttgtcaaggctggagtgcaatgatgtgwtctcagctcactacaacctccacctcctgggttcaagcgattctcctgtctcagcctccgagtagctgggattacaggcctctgccaccatgcctggctaatttttttgtagtattagtagagacagggttttgccatgttggccaggctggtcttgaactcctgacctcaggtgatccactctcctcggcctcccaagtgctgggattacaggcgtgagccaccgcccccggactcccctacattttagatctttttcatctctctctccctctctctctccctttctctctctctctctccccctccccttctctcccccttgtctccccctccccttctctcccccttgtctccccctccccttctctccccctctcccctctctccctccccttctctccccatccccttctctccccatccccgtctctcccagtccccttctccctccccttctctccccatccccttctccctcctcctccccctctctcatgagccccaggtgctgttctccactgctccctatctggagctagatgcctccaagtatgtcaaattaaactgaattgtttgcctgccccacaaatccacttctttactatattttctcatttcagtcaagagcatcagcattctctgaaaaagtcggagtacataatcctaaattcctctgttagtttccacatttagtcaccatgctggagagtgcctaccctctaactggctaaggctaactggcctaccctctaactgactagggctaacttatcacctggatgaacctcacaaacacaatcttgggcaaaacaagaggttgcagaaaaattggcacaatatcttaatcatgtaaaaacgatgcatgtcttgacaagaggttatatatgtatctcctctatgcatttatagataaagtataaagaaatgcatgggaatgataaactccagaattcaggaaaggactacctgtgagggaaagaaggaatgccatcacagaggggtacacagcacactttatgttggcagtcacttattcttaagtggtgatctactgctaagcagtaggcactccattccttgtgagatgaaaaaacttaatctgactttaaactgccttccatttgtgaccagcctggccaacatggtgaaaccctgtctctactaaaaatacaaaattagctgggtgtggtggtgcatgcctgtaatcccagctacgtgggaggctgaggcaggagaatcgcttgaacctgggaggcggaggttgcagtgagccaagatcgtgccatcgtactccagcctgggtgacaagagcggaacttcgtctcaaaaataataataaattgccttccttgcacttattttgtttctctgtgcattctgaactgttggtttctctgcctaaaagagacttttttccccttatcatcacccttgttcatctggagagctctgattcatccttcaaaacaaatgtcaaatgtcacttcctctgtggcgccttctctgactttcttggagagatttatttgctcactcttcactgatcccatggtgcttggaacacacatgctggcaagtttcatgccctcctctagttatttttatttttatttatttatttatgagatggagtcttgctctgtcgcccaggttggagtgcagtggcacaatctcggctcactgcaacctctgcctcccagattcaagcagttctcctgtgtcagcctcccgagtagctgtgattacaggtgcactccaccacgcctggataactttttatttttagtagagacaagtttttcccatattggccaggctggtcttgaactcctcagctcaggtgatcagtcctccttggcctcccaatacatatataaataaataaataaataaataaataaatatatatatatatatgtgtgtgtgcgtgtgtgtatataaatacatatataaatatatgtgtgtgtgtgtgtatatatgtgtgtgtgtgtgtgtatatatatatatatatatatatatatatatatatatatatatataaaaaattaaaaatatatatgctcactcatattccattatttatataaatatacccagtactgacttcctattgtcatcatttataattctgagtaattaccacttatatgaacagtgctcccaaagtgtgatccactgactagaacagtgggtattctagatcataagtacaggaatcaggaactgagcatctaaaaacttgaacaaattgtggcagattgaagcttgtagtagtcgtagctgaagattctaagttatcaaaaaaacaagggccttgctatcttttcggcatgctctcctcgctctctacttgtggctctctgctttcttcttctcaactaatcatcgtttataagtcttgtcttctcttgagacgaagacacgggtactccggagttgaatcgcctgaggtaggagttcgagatcagcctgggcaacatggcaaaaccctgtctctactgaaaatacaaaaattagccaggtgtggtggcatgtgcctgtaatcccagctactcaggaggttgaggcaagagaatcgcttgaatctgggaggtggagactgcagtgagccaagatcatgcattgcactccagcctcgacaacgaagtgagactccgtctcaaaaaaaaaaaacaaacaaaaaacagatatggtcttgctatgttgcccaggctggtctcaaactcctgagctcaaactatctgctagtctcagtacaacatcaaactcctgggcttaatcagtcctctcacctcagtctccctagtagccgggaccacaggcatgagccactatgcctggctaattttttatttttttgtagagacaacgtctcactatgttgaccaggctggtcaactcctggcctcaagtgatcctgctgccttggcctcccaaagtgctagaattggaattacaggcatgagccgctgtgttcagcctagtaactcatttttactgtattgtacaaaagtatcagtccccaattgattggaattttttaaaaaacaggtcctttataatagagagtttaagaagcactgcataggtagttttattccttgtttaacatttaaaaggaggtgctcacagtagatgctcaatgaatggtgagtgactgcttaatgaaatataacatttctttggtctatatttgaatttttgacagcaaaatgttcttcgtcagtaccaggttcaagagataagaacaaccccgtctatgtagccccagctataaatagtccaactaagcacccagaaagaaccttgaaaaagaagaaactcttcaagctgactggagatattttgggtatggagaggaaatggcaacatactgataacacagcaccttttccagaagggaaaggaagagagagaataaaatggaaaataaagaagggttaaaaagctgtcttttaaaatcttcaccctgtgagatttgggattccagtaaagcaggtgggatggtaactggacagatccctgaccttggagtctagaggttttattgtgtgcttgagtaagtcactttctccacctgcaaaatgtaataacacttgatctatggagggaaaatgaaaatgctttggcagatggctcttctgtaggtgccagttgactggcttcaacacatctagttcattattggattccctagtccaaataagacaaattctgcttttatcatgacttcacttcttgtaaacacaatcacatgagagacagagtgcatgcttagtccttagagctaaacaccatatttcttgtgcgggattttatgtttttttttttttttttttttgagacggagtctcactttgttgcccaggctggagtgcagtggtgcaatgtcagctcactgcatcctgtgcctcctgggttctagcgattctcctacctcggcctcctggttagctgggattacaggcacagaccaccacgcccagctaatttttgtatttctagtagatgggggggttttactatgttggtcaggctggtctcgaactcctgacctcaggtgatctgcccgtctcagcttcccaaagtgctaggattacaggtgtgagccactgtgcccagccacagccattgtatcttattttaagtaaaatgtatcattagtggcagaataattctgkgaaggaaatgtgtatgtatgtatttataattattagattgaaccatatgaaacagccagtttttgactggttttgacctgcataagtctatagacttaggaaaaatgaaaaagacatagaggatttctaagttaaccactcaactatgacatttttttcctcttctaaacaagtacaaatcctcttccttaccctgttgatgactgcaatctactctgcaaagaactccaatagattttacctccaccaagctatctggaagacattttcgcaccagttctcggaaatcaaacttcttcaggatttctacccctgggccaatcatatccttcttcctagcctgtatggggattacagaggtaagaatgcagtcctggagcccagtcattgcaaatgtggggtacaattaattttccaaataccccgtaccaagacctatgagaaagtggacgaaggtcagctggcgttttgtgataacggccatacctgtgggcgtcccaagagcctattccctggacttcatctaaggaggttcagttacatctgttcacccaggcccatggtgctgattcccactgatgagcttcacgaaaggctgacaagcaagaatgagaatggattcagttacatcatgagaggtaactggagtgacccctggaattcaaccacacgtagcaaagaaggctgttcaataagtgcaaaaccaggaatgtggtttcattgaaggtaacttcctggaagagtacaagagaggtaaatttgttggagacttacatctccaaaagtgtttttattctcccatcacattagattctaatttatctgtatataatttctttcttgcaggattttggttcgtttgtttgagacggagtcttgctctgtcgcccaggctggagtgcagtggcaccatcttggctctctgtaccctctgcctcctgggttcaagcagttctccctgcctgagcctcccaagtaactgggattacaggtgcccgccaccatgcctggctgatttttttatttttacaatttatgtatttacatattttatggggtttcgccatgtttgccaggctggtcttgaactcctgacctcaagtgatctgaccaccttggcctccgaaagtgctgggattacaggtatgagccaccgtgcccagccagaattttgaaaagtgtagctccattgctttctagcttttcatgttagtgttaaaaagtattatgctggcatgctgattcccagtccccaaccccaaaagtttttaggtttttttctttgtcctctgagttatgaaagaatgtcatagaggtcgggcacggtggctcatgcctgtaatcccagcactttgggaggccgaggcaggtggatcacaaggtctaggagttcgagaccagcctggccaatatggtgacaccccgtctctactaaaaatacaaaaattacccaggcatggtggctcgcgcctgcagtcccaactattcgggaggctgaagcagaagaatcgcttgaacccaggaggtggaggttgcagtgagctgagacggtgccactgctctccagcctgggtgacagagcgagactccatctcaaaaaaaaaaaaaaaaaaaagaatgtcatagaatgttctatcatctggaaacgtgaccttaagttctgaggaattttcttgcatttttttggttaatttcttctccattttttctgttcactttttctgattttctagcattttgacattgtaactcctggagttctgattttcttatatttttgcttctgttttccatctttttcatctaatatctgcagtatttaatttttatcttctaaactattttttctttctataatatttaatttccaaattgtttttttcatagtctcttattgttcttttacggatgcaatatcctcttaactctgaggatattatggtggtttttttccttctgatcctttactgtctctagttttttgatttgttgtttgttttgatctacagttttcagcattagaggttcaagtgcctggctgtccttttaaagaaaggcaggctgggtgcggtgtctcaagcctataatcccagcactttgggaggccaaggcaggaagatcacttgagcccaggagttcgagaccagcctgggcaacatggtgtgaaacctcgtctctaccaaaaatacaaaaattagcctggcatggtggtgtgcacatgttgtctcagctacttgggaggctgaggtggcagaatggtttgatcctgggaatcaaaggttgtagtgagctgagatcataccagtgcactccagcctgggtgagagccagaccctgtatcaagaaaaaaaaaggcaataaaaagcaaataaatgctaattataagctctgtgcctggctgggcatggtagctcacacctgtaatcccagcactttgggaggccgaggcaggcagatgacctgaagtcaggagtttgagactagcctggctaacttggcaaaaccccatatctactaaaaatacaaaaattagccaggcatggtggcacatgcctgtaatcccagctactcaggaggctgagacaggagaattgcttgaacccaggaggcggaggttgcagtgagctgagatcgtgccactgcactccagcctgggggacagagtgagactccatctcaaaaaaataaaaaaaaaataaaaaacaaagctctgtgcccatgcatagagcttatcaactgggtatctaagtctctctttttgggcagtcagtttttagagaccctacaaactccaatcttgagtatatgagcctattatacttatcagagcaagttgagggaagggatctgggaagtgtctcaccatgcagcacgtaaactttcccttaatccccttttccagtaaaccattactctcagaggtagctggtgcccccaagtccagattctctcatacagcatcactgggaaacaaacctttagtcatggggtggtagaaggcaagataggtagcaaatacctggttgtgaatggtgagggaggaaatttggaatctagttgttgtttwtatatatattgactttcagttgatgctattttcagttccacctgaacttytaccttcagaagtacctgatgcctgcaatttctgaggctttccaaggtttcttggttagaattagcttgcttccgggtttcctgtacagctgccttagatttcagctttcttgaacttgctaagtcaatgtgattcctctacttttcagcttccagcagtttgttgctctcatctgccctccttttcttcatctattgaagtttttactttatcctgtcactttcattatagtggcattttgtaagggattggagttaaactggtccattcagttcccccacctttcacaggacatctatcctaatccaacttctctttcttctcccagaattggctcacaagtatccttccattttccatcacatctttctcctaatcaagaattcttctctcagacctgcagagagtagaccacttctcttatgcttgtttctaatgaagcacaaaggcttcctaagggtcttcatggggtttttagttactaacaaaatatagacagggattaaaataaacatgggaaaagttccagtcttgagagctagctaggtgaaatagaaattccttttgttcttaaatgtcttttttacctacaaggggtacatcttagttctaatgtcacagcatccttagggtgttgctttgccagccagaaacctctgtggccggcagcaccttctgcctgagtattgcttgcagccactgtgctcgttctgccgaattggcctggtagcctgtactcagctcctgctactggcctggatcccacacctgccaagagacagccaggtacagagcagtgaggtatgtatggatgagcaagcacggggtccagccattgcacacagccaggcacgctggctgctgcagtgagttgggcagctctatgtgctggcacaggtgccggctccctgaaagactgaagctggaccagatgtactgcatgtggtttctgctgtgggtaactgcatctgaggaatgccatggtgcctagaatcttcgagatgccagaagcacagagccccaaagagggtgtcacagccctggctcagggagcctgtaggtctgggctcccccaaagggccacagctattctgtccttctcattgcttgcagtgtggcaagcaagggggtgtgtttcagccctgtttgtgttacagctctttcagtcccaccactcagcgggtcccgagttcttgtcctgcatccaggaagaatgaggtacactgacaactggagggtgagagaggtggagaggagcttcattgagtgacaagacagttttcaggaaacctggagttggtagctcctatccacaggcaggtcgtcccattgtttgtgtagccctcagcagagagatctggagtgggtagctcctatctgcaggcaggtcatcctgccatctgcccaagtctggctgagtctggtgtttttatgggcttcagaggggagtaagtgtgtgcttattggtccatgggcagccatgggtgggcccagaagaagcgccataagttctcaattgagttagtgaaactggcaggttccagaactggcagcccagcccccaggcttcaaatgatccctggctttaaaggtggggctttactggggacctgcccctttctgcccaggagcctgtctgcctcctgctgccatccrtgtcacccatggtgcccaggctgtttgtgccaaggggcacctgcgggcccatgscaagccaccctcagcccccccttaccctccctgcctcacatgcttgtccgtgtccaaagttcggagaaggccgaggcagtagggggctgcttgtcagcactgccccaagcgcacacacacccaggcttggccaaaactttgctccaaaatcagagcaggtgctgggagtggggagaggccatgcagtgggagcaggcacttctgaacctgyaggggcaggggggtttcctgagcccccgagtgcagggatgcccaggtctgcagctgtggctgggcagctgcagctctgcccaggagtgtggggctcccaaccctccaactcagaagggggcagggctcccacctgttactggctcccgcagctcaacagygcacaaagccccggccatgcctcccactgcagccgatgtcatggcagcagccactccagacagggtgctgctgccatcactaatattttgaagctttgtgaaaggtttgtattcacaagacctttcatgattttataaacgtcaacattttcaatgtccttccaggtggaggctgaagccttttagtccatccttatgtaaatgactgagtatccatgggataccgttagtactcgtggggtatcagtgctttagacctctctctgcagccactctgacatggatagggtaacatctataataactgttaagccaccgacacctcccttcaaggtagggtcaacagcatatcctttcccactactgacttttgtaaaaccagtatttctccaatagctttgcatacatgatctcctttaatgttcatgacagctctaaaggaaatactaagtggagcactgagactcagaaacatttgatgatacaggaagagttggggttattcaaagacaaagtttaacaagaagagggcaaaagttttagactcttgactccaggtgttctttgttattctcaggtgctttcttcacctctttgagactggaaagcttcacttcccttcagatgtcaaagaagggctgtgtctggtctatcatctcacaagtcatctattatctactggtctgttactatgccttcatacaggtgagtcaataatgttagatgtcagcctgggcaacatggcaaaacctcatctttaccagactacaaaaattacccaggtgtggtggcatgcacctgtggtcccrgctactcgggaggctgagatgtgagaattgcttgagcctgggaggcagaggttgcagtgagctaagatcacgccactgcacttcagcctgggcgacagagcaagaccctgtctcaaaaataatgatgatgatgatgatggtgttagatgtgagaaataaaggttgccacattttatttgggaagctctacaatgacatgttactagaattatggctataattttggtccttttcagaaacctgaattcagttaaaggctgactggttttccaccaaatagattggctctttcaatttttcaggagctaaagaattaagtctatagaaatagtacttttgtagttttattagccctatatgaagtaataccaagcaagtatgatgaacaaagagcaagcactcaaaaatacaaatgattggctcatgcctgtagttcaagcactttaggaggccgaggcaggcggattacctgagggagttcgagaccagcctggccaacatagagaaatgccgtctytactaaaaatacaaatttagccgggcgtggtggcatatgcctgtaatcccagctgctcgggaggcggaggttgcagtgagccgagatcgcgcccttgcacttcagcttgggcaacaagagtgaaactgcatctcaaaaaaaaaaaaaaaaaagaaaaaaaaaagtgattggccaggcacagtggctcacgcctgtaatcccaacattttgggaggccaagatgggttgatcacctgaggtcaggagttcaagaccagcctggccaacatggcgaaaccctgtctctactaaaaatacaaaaatcagctgggcatggtggcgggctcctatagtcccagctactcgggagactggggcagaattgcttgaacctgggaggcagaggttgcagtgagccaagatggcaccactacactccagcctgggtgacaagagtgaaactctgtctcaaaaaaaaaaaaagaaaagaaaaaaaaatacagatgattacactcagaagaaaatatatttatatcttaagccaaacatagtattttttttttcattctcaggcttgataactaatttagaaatttttgctgggcatggtggctcacgcctgtaatcccagcaccttgggaggctgaggtrggcagatcacttgaagccaggagttcaagactagcctgggcaaaatgtcaaaaccctgtctctacaaaaaatacaaaacttagccgggcatggtggcatgtgctcgtggtccctgctacttgggaggctgaggtaggaggactgcttgagcctgagcctgggaggttgaggctgcagtgagctatgatcgcaccactgcactccagcctgggcaacagagcgcgaccctgtctcaaagaaagaaacttttgtattattgatttttaagtgacagtttatgatctccaagaaaaagaataaatgtatccaatggaagttgtttgaagataacttttttgtaagcagcatttctgaagactacagacctgaactaagaccataacccatttgtccaagtgagatctgataaatgcctggcagtgtgctttgcccacagacatcagctgcrttcatcacacttgagcagggagagacctagctaatctctcagacaagcaacagtgactgtgctgtctatgtttagggttgtcagctgaaacagcagaagtggaggttcttcactgggaaaagaaacattctggacacaagtataatcctcattagcttcatcctcctggggcttgacatgaagagtatttctctacataagaaaaacatggcacgataccgcgatgaccaggacaggtgagaggaagcctgaggggcacagcatattcctacctcatgtctaaagtttcctgtttatacacaagtattcttcaaactcccctaccagatctgtatttgcataacattagagttaaaagagaacttggactcatgtccacagcagagaagacagtgaactagaagccatttaactgctagtcacattgaagagctcttctgccttcattagtgcttaggtatgtgcttaaggataatgcatttaaatttcagaagggcctggaattggtcattattttgccctctggcgaaggcataaagcctaacgcacgacaaataatcctttaaataaaaccacaacacatagtcccatcctttaaatgcaaagggagctgctttctgggtagggatgttcatctattcactcatccatactaagagatttttggtgcctctttgggcaccttctctggtttttcccatggagaggaacatctatgtttcccatgccaagtgttgccaagtggtgctttgctaacctttgcatcagtggccaacagcctgggtggtgatctgtstaacttttcctgaggcattgtttcaagtaggccttatggagagcagtttatgcagtgacagcggatctgtgcagagtgccacttgctagtgtctgtggggctccttccaagtaacctggttgctgcaacctaaaattatgaatgtctctctctcaaaacaaaacctaattgctaagcaacacccctcgcctctagtctaccacccatcattttgttctaagcttgattgcacctattacagcaatcctgtactgccagagaacacaggattagtgtgccacagaaaacagaccagcagcatggctcctctctctgggctgagttaatctccttttgagaggagagatttggctcagagcagtgcaggaggctggttttgcttcccaggatgaatttggaataaagaaatcagctagaggtcacattttaaggcttcttcggcacagctcccagtgcaatctgcagcaggtagatcacttgaatagtatgtggccttctgttactcccatatccacaactcacaggaggccacaatagaaagcagttctcacatsaacaagcatttgacctcacaggactcagggctgccacgatcagcagcaggggcgckggggaaactgcagtataggcacatacttcttgctgagtaactgtcagctttccttggtgcagattcatcagcttctatgaggcagtaaaagtgaactctgctgcgactcaccttgtgggcttcccggttctcctggcaactgttcagttatggaacctgctgcrtcatagccccaggctgcgggtcatcagcaggacactgagccgagcctgggacgaggtggtgggctttctgctgatcatcctaatcctgctgacaggctatgccattgccgtaagcccccacgttgctgtctctccttctccgtrtgctgtggtcttggaatcgcatcgcttcccatagaaatggtcacaacacagaaacccgaggtggtacagtaggaaagccgggtttagwtctagttccacacttaactggtatgacttaaacccacatatttttctctaaaatggggataaaacttagctcacacggtaatataaaggtcaaatcaacttctatgaaaacactatgttattacaaaggaagtttatgtattctttgggcataatttggccacaaggaatttctgttccattgcttctatgttggccacatccccaagcacctcaggatagaaagatgtgcgctcggcttgcactaactggcctttctccttctgttcagtttaacctgctgtttggatgcagcatctctgactaccggacatttttcagctcagcagtgactgttgttggtctcctgatgggaatttctcaccaagaggaggtaaaaataataatttgtttcctcacagaattcaatatattgaacaaggaaaattgggggggtccttatgaaaacagccccctactgtacactgcacactggaaaagggggaaaatttcagtcctttgctctactgctttatggtactgcctatgcatacagcatttacatggctgttgctttcagaaacctgccctttcctaagcactcagtccctccttcctcacttcttgtgtccttaatcttattggcaaaggacactgagccgaagcttgtgctcttgtgcttggccagattaacaagattctstgcttctcaatggccccttgaaagtgcattaacagggtagggtaagttggttcaagccatgagaggccaagaaggggaggactgcttgaggccaagaatttgagaccagcctgggcaacatagagactttgtctctactaaaaataaaaaataaaaattagccaggtgtggtggcatgcacctgtagtcctagccactcaggaggctggaggctgaggagagagaatcctgtgagcccaggagttggaagctgcaataagccatgatcatgccactacactccagaccctatgtctatttaaattaaaaaaaaaaaaaaaaaaaaaaggccaggtgcggtggctcatgcctataatcctaatactttgggaagccgaagccagcggatcacttttgaggtcaggagttcaagaccagcctggccaacatggtgaaaccccatctctaataaaaacacaaaaattagcctagccaggcgtggtggtgcacacctgtaatcccagctcctcaggaggttgatgcaggagaattgccttaacctggcaggcggaggttgcagtgagctgagattgtgccactgcactccagcctgggcaagacagtgaaactgtctcaaaaaaaaaagtgacataatggaagtgacaaagaattaggaaggtacagttctaagagaaactgcgttatttctgttgagttaataactactcacttcagagagcctattatttcctcccaggaactaccaacagaaatccctgccttcctcctcaacatataaagtaggaaacccaaatgaggcactgggctccaaaccctggtatgtaaagggtagatatgaccaagcaaggaaaaacctgccatttaagcagtgaaactggcaagattttgatcatggttgatcattctaatgatctagaattccaaaattactaattaaaatgggtaggttcagtttctaatgttgtatctgcagggtctgcatccacagattcaaccaatcccagaatgaaaatatttgaaaggtaacaataaaatataacacacattttaaaatacagtagaagagtcaggcatggtagcatgtacctgtagttcytgttacttaggaggccaaagtgaaaagattgcttgagctcaggagtgaggatgcaatgagctatgatcatcccactgccctctgagcgagactgtctcccacaaaaaaccacaaaccggtgtaacaactattttacgtagcagttccactataaagtactagaggtaatctaaagtttatttcaagtatragagagatgtatatagggtttatgcaaatactgtgccatttttaaaaagggactttgagccgggcacagtagctcacgcctgtaatcccagcactctagaaggccaaggtggggctgatcacttgaggtcaggagttcaagaccagcctggccaacatggtaaaatcccgtctctactaaaatacaaaaattagccaggcatggtggtgggaacctgtaatcccagccactcaggagactgactgaggagaatcgcttgaacctgggaggtggaggttgcagtgagccaagatcacgccactgcactccagccggggtgagagcaagaccatttcaaaaaaaaaaaaaaaaaaaaaaagtgggggagaagacactttcttaacctttagggaagcttgcaattaaaaaataaaaataagggacttaagcatcctcagattttggtacctgtgggggccctggcgccaatctctctcagatactaagggacaactctaactgctgttttggctgactaggctgtgttctgttgtggttctagctccaataactaggggatgagcctttgccactgcagcacttcgtatcctaaagctgtgaaggaagtaatcagagtaacaaatttttgctgacacctccttttggggataaaaaaggaacttttctgctttggatgtaattgtacataaaaatacagtaaacataaagtaaaaaacattaaaaaacaaatagagcaaacaaaaaataaacagtaaaattgtacataaaaataaacttattggaaataagtcttgtatcacaaactcagagattgcccacattatctggttgacctgaaattgttataataatcatttttaagtaggtaaaacagtttggtgcttgaaaatattttgccatatagatttccatcagggtgrcattgactgtaatcaacccctctgttgggatatttttaaacagtgccctagtggcaacaatgaatgggccaataccaagggaaaataaataccatttgttgaaaaagaacatctaaattttaaacaacagtttttgttatgggaaccattccaataagcccagaacttgatatttatgtatgcagaaaagtaaagaatggcagaactcaatgcttgtacctttaaaaatgacaatggaaaaaaaaaaatactaaaaagccagttttctgtggccaacctgttaacttttattggaatgctcctgtgtttagggttgtagtttcttgatatggcagagacagtgtgcattctcatttctggtatgcatttaatctttcagtgtttgcttacccccctcccacttttagcttccatgattagatgtattttttgccaaaactcatgtgacatttgaatcatttccaattccactgcaactcacctgttttcttgtgaaagccctgcagtcacaattatcttaacctccttaaaatgagtcattcctgctcttctgtccatttaaaagtattttccttcttattatcttttgactctctccctaagtttccttcggataagcttttcttctgataagatcccaaacactagcatatagcttatgtttgtaaagtataaactaaattgtcagtcactgcaagtgttcttattgttttcccaggttttcgctttagacccagtcctgggcacctttctgatcctcaccagtgtcatcttgatggtacttgtggtaattaatcttttcgtttcggccattctcatggcctttggaaaagaaagaaagtcgcttaaggtaggtaactaaaagataaactagcatgctrttatatcactgggaaagctccactgtaactgcccctaagatgacgggctgacataatttataatgcacagtatcatattccctttattagtttcaaaagctctgccagctatcttcctaggaaacccaatttataagactacataatattctatagccattgtcctataaatagttggctcgcaaccattagtggaaacactccaatgcctgactgcaaattattaaagaaayagtatctttacatttactaattttttaaaaatctttggtactttttttactccactattagcagtaatttcaattttctcacttttctctttttgtcttcaatactcagaaagaagctgcactaatagatacactgctacagaagctctcaaatttgttaggaatcagttggccccaaaaaacctcatctgagcaagcagccacgacagcagtgggcagtgacactgaagttttagatgaactaccttaatcctgttatctcctacttggcttagtatttattagcgtattactacttatctttgcatggcatagctttaaaattataatatactttgtttttaattctgtaagttaggaatcaaaatccccttggtcccaagttcttatggatcttggcactgtcaagataggattaacaatgcaagaatactacgagacaaactagctctgctgccaagcagcaagtaacagaactcaccacccatggcccaggatggctgcgggaaatgaagcagtcagaagtgagctcactgcaacttactaaaaataaacatccaaggatgaggcatggcagatgcggagccctgccactgaggaagaccaaggaaattcacagatgctatctgggctatctaaatacagagatcaaaatgagctctgtactgctccaggaatcctgaaactaagggctggtttacatggatcacttggttaaaatattctccactaaaatccagatttatacttcatcatctgaccaaacagtagagaaagcaggacacaggatctttaactttattagcagctactgagctacagaatacaaaccaactgaaaacattaaagaaaggctgcctgaaacaagtatgtacaggtatactacacagaagcaaaagctgtatcatccaatcccaaagccacccctgtggggaaggatgaccttagctatgggccaaaggagtaacagaagttatgacataagagtcccatccatccaggaaagcagtgaacaactacagctgcatgggcaccaaaaatttttctgagattagttttaaaggttccatgaatcaaagttttcaaatgaaaacaggtacccctcttttcctgtaggctttccagctcactacccaaaagacttgagtacttctattaaggcagctggaagcccaccctaggacttgaatggcaccttgtcctttctctgccagtaatgcaatccaacacaatatgctacagggaaaacagaatttccacggtgccgccctctggtacaagggaaacagcacgcaaagcaaaaggccacagagggctccctgagaatccagtacaactaagcgaggccttcaactgtcaagacaaactttgcaactggatcccggtgggacagtgccctgcagcgaggagtactgtatatgccaatgagagggcccagcttccaggaaccgttacaatggcgtcccgagtcattttccctctcccacttgcattcgagagtgagaaaacacacaaggtggccttgattctcactcaccacaatccccctgtacagaggggtctgtttctaagtctggaacctcaacacgaggctgggatgcttcacaacgtgctctctcccactgtccagccatctttggtggtcttcccacagtgcttcccccatcctctcacactcctgtggagggaccatgggacgggccaggaggaaacctgggatcactctgacaggaaacggacaagcacagctgccaggagccagttgctctggcctcagtctccaattgttagtctcaggatcaacagagaactggaaagcagcagaatctggaggagcaggaagagagcccagagggagtgttgtgctgagtgacggttaacagatgaaacagaatttcatggagattctttgttacaaggagaaattgctcagtctcaactcccaaaacgtgaaagttgcctggtttaagagacctatgttttctttttcagctcttcaaacctccgggaaagatcatcaaagtcaatgtcttcagatgctgaggtgctggcaccagcagatgcagttggtagtgtgtctggcacagatggcaactctggtaggacaaagttgtcatagttatctgcaggtctggaaggaagctttgcagaggcttctggcttgggtccaggacctaattagggcaaggagcacaacgttacaaataccagagaaatgactcagatcccctttggcagtaaaaataaaatgatcaaaacacaggagaaaaccttagttcacaaacttttttttttttttttgagacagtctccctctgtcacccaggctggagtgcagttggcgtgatctcggctcactgcacctctgcctcctgggttcaggcaattctcctgcctcagcctcctgagtagctgggattacaggcgcatgccaccacacctggctaatttttgtatttttagtagagagagggtttcaccaggttggccttgaactctgatctcaagtgatccacacacctcagcctcccaaagtgctggattacaggtgtgagccaccgcatctggctaaaaaaaagttaattctagaggctaataaacatttgaatgacagttaatatctacattttctaattagggttgaatcctgttttactttcctgtggtgagaaaaaagtttaagggaaatcaaagtgggatacatggggccacatccacagagcaatcgactgttccttttcataaggtctgttactttaccaactaagtccaaggagtgataataggattctgatagaacaaacactgcttccttaagaaccaacattctttagggattgggggcaaagtttttttaaaggaatataatgtccaagttattttgttataatagtctgatctgtatttccagtcttccatctagtattttatattaagatcatgcccccacacacatctactgtatgtttccttaagttctagattcaggaaaactaaattacaaaaaaatcaaaatagtgctctgactctggagggaagggcagagttgactggcaacaagggaactttgaggtaagagtaatgttgtataccttgatcagagagtggaattgtctgtgtatacacttaaaatgtatgggtttgccgggcgtggtggctcacgcctgtaatcccagcactttgggaggccgatgtgggcagatcacaaggtcaggagatcaagaccatcctggctaacatggtgaaaccccatctctactaaaaatacaaaaaaaaattagccaggcgtggtgggggatgcctgtagtcccagctacttgggaggttgaggcaggagaatggcgtgaacccgggaggtggagcttgcaatgagccgagatcacgccactgcattccagcctgggtgacagagcaagactgcctaaaaaaaaaaaaaactatgagtttttttaaaatgtaaattgtatctccataagacaactgtctaatattatttatattctttttagacaaagtctcactctgtcgcccaggctggagtgcaatggcataatcttggttcactacaacctccgcttcccgggttcaagagattcttctgcctcagcttcccgagtagctgggattacaggcgcctgccaccacacccagctaatttgtgtatttttagtagagacagggtttcaccatgttgaccagcctggtcttgaacacctgacctcaggtgatctgcccacctaggcctcccaaggtgctgggattacaggggtgagccaccgcacccggcctctaattttaaaagtattcttccctctggtttttgctggtaggtattatcttaatttttgttttttaagacagggtctcacttttgtcccccaggctggagtacaatgatcactcactgtaatcttgaactcctgggctaagaacgcctcttgagtagctgtgaccacaggtccacaccaccaagctcagatgggttttttaaaaattttttgtggaaacaaggatcttgcccaggctgttctcaaactcctggcctcaagtgatcctcctgcctcagcttcccaaagtgcttggattacaaatgtgaatcaccacacctggccagtacttttttaattgagtggtagctacatgaacatgattgctttacaaaattcactgagctggccgggcacggtggctcatgcctgtaatctcagcactttgggaggctgaggcaggcggatcacaaggtcaggagttcaagaccagcctgaccaacgtggtgaaaccctgtctctactaaaaatacaaaaattagctgggcgtggtggcgtgtgcctataatcccagctactcaagaggtgaggcaggagaatagcctgaacccgggaggcagaggttgcagtgagccaagactgtgccaccacactccagcctgggcaacagagcaagactccgtctcaaaaaaaaaaaaaaaaaatcagctgggggcagtggctcatgtctgtaatccaagcactttgggaggccaaggcaggcggatctcacaaggtcaggagatcgagaccatcctggctaacacggtgaaaccccgtctctactaaaaatacaaaaaaattagccaggcatggtggcgggcgcctgtagtcccagctactcaggaggctgaggcaggagaatggcgtgaacccgggaggcggagcttgcagtgagccaagatcacaacactgcactccagcctggacaacagagcaagactccatctcaaaaaaaaaaaaaaaaaaatcactgagctatcacttaggatttgtacttagaagcaggatatcctgagttctattttagcatttgggaagagaacagggcatgcagatagaagtccatggacatggaaacagtctctaagggaggaacaataatgagaaaacagcagagggttcagcactgagctctgcaggtttctgattgatactactcaccaacaatctgtgcagaagagatattcttatcagcattaatgtcatctacctgaaacacaaagattgttaccagaggagacagcaatagtgtcactggagaaagtactggtgtaagcccctgtgtttccaaaagttaagttgctcaccaaatgcaacagagcctgttccaaagaaactgcccctgcattttttccaatcaggtagatactatgttgaactcctttgattttgagacagggtctcctgtcacccaggctggagtgcagtgatacaatcacggctcaccacagcctccacttcctggcctccagccattgccccgcctcagcctcctgcatagctgggaccacaggcatgcagcactatgcctggccaatttttgtattttgggtagagacagggtttcgccatgttgcccaggctggtctcgaacgcctgcctaagcctcccaaagtgctgggattacaggcgtgaaccaccccgcccagccccatgttgaactcttaactgccaagcagagaaaaaaaaatccttaccatactaagacaactttaatgatactttcacctttgggcaaagggaaagcattcttgaatatatcttaagaaccaagtcctcaaatactgatgaagattttcgacctcattcctaccaacggctgtgggttatgtgacgcatgcaaaaccaaagcataagaaaaactcaggcccaaggtagaacacatcagctacagatgggaaccaaaggaaagaacagaaagcaagctcaggaacaggaagatcttcctagatgagtaatttacatagcaaatgccacaccaatttgtttctcagtaaaatactagatggagacaggtctcaaaaggcctacagtaactgaagaaacaaggctggtcaaaaacaagtaacctgaaccacctacagttcgaggtattatattagctattcattagcaaattttaactagaatactaaaatgtgaaatcaatgctgtcggccgacatgtaactggacatttctgattaagatcaatctggtcactcttcctttacatgtgttgagaacacataggactaatattttaataattatgatactttagcaccacgattgtatcagctcagtgtgattatctgcctagtcggtcaaaacaactggctaagtgccctcatagagcactacaactttctaagaaatctgcagttccttcctgattcctggcttaattgcagacaaagcattgccaccaatgatactgccatcaccacccactccacat

SEQ ID NO: 97125 - DNA, 129336 bp, Homo sapiens
gacctgtccctagtgatagaaggaaatgggtgggagccacgggatctgggattgcagtgagaagtagacaagaaaacaaccataacaagtgcctcttctcaggtgttttcggattgcaaatatgaaccactggccaccctcagcaccgatgtccccatcctgtcctgtggagggctggccaagcgctggctggttcctggctggaggttgggctggatcctcattcatgaccgaagagacatttttggcaatgaggtgataatatggtgaaagagtatgtgtaatttagggtatatatttatttcatgagcacagtggggacaagggaggcttttttcttttctttctccttgtcagtcaagcagcatgtgtgtggcagagctgggctacgaacccagagggtctgatctaagaatgccactagacaccatcactttccaagattaaaaacctgatagaaaggtcagaacaagaaactctaagacagagatgcttaagaaaagctaaacaacatgtttcttgtgggtgtcttttagatccgagatgggctggtgaagctgagtcagcgcattttgggaccctgtaccattgtccagggagctctgaaaagcatcctatgtcgcaccccgggagagttttaccacaacactctgagcttcctcaaggtaagggcagctcctgccctccactttgggagtttgggagtcagagaatgccgcccgtggaattaggaataattggttctcctttctggagccatgttccaatattaggagacggcatcggtgtaagcatccacacacacgtttctcacttccggccattctctctgcccctggtgaaaagcttcaagtaatagagctttttctttttcactccttatgccagaacatcacacctacgttcccactcttcaatgagggggctatttttaatgacttggcttttcttttacttaaattttgatccttgatttctccttgcctcttcttgtagtccaatgctgatctctgttatggggcgttggctgccatccctggactccggccagtccgcccttctggggctatgtacctcatggtgagtatgtgggtggcaggcactaggtcaatgcatgttgtaaggcaaagggcagtcattcagcagaattgccacaggcagtcacgcagggtacaaagacaaccagctggcctcctaagccaagcagtttaggagttgtcttattctgaattgtcccactgaggtaatttagcctctatcagttctcataaaactctttaaatgacttaattaggcagggcatggtggctcacgcctgcaatgccagcactttgggaggccaaggtggacggatcacttgagcgcaggagttagagaccagcctgggcaacatggtgaaactctattgtctctacaagaaataaaaaaaatgagctgggcgtggtggcacactcctgtagtcctagctccttgggaggctgagatggaagaatgacttgagccttggaggttgaggctgtagtgagccataatcgtgccactgtactcccgtctgggagacagagtgagaccccatccgaaaagaaaaaaaaaaaagatttaatttttcagtacagagaatcattttatatatgtagatacagggaagatttaaaacacaaataagaggcttttcataccattgtaattctcaactgggagtgatactggttccctaagggtatctgggaatgtatgggaattttgtttgttttcagaatgactaggggctgccattttgtgggtcagggatgttaaatatcctgcaaggggtgggctagtctcatgccataaagagttgcctggccctaatgccagtagtgtctcttttgagacatactagcattctatttccagcttttatttatcagcatcagggaaggaactctttaatatttattaataaaaatatatcctgtcttccctgagaaaaattccataaatattagccctcttatttatcagtgatcagtagcacagttccaagatatcttttaaagtagcccctaccttaatttctggcacaggaaattggcctgttctccctccttctgataagttggcctctccctcctgttggtataggttggaattgagatggaacatttcccagaatttgagaacgatgtggagttcacggagcggttagttgctgagcagtctgtccactgcctcccagcaacggtgggtgcctgtgtccctcaggacattctcaacagtttctagagccccagaagcaagttctgagctggtttttagcctgatcttttctcctccaacaaaatgtcttctcatttgataagattcaaactgatgtgtctcatggatcctatttaaaatttgcttctcccccccatcataatcccatccatactgggaagaaaagttgtaaacaaacgttctaggtgagaggaaattgatcctgtcccacaagtcattttaagatgaatgaactcagttgctgacttagcatcccagtcatgggagctgaatgaactgatggccctgatgaaatggtaccacttcttgtggatcagggtcctgaccattttagggtggtccagtaccagactcaattgctctgaaagtaacagactcttctttttgcagtgctttgagtacccgaatttcatccgagtggtcatcacagtccccgaggtgatgatgctggaggcgtgcagccggatccaggagttctgtgagcagcactaccattgtgctgaaggcagccaggaggagtgtgataaataggcctgcatccattctcctgaggatgtgtcccatctagggaaggctggactaggccttgcggctcctcagggactcaggtggccctactgggagaggggcctcaaatgcaccatgtcaagggttcaagattgttcctgcttttccccaagtacaaccacacccacactcagatcctcctcattcacatcgcagattctcccttgctctgcgctgctagagtgactcactaattcattaatctgcctccctctcgtaagatttccttctttttttcttgaaagtaccaggtgaacaaagtttaccagaaagcagttgagacaagaaaataagagctcaggatgagggaaaagaaaaagattgagagaatttgtgcccccaaccatttcctcagactctaagaaagaacacgctctctccaggcaggtctgaagctcaactctcttattgcctcacttcaggtatacctcactttacacaatagaattataactggaaagaagttggggacacatgtatttggtgattacattttaaacacattaggaaaagttgctatttgaactttttattgatttttggggggagtaaagaattattttgtgatgcaaataaatatcctttaattgatcgacttgccaaatttagatttgtgtgcatcaggctttcttttttttctttttttagagaagttcaatataagcttttcttttctttgtttctttctttctttattttgagatggagtcttgctctgtcgcccatgctggagtgcagtggcgcgatctcggctcactgcaacctccacctcctgggttcaagcgattctcttgcctcaacctcccaagcagttgggactacaggcgtgagccaccatgcccggctaatttttgtatttttagtagagacagggtttcaccatgttagccaggctggtctcaaactcctgacctcaggcaatctgcccgcctgggtctcctaaagtactgggattacaggcgtgagccacctcgcccagcggcatcaggctttcttaaagtgagagcacgcctgtactagagcaagcaggaatcagagaccttccagaaatactactgtgtaagggccagaaatatcttcacttgtcattgttatataatcattattacttttgctgtaatgttaatattgatttattaatatatattatcttttcatacattttctaagaaacatttatattgataagatcttttattttgccaagggcataaattattgtttttctttttttttttttaataaatttcaccaagtatggctcttctgtgatgtgtttttttctccgtttgggaatttctaatcccaggcactcctcagtctcattgtttcattacctatgaggtttcatttacttctttgtaaatgtactgacttttggagttacttaagaaccacagttcctaaaacattttatttgggagctcaacttctggcttcctacttaccaagaggcagtaagttataacctctggcctttgtctttacattttcaactttctggatccctaacctctggtcccaagttactacccttgcctatatccactaaccactcactaggtcacaaagttgatggctctggcttgacccagtgaatgagaagtgtcctagatgtttttttttttttttttttttcgcaaatcttcataggcacagttgcctgtttaattttttcttcagcccttcccttagaggagggagccttaagttacctttcaaggttgggggttaggaatctatcataactagtctagagatttctcaccaagggaaattttccttatctaaaagaggaacttcaggtctcaaccctgccagtcacacccaattaatgtccttcacaaaaataaacagcatatgttccctttcaatttgagttcagtgagctcacagcaaaatttaccttttaattttcttcagcaaatccaagacgaatatacaaaggatgagattagataaagatttcagtttcccgtatgccaccgctgccgccaattttccaaaaaagcctggctcctcttttcctgttcctccatccaagcccccaaagatctctaaccagaaataaacaggaagactcagtgatttacaaaagacattttagttttacacgtacagaaaattctacccagcattacagaattcttagacttcttaaattcctgattttccttggtatttacattttgataagggagccaatggttcttcaaacatttgaaaagaacacatacacactggacaatttcaaacgatacaaacaaacgcaactgtccttctttctcattcctgtccttcagccacccagtttcttctcccctgagggaatcagttatcatttgctggtcatacttccagattatcctgtgcctatgtaagtgtgtgtgtgtgtgtgtgtgtgtgcacttttcattttttcaaataaagtattactcaactttgtaattctgcgcgctctggaggtcaaaggagggatggcattgctggggtgtcccccacatcctgagtgtctctagataaaaaggagctaccgggcggcggctgctttccacacaagcttaaaattgccaagagtcaactgccagttgctttgggtggtggcgtcagagtgtcttcagataacacgaagaatgcgtgtaaagatcggagacggccgggcgcggtggctcacgcctgtaatcccggcactttgggaggccgaggcgggcggatcacgaggtcagaagtttgagaccatcttgaccaacttggtgaaacctcggctctactaaaaatacaaaaattagccaagcgtggtgacgcgcgcctgtaatcctagctacttagaaggctgaggcaggagaatcgcttgaacaccggaggcagagcttgcagtgagccgagatggcgccactgcactccagcctgggtgacagagcgagactccatctcaaaaaaaaaaaaaaaaggaccggaaacaagggctctcagctgcgaattcaccttttctttgtgtccgagccccgcctaccgggtaactggagagtatcaggactgggtgctaccaagcgcctcacagcagcccccagccgacaccaacatcccaaccctgggcgacccgcggctgcgcaggcgcggatgcatgtttagggggctgcgctagtcagtgcgcatgcgccgtcgctaggcaacaggacacagctccgggcgccggcgtagaatctgagctgcaggtgagggttagttcctttattcggcctctgcgttctcttaggatgttacattttgttkcctttttcagcctgtctaccctggtcacaccctgcttcgagtttctcttcctcctttgcccccggtttgggctctgactggtggaattgttccaggaagttgacaaaacatcctaggcttttgtaatcacctgttaacctttcccagctctggatcagaagcagcaacttccatgagttgtgacgcagagcagacaattctattagctggtgttagtttccaatggtatagccccttggaacttttctccaaagaatcgtggccctcaccgtccgcagtgcctgacattaggatctctactcagccagaaaaataaatccacccccgtgcctttgtcaaagacaaagcaggacagtaaagcggttgagacaggttttaaccagtaatatactaatggaataaggaggagtccagcacgaactgaactcaactttgatttgtacaaatgttactcagactttaaaggaaaaatggggaaatagggaaggggagaggaatgagggggcgctcagaagagtgagggaagtgaaagattacaaaaagtgcgaagtaggggttagtccatgtgaaacccatctgggtttgttaaagggtgtttctggaagttaggcttttatcctcctacagatgctgggagataggagccatatcttaaggtgttggctggaacagtaaattcctttggcagcctgagtttttttaggcaggccctttaaagcggggctggagtcatcctagagatgctaccttgaactgttagagactgtgttagagttttgttcaagtctgttgaggcctagtccacaaatggctcagaggaacctggctagagtttggtcaaggagagaatttttgttactccgcatattctgcacattattctgtgtgaggtgttgtattttacgtaccctgaagtttgaattattgcatatatgttggaaaagaactgaattctcagtacatattatttatatccttatttattttaaacaatttaggtttatttacaaacaagtttcatataatgttatagaacctgcaaatacagatgctctctataggccaaattgtttcacagcaccttccaaagaggcagtcagtcatttgctaaggttaaggttgaagctgtataggaggtgatgcccaattcctcaaagaaaacaataaacagaagaactagcacatgtgtgtcttaatttttgtgtgtttcaaatgtagaaaagaattattggtctttaactcatttgatagcctaaatttaatgtatttttacgttataccatatttaaaaagtaaagctgtgggagtgttccctttggcagtgcatattctaaaattggaacaatacagagaagattagcatggtactagcaaaccaaattcaacagtatgttacaaggattatacaccatgatcaagtgggatttattactgagatgcaacatataaaaatcaatcaatataatatgccacattaacagaatgaaggacaaaaaccacatgatcatctcaactgatgtagaaaagttagttgacaagatttgacaccttttcacgatagaaacactcaacaaactagaaacagaaggaacctacctcaagataataataaggaccatctatgaatagcttgtatcggccaggcaaggtggctcacgcctgtaatcctaacactttgggaggccgaggtgggtggatcacctgaggtcaggagtttgagaccagcctggacaacatggcgaaacctcatctctactaaaaatacaaaaattagccaggcgtggtggcacatgcctgtagttccagctactcaggaggctgaggcaggagaattgcttgaacccaggaggcagaggctgtagtgagccaagatcgtgccactgcactccagcctgggtgacagagcaagactccatctccaaataaagaaagaaacaaagaaagaaaagaaaagcttatatttaacttcatactcaatggtgaaagactaaaatctctttttctaagatcaggaaaaaagcatggatgcccactttcaccactttgattcaacatagtattggaagtagtggccagagcaataagacaagaaaaagaaataaaaggcattgtgttgcaggaagtcagggaccccaaatggagggaccagctggagctgaggcagaagaacataaattatgaggatttcatggacatttatcaattcccaaaattaatacttttaaagtttcttacgcctgtctttactgcaatctttgaacataaattgtgaagatttcatggacatttatcacttccctaataatactcttataatttcttatgtctgtctttactttaatctcttaatcctgttatctttgtaagctgagaatgtacgtcacctcaggaccactattgtacaaattgattgtagaacatgtgtgtttgaacaatatgaaatctgattgtaaaacaggtgtgtttgaacaatatgaaatcagtgcaccctgaaaaagaacagaataacagtgattttcagggaacaagggaagataaccatagggtctcactgcctgcggggtcaggcagaatacagccatatttttcttctcacagaaagcctatagacggatgtgtgagtaggagaaatactgctgaattcttttcccagcaaggagtaaccctggggaaggaattcattcctgggggtaggtctatagacggccgctctgggagtgtctgtcttacgccgttaagataaggactgaaatacgccctggtctcctgcagtaccctcaggctttgggaaattccagcctggtaaattctagtcagaccagttctctgctcttgaaccgtgtttcctgttaagawgtttatcaagacaatgtgtgcacagtgggacatagaccctcatcagtaattctaattttgccttgccttgtgatctttattgccctttgaagcatgtgatccttgtgacctactccctgtttgtacaccccctccccttttaaaatccctaataaaaacttgctggttttgcggctcggggtcatcatcacggtcctaccaatatgtgatgtcacccccagaggcccagctgtaaaattcctctctttgtactatttctctttatttctcagaccagccgacacttagggaaaatagaaagaaccatgttgaaatattgggggctggttcccccagtagcattcaaattggaaaggaagaagtaaaattatctttgttcacagatgacatgatcttatatgtagaaaaccttaaaagattccacaaaaactctgttagaactaataaccaaattcagcaaaattgtagaatacaaaattgatatgcaaaagtcagttgcttttctatacactaacaatgaacaatccaaaaagaaaattaagaaaacagttccacttacaacagcatcgaaaagaataaaatacttaggaataaacctaagcaaggaggtaaattatttgtacaatcagctgggcatggtggctcatgcctgtaatcccagcactttgggaggacaaggtgggtggatcacgaggtcaggcattcgggaccagcctgatgaacatggtgaatacccatctctactaaaaatacaaaaattagctgggcatggtggtgcacacctgtaatcctagctactcaagagtctgaggcaggagaattgcttgaacccatgaggtggaggctgcagtgagctgcaatcatgccactgcactccagcctgggtgagagagcaagactctgtctcagaaaaaaaataaaaagatttgtacaatcaaaactacaaaacattgctgtaagaaactaaaggagacacaaataaatgagaaggcgtcccattctcatggattgcagtacttaatgctgtgaagatattcatgctgccccaagtgatcaatagatttcaacacaatccatatcaaaatcccaatagcattttttttcaaaatagaaaaaaatcaccctaaaattcacacaaaatctcaagggaccctgaataaccaaaaaaaattttgaaaaggaagaataaagttgaaggagtcacactttctgatttcaaaagatattacgaaaccacagtaatcagaacagtgtggtactggcataaaaacagataaatgggccaatgaaatagaatagccaagaaataaacccttgtatatatggtcaaatgatctttgacaagggtgccaagatgactgaatggggaaagaaaagtgtcttcaacaaatggttttgggaaaactagatatccacatgcaaaggaaactgggcccttatattacaccatatataaaaattaactcaaaatagactaaagacctaaatgtaataccccaaactataaaactcctagaagaaaacatgggaggaaagcttcatgatactggatttggcaatgatttcttggatatgacaccaaaagcataggcaacaaaaggaaaaatggaacttaaaaacctttgtgcatcaaagaacataatcaaaatgaaaaggcattttcttctgcctatggaatgggagaaaatatttaaaaattatatatctgatgaggcattaacatttagaatatataaagcactcctgccactcaacaacaaaaaagtcaaatgacccaacttaaaaaggcacttgaataggcatttctccaaagataccctaactcatttctctcaagttcaaagttcaacaggtccctggagcaggggcacaatgctgccagtctctttgctaaagcatagcaagagtaacctttactccagttcccaataagttctgtgaaagaaaaatacactttggggccccaaaattgctaagctaaagggaaaagtcaagctgagaactgcttatggcaaacctgcctttcattctatgcaaagtcatccttatgcacaatgagataaatgcatatctgattgtctcctttggaaagactaatcagaaactcaaaagaatgcaatcatttgtctctcacttacctgtgacttggaagccccctccctgcttgagttgtcccacctttccagacagaaccaatgtttatcttacatatattgattgatgtctcatgtctcatgtctccctaaaatgtctaaaaccaagctgtgccccagccaccttgggcacatgttgtcaggacctcctgaggctgtgtgatgggtgtgtgccctcaacattggcaaaataaactttctaaatttactgaaacctgtctcagatatattagtttcacagtacctcatcttcatctgagacctcctcagcctggacttcactgtccatatcaccatcagcattttggtcacaaccattcaagaagtctgtaggaagttccaaactttctcccatcttcctatcttctgggccctccaaactgttccaatctctgcctgttatccaattgcaaagttgcttacacattttcaggtatctttatagtaatgccccacttctatagtaccaattttctgtattagtgcattctcacactgctatgaagaactacctgagactggttaattcataaggaaaagaggtttaattgtgctcacagttttgcaggctgtatagttttctgcttctggggaggcctcaggaaacttaccacatggcagaaggtgaaggggaagcagggacatcttcacatggccagtgggagtaggaggaggttctacacacttttaaacaagcagatcttgggagaactctatcacaagaacagcaagggggaagtccacctccatgatttaatcacctctcaccaggcctgtccttcaacactgggaattacaattcgacatgagatttgggtgaggacacagagccaaatcatattactcatagagacagaaaatagattagttacttctagagctagaggtgaggccatatgtgggagatggagagagatggctaatgggtacagagtttctttttggagtgatgaatatattctaaaattgataatggtgatggttacacaactttaaagaaagtaaaaaccattgaattgtacaatttaagtgggttgagttgtgtggtatgtagatcatgtctcagtaatactgttttttttgtgtgagtggaaaaaaagatataaaggagtcagactttagggagatcaactcaaatatctgtgtggcatttaaaggatttttaggtttttaaaraaaaraaaaagcatgtaagattgccagtttgtagctatctgttcatggtggaaaacagtaactttttctcatgttcatcctagtcacaaacattgtgatgttacttcagacataatcattctaaaaggcagagataacttcagttttttaaagataaggagtgcacacttgcaggaattagtttggggactagaactagatggggtgacctcatcattgttgtttcatttaagggtacaaagtgcttatttttcctgactctggtatttcataatggaagcagggcaaagtgtcagttgggcttccacactgggagcaataagaaatttctagaaaaacatctgagatgtttctgtaaatagcagaattagcatgtgtgataaactagtggtttttacactttttcgttcatgtgttccctaaaataatttagaattcttgactgaaaattcaaacatatataaaagtagaagcagtagtataattagcaccaatatacccatcactcagatttaatgactctcaagatattgccatttttgttccttccttctttttcttgttttctttgccaaaagattgtaaagcaaatcctggacatcgttagttctccccataygcctcagtacacatctctaaacacataatttcttaaccacagtgccacatcacatcaaatagtaagatatttttggttgcctccaaaatgtcttcttatagttggtttatttggatcaggattcaaacaaagtttaaacattactttttagttttatgtcttaagcttaaatatctcttactctagagaaggctcctgtttttttttttttcttttcataccattgacttgttgcaggaatggctgtcttacaaaatgttctacattctggatatgtttgttggcttccttgtggtgtcatttaacttgttcatttaactagagcatgcatttttcaacagagatgatattggatmtttactagaaatttaccttcttttttttgttgttgaaacaggatcttgctctgttgcccagactggagtgcaatgacatgattacaatcatagctcgctgcagccttgacctcctagactcaagtaatctttccacctcagccttctgagtggctcggaccatagttacatgccaacatgcctgcctaatttgtgtattttttgcagagatggggtctcactatgctgcccaggctggtctcctgggctcaaatgatccttctgctttggcctcccaaagtgccaggatgattttctttcttcatcttgtatttctgttttatgttttaccccagttttatgttaacgttatccttatctttgaaagtattttattgatcatacttctttgccacaaaaatactgactgatatggcaggttgctagaggttccccaatgactttctctccttgtagtattaaaactgctgatggggctgggcgtggtggctcacgcctgtaatcccagcactttgggaggccaggggggcagatcacctgaggtcaggagttcaagaccagcctggccaacatggtgaaatcccatctctactaaaaatacaaaaattagccaggtgtggtggcaggcacctgtaatcccagatactggggaggctgaggcaggagaatcgcttgaaccttggaggcggaggttgcagtgagccgagatcgcaccatcacactccagcctgggggacgagagcaagactttatctcaaaaaacaaacaaataaacaaaacaaaacaacgacaacaaactgctgatggaatggatcaggatcacttttcagtgaatttctcaactttggggtttccagaccatacaggtaggttacatttgaacactaaacccatgtaaaggaatgcctatgcttacaaactgtcatgggagagttttcttttttcttcccaggggccagaataagaaagatttctttataatccatcttgttactcagccttaacatttggaagggcttggctttgtggagaggtctaaattttaaatccctgccktacatgggtckaagtcctcctccactagtgttaaactctaaacccatgattactgagatgttaccagcataagcatactcttattttccaaattttcaggcccctctttgtttttgcttctttggggattctgttactctcttgcaagcttggctctgaatttgaaaatacgtttgttagattttatccatcatatctagatgttttgaagcccaaacattttcatatgatctttcttgtgatgttgctttggaagtctccatacttctcttacatctctccatcctgatgtttcctccttccgttctccccctgcccaaaatctttgttccatagcaggtacaattatctgccatcatcaaactggttacttctttgccttaactgtaacttcgctcttcccctaaagtcactgtttgttcttttttttttgagacagagtctcgctctcttgccaggctggagtgcaatggcaccatctcagctcagggcaacctctgcttcccaggttcaagcaattctcctgcgtcagcctcccgagcagctgggattacaggtgcgtgccaccacacccagctaatttttgtatttttagtagagacagggtttcaccatgttggccaggatggtctcgatctcctgacctcatgatctgcctgccttggcctcccaaagtgctgggattacaggcgtgagtcactgcacccggccaactcactgtttgaaatagctttttttcccacatagcccagactctaacttattgtcttttttcatatctatactcccccagactcacacaataaccagcttcctttaaaacatgtgctgaattactttatatcctttctgtgcacactcccttatttatttagggcctgatacatgggaaatttcaacacttgggaaatttcaacatctctgtggatagcctcacccacactctaacctcaaggcctcttgcttattccaaacatgaggagctgtacaatctaccccacaatggccccactcccaaagccacacctgtgttccttgtcatcacttgaactagactattttaggattattaatccctaacatgtaatttactaactgcaagctgctcaccctccaactggctcacaatctgacacctggacattwtacagccctttaatctcttcaaacatttcccaagtccattaactcccttgcattgttacacttcttttttgcctcatggtgctgtactctgcccacattcctgccagcgacctcaacttcttagcttccttattccacagcatctactgtgcacagcctctacctgggattaatctgatcctgaaccttctcaatttctatacttaaagtaaaaataaaggtaaatgggtgccactggtacacggtctctggcctcgctagggcctcagcactgttttggcaatccctttacaaacactggaccagtgcttccttgagttgaagatggcaggcccatagaatgagaggagccgggtgcttcaattactgctccgagaagagctatttactgaccatgttggtcttcatttgagcaagaaaacacttcaattgtgtttgagccatcaagcttttggtatctgtttgttgtaacaattaccattactttaacaaatacaatgagataccattttaaaattttaattttcatcagcaataagagaaaatgttattttatttatttatttttttgagatggagtttcgctcttgtttcccaggctggagtgcaatggcgcaatctcggctccccgcaacctccgcctcccgggttcaagtgattcttctgcctcagcctcccgagtagctgggattacaggcatgtgtcaccacgcctggctaatttcgtatttttagtagagagggggtttcaccatgttggtcgggctggtctcaaactctggacctcaggtgatctgcccacctcggcctcctaaagtgctgggattacaggtgtgagccacccgcccggctgagaaaatattatttaaaaccagcaatacaaaatttaatttcttcttcttttttttttttttttcagacagggtgtcaccctgtcacccaggctggtctcgaactcctgacctcaagttatcctcccgcctcagcctcccaaagtgctgggattacaggtgtgtgccaccacacctggcctaggaaatgtcctttcatttttgcttctcatctccctggtcctacctgccttatcccctatagggctcactatttttagtttctcatgtattcttgagagtttctctacaagtatataagcaactttgagtatagttttattttcccttaaaacaaaacatagtgtgtaatcacaattttatactttccttttatttcttcttttccttctccttcctcttcctctttcttttcctccttctcctcctcctcctcttcctcctcctccttcttctttgccttgctctgttgcccaggttgacgtgcaatggtgtgatcatagctcactgcagccttgaactcctgggtcaagtgactctcctgcctcagcctcccaagtatctgagactacaggcatgtgccaccacgtttagctaatgtttttgcatttttttttttttttgatggagtctcgctctgtcgcccgggctggattgcagtggcatgatttcggctcactgcaagctccccctcctgggttcatgccatcctcctgcctcaggctcccaagtagctgggactacaggtgcccaccaccacgcccggttaattttttgtattgttagtagagacggggtttcaccgtgtcagccaggatgttctcaatctcttgacctcgtgatccacctgcctcagcctcccaaagtgctgggattacaggcatgagccactgcacctggccttgttgtttttaaattttttaatagaaatggggtcttgctatgttgccccagctactcacaaactcctggcctcaagcaatcctcctgcctaggcttcccaaagagctgggattacaggtgtgagccaccatgcccagcttgccttttcgtctttaacaaaatatattggggaattggggagttttccgtatttacacacagagaaatttctctgtctgtccagctgcacaatattctatagtatggttataccataattttttgcccatcagtaagagattggttgataagatgattgcttaataaagaaattagggtgtactttgttttctagccttggggaacatggggacagaagcccaagggaagagcagcttgtccaagaagcagtagcaacaracacgtgcctggagggagtgtgatagcatctgccaygtggaggagagcatgagccattcttcagcactagagaagatggcattgcagccagcaggaatgtggcatcattctgaaagcaatgagaatgacactaatgctgtccccaagctcaccacttccctctcaggccttcactcaacccctctacttcttatttccagtgtttctgcattaactaccaccttctttttaagaaccaatgaatcccagaggttcccatgggccaaattctccctttccaacaccatcttaaccgtgcttcagtaaacataagttgtcaactctcaaatgtgtgtctctagtctagacttcccttctgaactttagacttgcacatccaactgccttctcccatctgcacttagaggtcgctaaagttccaccaattcatcatttccacgctccctccaggcacctgtctgttggccactgcttcttgggcaacaagattccttaggactttctacacataagattatgtcatcggaaaatagagataattttacttgtttctttccaatctgggtgccttttatttcttgcccaatttccctggatagaatctccagtatgatattgactacaaaggtgagagtagacatccttgtcttatttttgatcttgggggaaaaacattcattctttcatcattaagtatgatgttagctgtgggtttttaatagatgctctttatcagtttgaggaagttctattgttgatttttaaatcatgaaaggttgctagattttgtcaactgtctttctgcatctattgagatgggtcaagtggtttttatcctttattctattaacatagtgtattgtgttaattgattttacaatgtaaaaccaaccttacatttctggacaattcccagttgaaaatggtgtataattctttttacatgttactggattccattgactagtattttgttgcttttacatccatagtcataagatatattggtatgtagttttttgtgtgatatgtttgtctggtttttctatcagggtaacattggcttctagaatgaattgggaaatgtgtactatttttctgtattttggaagagtttgagaggattcatagaaattctttaaatgtttgttagaattcaccagcaaagtcgcttgggctattctttatgagagctttttttttttattagacggagtctcactctgtcaccaggctagagtgcagtagcgtgatctcggctcactgcaacctctgtctcccgggttcaagcaattctcctgcctcagcctcccaagtagctgggactacagccgcgcaccaccacaccgagctaatttttgtatttttagtagagacagggcttcaccatgttggccaggatggtctcgatctgttgacctagtgatctgcccgcctcggccacccaaagtgctgggattacaggcgagaaattttaaattactaatttaatctctttacttgttataggtgttttcggattttctatttcttcttgagttagttttggtagtttgtatctttctaggaatgtgtccatttcatctaagttatctaactggttgtttttagtattccctgataattcttttttatttttgtaaggtcagtaataatgtccctctttcatttctgattttagtaattagtctgttttcttttgttggtcagtctagctaaaactgtctattttgttgatcttttcaaagaaccmaatttggttacactgatttttttctctctcccacttctcactctctatttcctttatttctgctctaatttttattgtttctctctcttgctctctctctctctttttttttttttttttgagatagggtcttgttctgttgcccaggctggagtgcagtggtgcaatcatggctcactgcatcctcracctcccaggctcaagtgatcctcccacttcagcctcctgagtagctgggactgcaggtgcacaccaccatcgctgctaatttaaatttttttttttttttttttttagagatggggtctcactatgttgcccaggctggtctcaaactcctgggctcaggtgatcctcctgctttagtcttccaaggtgctgagattataggcatgagccaccatgcctggcctattgtttctttctttcttcttgctctgggttgagtttgattttcttttcttctgttttcaaggtggaagtttagttattgatttgagatttttcttccttttttaacattgatatttacagctaaatatttccctttaagcactattttagctctatcccataagttttggtatgttatatcttcattttcattcattcttttaaaaatattttctatctctttattgataatatttgttggatgagacattgtcaacataccttcctttaattctttaagcatggtgtcgtttagttctttgaacatatttataacaggggctttgaagtctttgttaagtccaacatctgggctcctcaaaggcatgttctattgcctgattttccccctttttgtttttgggtcacacttttctatgtctttgcaaatctcataatttttgttgaaaattatgcatttcagataaattttatagattctgaatattaatcaccctctcatctggggcccgttatttgcttttttttttatttctttagtgacttggctggaacagattattgaaatccatttccctcatagtgtaatgttgctccttagagagtgaagccttggccatgcacatagtccctctgatgagctgagattactggagttttagcagggttctctttaattatattttctctggtcccctgttaarcttctttctggtctgactttmtcggtaacatatccagctgttagctaccaataactgctagctggttgctctattttttttttgtaacaatgtctggggcataaattgctccatcacctgattcagctagtcaggtccctttgctggggcggtctttgaggcttgcttcgagcccaggagggctctgcttagctgtctctttccctggttctctgttaaacttctagctggtctaccattttatttgttgctagtagtttaatggagctaagagactcctcctaattgtttaccaccaaaatctccagtttttgacagcacacttaggcatgaacttcctcacattttcctctaagtacagtaagtccttttattttattttattttattttattctattttattttattttagacaatgtcttgctctgttgctcaggctggagtgcagtggcacgaccttggttcactgcaacctctgtctcccggtttcaagcgattctcttggatcagcctcccgagtagctgggattacaggtgtgtgccaccatgcctggctaattttgtatttttagtggagatgggattttgccatgttagccaggctggtctcgaactcctgacctcaggtgatccacccccgctggcctcccaaagtgctgggattacaggcatgagccaccgcacccagctcagtaaktcctttttgaaagagtctctgagctctctattcttatggccttctctccccctggacagaatctctgccactacatcagagtcggggggacaaggaatgtggtccacttcttctgaaatgatacacctgccttgctccacaagtggagccttggatttggatggtagcccctagtctttctagcctgcgcctcctggcataaaacctatgagtgagctggtgtggaggtaattgagacaattttctgagccttctgtgcctaggaatagcttctgccatacaagtggggactgggttttggaaggaaaccccagttgagttccctgcctcaacttctgaatagtaaaagagcttctgaatagtaatggaaggtgaagtatgctgaaagaaaagagatgagagaccagttagggggctcttgtagaagttcaagagagatttgaggttgctttggatttgaggttggattaacactgtagcggtagaaatggtgagaagtggtctgattcagggtatattttggaagttgagctcacaggatttgctgatggatagaatgtagaaggtgagagaaaagatcaaagatgactattcccccaagccattcctttaatcatacttggccattatgagagtggagaaagaaaacaagccagaaactttcttcttggagatttggctaaaaaccaggttgtaaagcaatcagtcagcaagtatttgccaagtgcttgcaggtggcaatcgattagttcataagcttcaccctgtgaacacatgtgttaccggaaaggggtcctgatccagaccctaagatagtattcttggacctcacgcaagaaagaattcagggtgagtccatagagcaaagtgaaagctagtttattaagaaagtaaaggaacaaaagaatggctactccgtaggcagaagagcggcatgggctgcttgactgagtatacttatagttatttcttgatcatatgctaaacaaggggtggattattcatgagtgtttcgggaaaggggcaggcaattcctggaactgagggttcctcttccctttagaccatatagagcaacttccaggtgttgccatggcatttgtcagctgtcatgatgctggttggagtgtcttctagcatgctaatacattataattcatgtataatgagcagtgaggatgaccagaggccactttcatcaccatcttggttttggtggattttggcgtgcttctttactacatcctgttttatcagcagagtctttatgacctgtatcttgtgctgacctcctatcacatcctgtgactaggaatgcctaacctcctgggaatgcagccccataggtcttagccttattttgtccagcccctattcaagatggagtcactctggttcaaacacctctgacccatgcagctcttcagaaaaccagccataattttcagcctgtcttgccacaatattattattaaaaatacaagtcaacttcagttttcgaatctctgctttgcccaccccctcacctgctaccttactcgacccagcacttctgagctgttggctttaagattcagcttcccttatttctctcaaagaggaaacttttaaatggtggctctgtcttatctggatctgtaaggatgtcactgtgtttctcagagtaaaagcttctgttattggctgaatatgctttttttccccctaaatactatataaaggatgagccctttacatataatgcagatagaatcaaggtcttcattcattaaacagacatttattgagtgcctactatgtgccaggtactatgctaggcattgattataccgcagcaaataagacagtcttttccctcagagagttcaaagaacatgcaaattgaatggttttataacagtgtggtaaatgctgtgattatagaaatcacacagcagtggcttcccacagggagttgggaggcaaggcaggcaagactttcagagatgttgaaacttggaggatcaaaaatattagccagagaagttaggagtgggacaaagtagggtactccaggtaggagaaatagcatgatataaaatccagaggaaggtgtgtatgtggtaacttgatagatctacaaatatgagatgggtagaaagtagagtccaagaaggagggataagagagggagacaagggtcagataatgaatgcagctttctaaatgacattaagcaatttagactttctgaatttttaagacagtgtagatactggattgatgttggcagtttggaggcaggatgacagacagtggttcagggaagaggtgatggtggcaggaacaaggcagggaggaggaggttgaggaaaaagagaagcagatgaacttaaatgctgaccaggtagaatcaacagttcttggtgaatgactgggggaagaagtcaagggcaaaatccaggttttggatttggcaacaagttgaaaggtgggaaagagacccaggaaggatgaggatgcttggcatggtctagtctggaggagggggaaaatcatgaatgcagtgtttggacactgaatctgagggtcttctgagatgtcaaatcagtgataggatatacagatctggaactcagagaagcctgagctggggatatacatttgcaagtcatccacatacaagtggtgttcaaaatcgtgggcaggggtgagattgtctaaaaggaaagcctacagtgaaaaagaagaggctgttctatgcctgagccttgaggaactccaatttttaatagctatgcagaagagaatcttctataaaacactgagaagtgtccagagaaatggaagaaaaattgggatacagtgttttaaggagaaaatggtcaataaggttaattgttgccgagcgttcaggtgaaatgagaattggaaaatatctgttggagtgagtgggcaccatggaatttaatttttattgttttctggagctggttcaggggacagtagggagcaaaatccagattggagtgggttgaggaggaaatggaaggtagaaaataaggcccatgaatgtagacaacgctttagggcagtttggtcgtgaaagtgaagagagagaggctagtagctgtatcaggatataggaacgagggggatttttttcaagaaggaagatcattaggttaaaaaagccaaagagaaggatttagtggaagagaagttcagcaaagaagaagtgaatattaaaaatgtacagttcttgagaaggtgggagaggatggaatgcaaagccgtgatggtgggactggccgccaacagcatatggaacatctgtaccatgtgatagaagaggaaagacgggctatgaagggaatttatacgtttggcattggagagttaagaagttgctgtctgttaacttttttttccccactaggaaggaggagaagaaatgtggtcggaagatgaggaatgaggtggtccataaagtgaggtaggtgattataaattacatgtgaagtaaacttccctagcgtgtgggtctctgtatttaacctctgccttccaggttcatgcgattcccctgcctcagcctcccgaatagctgggactacaggtgcgtgccaccatgcccagctaatttttgtatttttagtagagacagggtttcaccatgttggccaggatggtctcaatctcttgaccttgtgatctgcctgccttggcctcccaaagtgctgggattacaggcatgagccaccacacccagccactctactcctttcttaatataactccagttaaattcaacataatcaagtttttcaagtttatttgcatccagattgctttgtgtgtgttgcatctgtaaaggcctcatagcttggtttatgatgcatcataaaagaacagggggccttttttccttttaacatgtttccatcttcagcacttagacatcgaaatccatactgatttagggcagagcaagagctaaccctgaaakgtgcctcsttttttttttttttttgaaatagagtcttgctctctccttcaggctagagtgcagtggcgcgatctccactcactgcaacctccgcctcccgggttcaagcgattctcctgcctcagtctcctgagtagctgggattacagatgcctgccaccatgcccagctaatttttgtatttttagtagagttggagtttcatcatgttggccaggctggtcttgaactcctgacctcaagtgatccacccatttcagcctcccaaagtgctgagattacaggtatgagccactgtgctggcctgtacctcgttcttcatgaagagcagcatcatgtgcttactgcatgtgttttaatgaaatgtacgtttctgtcattaaaacacaaacaataaactagcctccttattgcccttttaggtccataagaagcccgcttgaaaactggtcatggggtgggcacagtggctcaagcttgtaatcccagcactttggagggctgaagcaggaggatcacttgagctcaggagttcgagaccagcctgggcaacatagggagactcccccatctctacaaaaaagtaaaaaaaaaaaaagaaaactagccaggaaagcagggccaatgcccatcccacacggttaggttgagggttggggatggggagaggacactagtcgtagttacttgtattgttattattattttttttattattgagagagagtcgcctgctgtcayccaggctggagtgcagtggtgcgatctcagctcactgcaamctctgcttcccagtttcaagcgattctcctgcctcagcctcccgaatagctgggattacaggtgcctgccaccatgcccggctaatttttgtatttttagtatagacggaatttcaccatgttggccaggctggtctctgatcttaagtgtttcacccgtctcagcctcccaaagtgctgggattacaggcgtgagtcaccatacctggccacttgtattatttttttactactacaactaactgacattgtcataggtctttacagtttgaaaattgctctcctatgtgtgatttgcttaatcacaattaattattgttgagcaaggaacatagttgggggtttgacagatgaaaagatatgtcgagaaaaaaagagaggggctggggaaggagctgaaaaaattagggacagtggattaaatcatacattctcaagggaagtgaccatggagtggtaaaagttggttcttgggcagggggcaagaacccttagatattacaatggtttgtagtccttcaaagggctacaatacataaacaaatcgacagtatatttgttttgttttgttttgtattgagacagggtctcactctgttgcccaggctggaatgcagtgacacaatcacggatcactgcagcctcgacctcccaggctcaagagatcctccctcctcggtctcctgagtagctgggactacagtgtgcactaacactgctagctaatttttgtattttttttgtagagacagggtttcaccatgttgcccaggctggtcttgaactcctgagctcaagcgacccacctgcctcagccttccaaagtgctgggattataggcgtgagccaaagctgggcccaacagtatatttgtgatattaaaattttgtatgggggtggcgattaggtggcgattaggaaaacaatgtctacaaggctcgctggagtagtggttggggatgataatgaggaaaaaaaataaaaaaaggttgagaaacactgatctcaatcttgcagtgcctacagagctttttggcattcgtgaatggtgtctctgtttccagtcacacatgtttgtccagcacatttgcttcaggcttcattcatcctgcccgttttacccgaggccctaaatgatcatgttttgcctctttaaaccctttcctcttctggccacaggtgcctgaattagggtggacatgagccatgactagttaaggcacagcgagtgactggtcccaggaaggctggctgcacctcacttcctctcctgagtcttttcttggttcacctcgtgtgacgcagctctgtagttttgtaacagctactctaccaactatccttttgagatggttactaatggagtgggtatcaaaaagccctggttatatctccccagtcaggacatttgggctggtggcacatgcgtttgaatgaggttggatgagatgaaagggaaatccatttgagtcatcagctctttatccttatccctggttggtgtagagtgggggttttcaacagctgcacgattgacattttggaccaaataattctttgttataggaaactgtcctgtgctttgtaggatgttatttaacagcatcccaggcccctacatggtagatgccagtaacactgaatcccccgctctccagttgtgacaatcaaaaatgtctacagataaatagataaaattattgtcaattaaaaataaaatatagttgggcatggtggctcacacctgtaatcccagcactttgggagagtgaggagggtggatcgcttgaggacaggagttcgagaccagcctggccaatatggtgagaccccgtctctactaaaaatacaaaaactagccaggcatggtggtgcgcacctgtagtcccagcaactcaggaggctgaggcaggggaattgcttgaacctgagaggcggaggttgcagtgaggtgagatcacatcactgcattccagcctgggtgacagagtgagactccatctcaaaaataaataataataataataataataataataataataataataatamtactaaaataaaaaaagtctccagacattgtcaagtgttccctgtgggacaaaattgcctccagttgagaaccactcatgtagagaacctagaagatcaggaagtataaatctcatcatttcagcatgatcagaaatgccatagaagggttcagatcagaaatgggagaaaagcattgtaatcatgatattcacagctaatgctgagtgagtgctcgctaaggacgttccacacactgactcattagcccttccagtaactccaaggagtcgtcctgctgtttccacccactctatacttgagggatttaagacatggggatgttgaggaacttgcctgaggtcacgtagctggtaatagtggagtcacccaggcagcccggttccagtgccccagcgctcgggagtgcataacctctctgtcttaccgtcacggttctacttccttatcctccagggggcgcacgcagcacagtaccaagcacacaataggttctcattagactcattgattctgtccatactgacattggcatctactggggcactctgcccctagatctctgcatggcaacctcctttacttggaggtggtctctgctgcaatcccacgttctctgcgaagaagtctcctattgcctctgtagaatagcaccctccttcactgccaagccccttccccttatttttctttatagtacttagcatctgacatatattttttgttctcttgcccccaacagactaaaatgtctgttgtatgaaaggagaggctttgcctgttgtgtttgctgctgtatccacagcacctagaacattcctaggcatatagtagatgcccattaagtgtgtggaaaaaatgaatacatcccttagccaagtgctatattcaaatttccttactctggttattggttactacttttcctcatcactgcattgaaaaaaacaaaacaaaacaaaaaacacaaaaaaacctttctctgaatgaccaggcacctttatccagaagtggggcataacccttgacacaaggggcaatggattggggatcctcgactaatgcctgtcagaggtttattgttaactggactaggtcacttacagagtttatttttaattttgctttgtcagtctgtgaaagtaattcaacagtgtcatgataatgtacatagttaatgaagttaatttatatttagcttgggtctaaatcacataataaattataaatgatattttgagaaacatattatggacaattcaatggcagatttttgcataaaaattaacagaagttgattctatctttctccataaccactattcataagttgaaaaaatgtagttttaatgaaaatgtattaaaaacttagcaactgctctcattctatagaaaatgaagccacggctgggcacagtggctcatgcctgtaatcccagcattttgggaggacaaggcaggcagatcacctgaggtcaggagttcaagaccagtctgaccaacatggcgaaagcccgtctgtactaaaacatacaaaaattagccgggcgtagtggcagacgcgtgtaatctcagctactcgagaggctgaggcagggggaattgcttgagcccaggaggcagaagttgcagtgagcagagatcgtgccacaggactctagtctgggtgacagagtgagaacgcatctcaacaaacaaacaaacaaacaaacaaaaaaacaaataaaatggagccacatagtaactatagatagaaaagtagttaagttactgttggcacccttttgcctcaaacacattcccttctcaccatccagataattatttataaagtttgagacctccaccccccgactcccagttgcaaacataggacttggagcagttgcctagtttggcattttgtaaagaaatctattgctgtattgcaattaggcaattcaggctgttatggttacattagacttgagagaagctcattccctaaaccctaaaaatcagctttgagaaatatgatcaattcacccctaatctaggtttaaactcatgcacagaccctatgcagctagacaggctaaggtggaaagaaacacctttctgttgctgggggttggggatggaacagatgcctctgaattaggaaggatgtcttgcagaacaccatcctctatgcttgtcaccagttctcatgtccccaaatgcctcatatctcaattgagtgttgccattctcaccactgaatcccagctccagcctcctgaacacttcaacaagagactgtgccattgttcactgcagccttgttcaacactgggtcaggcttttaagattatatagcattttttttttttttaagacagagtcttgctctgtcacccaggctggagtgcagaggcactgtctcggctcactgcaacctctgcctcccgggttgaagcaattctcctgcctctgccttccgagtagctgggattacaggtgtgcaccaccacacccggctaatttttgtatttttagtagagacatggcttgtccatgttggccaggctggtctcagattcctgacttcaagtgatctgcccaccttggcctcccaaagtgctgggattacaggcatgagccaccacacccagcctatatagcatgattttatattaygcactctatgctatataaaaatgccatgatattatatattctttaaactttttggcctaggaggatggggctgaattagggattagatgatacacatataaaaatgaatttagaccagaattgtccaatcaaacttttgcaatggtggacattatatctatgctgtccaatacagtagccactagcctcacgcagctattgggtccttgaaatgtggctagtgtgactgaggagctaaaaatttattaaattttwattaacttaaatctaaacaactactggtggctagtggctactctatcagagagcacagatattttcttcaagggtgtggctcttagattctggacctcattggatatctcagacttggaatgcaggaaatttaaagctgttctaaagtggatcttgaataagactctgagacttctgtgtggctagtctcttttcttgtatcaggatggggtgatttttttggagaaggacaagcaggcatcacacagggatggctcataaagaggttgctaactttaaaacaatccagacagacactggactttcagaagggaaatcagaggtggttgagtctaccactgtctgttccctcaatggccctcttcactctrttcacactgtcatctgctgttctggtcttattttcaatgctgggaaattttactctgacactgtttaggaggtaaacatttgccttgtagaggcaagcatttgcctgggagatcctaggctcttaggagtttttaaagatttggacattagaataaattagcttctttgaagccaaatataaattaacttcaacagaccgagctaggaaaagtakctactcaagtatctcaggcagtggagaagctcaatcactactcggccgaatggagtgcgagagttctgacctgacatccaggaagctttatgaagctcgtcaaaaggtggaaacaaaaagaaagagaaaatgacacaatctctcagacttggacaaagtgaaacatttaaaagtcaggactcagaggtccatggaattccagacatatagggagcttctttctattctttccaacccaaggacagcaccagtggcaagagcaagtggcatacatactctgcatttgtggaagaatcacctttcttagagcaagaaggcgaacagtgttgctgcctggtgcaaggtgcgctagtgccaggctagccatggaagagtcaccagaactccagcccccatactgggggattctgattctagcagatttgtggtagtgcctggcaatctgcattttttaacaggtgaaattctattgtaaaactagatctgggggctcctgccgagatcgggagtaacaacttttcttattaggagaagtggccaggaggagctaaatagcaccagtcatactagaactgaggtcctctggctgagggatcagagtaaaagaactctcttcccagaccctagggtgacacatatggcgttatcacaacttatacctcacacaagaaagaaagggcttagctgctaattgtctattttccaccaattcttaagagggtatagacttagttcatcatctgaaaccaaatattatcttagcaattttctgtataaatgggtgatagataatagcaaaggtgttttaaaaaaccaataaagatgattacatctattcttagcttaggatcccataaaaatgaacatttactgctaataattaagaagcataaaaagggacattctaaacagaaccttatttgggaattttagtattaacagatggcagcttcacaggtcaaagtcttctatgtgatgggaaaatgcagaggggaagtgatattcaaatgcagcccaggcaccctgtgaacttaagagcttgctcttttgtgcagagattttgtttcatatttctgattaccgatagctgtgatggtcaagctcataagtaggcatccaaccttgttcccacttccttccttgaatccactgggaactccaagggctcagaatttgcatctctgtggaaaatgctggtgagctctttggtgaaagatccattccccattgggcaagatgtggacagggaggtttatggatcaattccactgatactgtgtcgtgcttaataggcctccaggccacaaagtctctgaagtctgcccagacaggaagatcaagaaaagaagaagagcaataccctgtttcactggtgggatgtgctgctcacataaggttccccagtctgttttctagacacaagcatggacacaaaagtccttctgcttgagcacgtgtggacacaactcacactcagtgtgatacccacagacatgtagttaaggctcagagatgtaggcaaggctcagaagcattcagagaaagtgactgaggctgacaccaggtggcagcaaagccttctcaaccctcttagtggatttgctcagggacagtccaggtagacagaagatccagcaacaggtttctctgttcttgttcagatctgacktggcggtagcccagcaaattcatggcatcgccacaggctttctgaagtcgagaaaccttttcatagggcaaagaccagcgccaagcctgggagacattaagggcatccctggcatttgtgtggaaagcgtggtcacccatgcccttgcctcgggtgatgttatgcacccaggtctgaagatggggcaagaattccaatcccacgaattcatacattcgggaagtctgggccacaggggctcgagccaggtcctcatagcgcacaagcaggtagcgttcctgcagggccttgggcaaggactggatggtcttgtagatctccagctggctttggcagatgacctgcatcacatagtagggttggtcctccttcttgagtttttgctcatgctgccccatcacaatgcgactgtcaatcatgagatctccctttgtgcgttctcgggaacggaacacggcccgggggtcccggaccaggtgcacgatatgcaggttgagggaggggtctttcagcagcgggtagagggactgcaggttgaagaagcgcacctccttgagcaccacgtggctgtaggagcggcaggccttctccaccacctcaaagggctgttgactgcacaggagcctgcagtgagcccgggggatgatttcatcttgtgggatgatgtcacaggcaggtgcagaacacagggcccggctgttctcccactgaaagaggctggactgtctccggggaccaggttccatgtaggcatcaaagacgctcatgtcgcacaagaagacggcccgtatcagatcccgcacagccatgtgcagcatccaggcggtgctctgcttgaaggtcatccacacgtgccaggcgggctccatcaggtagaaaacatctgggtgctgcccaaaaagctgccccacaaaagaagagccagagcgccaggaagacagaaccagcacgtgcatgcgctcgggctgtgccttcatagacagggagctgatgttgtggctgtacatgtggaagaatagagccaagatggccatctgggaaaccagaaacagcaggagcttcatttttttaggcagtagcattgtgctgaagtggaagacctttaaggaacaaacagaaagggtggagttgggctgctgttttattgtttgccttctattccccttctggccaaagccacctgctctctgaccccctaccaaggagcaacatggaaagccagaggattcgtgccaacaatggcaccagtccttctccaaatcatttcctgtcccttacacttagtgtgttgatatgttctccttcagggtctttaattcctccttcctggtctttctaaaccaagccacgttgcccattggtttaccaaaaatatctgaactcaaccatatttaatcaacataaggaaatgtctccatcatggtgccctgatgacaaggatgtcttcagacaggccacccaggggaggcgtcacctcagtctgactcaagtcttggaggaatggcttgtgattcctgcagagacagagggagataagctacctagtgaagaactgcctcgaagccactgcttagccatccctccatcataagggagactgcaaccaagactgtgtctcatctccctccctcactgcagttaagcacaggactttccactccagtccctcaaaagatagggctgcaggctgtgcaactgcttggctttagttggaattgtctcctcaaaggcagagccaggtgctcatggtgcctgtcatctatttatctgctagctggtgttttgccatcagtgtagagtgaaaagtctacgtctagcacctgacctcacctgcccatttctcaccttgccctagatagcaaatccttctgatttggtgtcatcccatgggaccaaggccatggggagttgatccaatgtcgaccttgtatctgtgtaggtaataaactatctgaatctatttgagctgaattagagttatttgagctattagtgtctccttacctgccaactctaagaaagtgtggcaagccaacctaagtgctacagatctcagaactgtatcactctcactggggacacttgtggcccatgactcccacactgctgcttgaggcatacttgattacgtgggacaacctactcaaggcagctcagtgcagttgggcaagtgtgtatcacacaaccctagggagtgccatcccatcaagaatttagatatttattttcaaaatgttttttgtaggtgatagtaaagtatcttggtccaacaaartaagtatattaaggccaggtgcagtggctcatgcctgtaatcccagcactttgggagactgagctgggcagatcacttgaggtcaggaatttgagaccagcctggccaacatggcaaaaccctgtctctactaaaaatgcaaaaattagctgagtgtgttggcacacgcctatagtcccagctacttgggaggctgaggcaggggaatcgtctgaacctgggagacagaggttgtagtaagccgagatcgcgccactgcactccagcctgggtgaaaggctgagactccatctccaaaaaaacccacaaatataacaaaataaaacaaaaaataagtatattaagatggttttccagttgatagacagtaaatatctagagaaagggtctcactttgtgattcgtactgtctcatactgactgatggcaacattttgcaatcagggcttgcttcgtgtgaaaggaccacggttcccagtggtatgctagaatgttattccaaaggatattttaacctccttcccacatgactttgtcattctgggtgaccttctgacataaataactattgggagagagaatagctattgcacattgtaaaatattcatagtagtagtaaggtgttcatttgtatatcaccatgtacacaagaaattctcccttccagctttagtaaaaaatagaggctagatttccagatggtaagtggggctggatttgggggtcagctgtttttgtggtggcaggtcttataccaattatttaaaagtttttattatttatttatttatttttgcagagacaaggtcttgaaatgttgctcatggctgagcacagtggctcatgcctgtagtcccaacactttkggaggccgaggcgggtggatcatatgaggtcaggagtttgagaccagcctggccaacatggtgaatgcctgcctctgctaaaaatacaaaaattagctggacgtgttggctggtgcctgtaatcccagctaygtgggaggctgaggtaggagaatcacttgaatcagaaaggcagagattgcagtgagccgagattgtgccattgcactctagcctgggcaacaagagcaaaactccatctcaaaaaagaaaaaaaaaaaaaaaaaaagaaagaaatgttgcccagtcagatcttgaactcttggcctcaaacaatcttcctgcctcagcctcccaaagtgctaggattacaggcatgagccaccgtgctcagcctaaaaagtttttaataggtaatagtcacatgattcaaattattttgaaaagtttctacagactcagaatttaaaacaagcgttttctcagattctgtatgcaggagggaaaggagtgcctgccagcctgcagccagcctgacacaccccaggcttttaacatatgtcactggggaggggaaatctttttttttttttttttgagatggggtcttgctctgtcaccaggctgaagtgcagtggcctgatctcagctcactgcaacctcctcctcccaggttcaagtgattcccctgcctcagcctcctgagtagctgggactataggcacgtgccaccaggctcagctaattttttgtattttagtagagayggggcttcaccatgttgactgggatggtcttgatctcctgaccttgtgatccgcctgcctcagcctcccaaaaatgcagggattacaagtgtgagcccccatgcccagcctggaggggaaatcttatgacaagcgcttgtgcctgtgagggaggcctgtagtcagaaattaggaaacttctagagctatttgtaaacatgggtaatgacatatctttaaaggggtcatagtatttttccagaggaaagaaaacctaagaattttactagctgacaaatcagtcccctcttttttacgtactgacagctgctatttatctgctagctggtgttttgtcatcaatgtacagtgaaaagtctacttccagcacctgacctcacctgcccatttctcaacttgccgcacatagcaactacgtttttttttttgttttttttttttttgagacagagtcttgctctgttgcccaggctgcagtacacactggcgcratctcggttgactgaaacctctgcctcccgggttcaagtgattctcctgcctcagccccctgagtaggtgagactacaggcgcacaccaccacgcccggctaatttttgtatttttagtagaaacgaggtttcaccatgttagccaggctggtctcgaactcctgacctcaagttgtctgcccgcctcagcctcccaaagtgctgggattatataggcatgagccactgtgcctggcctgagttcatttttaatgtgtcttttcagttgctttatgtgtacacaagaacattcaaatgtgtatgtgttcttaatttttttcctctttaaaatgcaaaaaaaaatcaaaaaaaaatttcaagttatctgttctgtgctgccctttatttttagttgtcaatatgtcttagggagcattccagggcagttcgtaaagtagttcctcattcattgttgcttcgaagaagtattatatggattaaccacagtttatttaatcagtttcctcattgatggatgggcttatgagttgtttccaatcttttgccatttcaagtgcttcagtgatgacctttatgttcacacaccgtcacacatgtatgtaagatcacacatgtatgaaggtagccttcatactgatcagaaactattctctacgtccagggctccagagacctgtgagagtagattttaggagagaaattgggtagccacaaaggagactcttggcatttatagctttcttcctgaagggaaagcatgctttgccagctcgtgggttttccttggaagtcccctgaaccttctgggaagtatgtaatgactcaagccaaaccttgggtggcaatagcagaaaaaccccttatcttccattcataataacagtgcttttcctctggatgtgccaaaaagatccaatgaggatcatctcatcatcatggctgaaaatcacttgctgtacggcagaaaatgtcaatgactggtaattcctgccctgtagtcttagccctgcagattagaacaggaccagctaggccgggcatggtggctcacgtctgtaatcccagcactttgggaggccaaggtgggtggatcacgaggtcaggagatcgagaccatcctggctaacacggtgaaaccccgtctctactaaaaatacaaaaaattagccaggcgtggtggcgggcacctatagtcccagctactcgggaggctgaagcaggagaacggcgtgaacccaggaggcagagcttgcagtgagccgagatcgcgccactgcactccagcctgggcgacagagcgagactccatctcaaaaaaaaaaaaaaaaaacaacaggaccagctaagatgtgctgctagttcttaaaacttgagtgcaagaggaaaatgattagaaactaagctattactgatcttggcccaaggatgtcctccctccccgcaaagactgaagaggtgactttagcaaaagagcttctcctaagggcaatgtgagtatgagaaaaagtttggaacaaaaataggaagcaatggagcaaaaccaaaaagagaggaaaatgagaagaacttatcctgtatacagttataaggaaatggtgatagaattttataagcagggcttataattaggaaaaagctaacatttcctagggattaggagaatagacctttcaaagtgacaccctccctccctccatccygcttggggccagttctgtgtcctgtgcggggcttggtgactctggaccctccttgcctgccaactgctgctggcctgaagcccgtttcctccccaagctggagctgggcctcctaactgcccccagttgttcccaggtgttagttgtccacggttctcaggaactcccatggaaatcctctgacttctttttctttctgtgagcacttgccctgggtagaaagcgtagcttttgtgaagcaagtcccatcccttgtcactgagccccaagacacatctggatctagacgacacacaatgggctgaccagagagccaggggatactttaggatgtgtcttgggcaaaactcatttctgaagactgtaatgagcagcagaggcagatgctcctgggccctggcagaagcgaggtgatgcgagtcaccagggcgcttcatggaaggagactcttcaatagtgtcctcgaatcccactctcccattgccagaattcccagctgtttgtgtctagggtggcctttgacatcgacctttctcttctgtctctcagcatctccccatgacccactgctgccaaaaactacctttttcattttttttaaattactatttattcttttgggacagagtctcactctgtcagtgatctcagctcactgcaacttctgcctcctgggttcaagtgattcctgtgcctcagcctcccaggtggctgggattacaggtgcccaccaccgtgcccagctaatttttgtgtttttagtagagacagggtttcgccatgttggccaggctggtctcaaactcctaacctcaagtgatccacctgcctcggcctcccaaagtgctgggattacaggtgtgagccaccacgcctggcccaaaatcttttttttccttttttagagtcgggggtctcactctgttgcccagggtggagtacagtggcatgatcatagctcactgcagccttgaactcctgggctcaagtgattttcgatcctcctgtctcagcctccccagtagctgggatcacaggtgtgtccaatcacacccagataattttttcattttttactagagactggccctcactatattgcccaggctggtgtcaaactcctgacctcaagccaccttccagccttggcctcccaaagtgctgggattacaggtgtgagccaccgcacctggccaaaatatctttttaaagcataagtctatcaacttcctgcttaaaaatccttcaataaatttccagtgtatatgggattaaataaacatccccacacctcgcacctggggtccttcatggcctggtcttgatttcctgtcactcccttctgttttagtgccttaggctcccgactttcagttcttccaaacttgccctgttatttaaaagccctgagatttttgcaggacagctactattccttcaagaatctaacctgccttctccctgaaagggagagcctgccttctccctgaaagaagttctgtctctttctcctgagactttttttttttaattttattttttagacagagtcttgctctgtcgcccaggctggagtgcagtggcatgatctcagctcaccgcaacctctgcctcctagattcaagcgattctcctgcctcagcctccccaggagctgggattacagccacgcccagctaatttttgtatttctagtggaaatggggattcgccatgttggtcaggctggtctcgaacccctgacctcaggtgattctcccgcctcggcctgccaaagtgctgggatcacaggtgtgaagcaccgcgcccagccccctcttgagattaatttgtttcccagaccttctgttagcagccatcccttttgacagtaaaagcctgtatgggtgcctctcttttctctgggccactatagcttaagggaaaggctgtatcttatcttacttacacgtacataacaattctacaaatgatcagggctcggctcattaaacacttgctaaataaatgagtaagtgagtaaatagatgagtgtgggcttgatctcctgatcaagatcacaccgctgcactccagcctggtcaacagagcgaaacttggtctcaaaaaaaaaaaaaaaaaaaaaaaaaaaaaaatagatgagcatgggaagaggcacagtaattgctagaaagcagaaaactaaaggagctccttcaagagaatgaaacataagtatccttttctgaaatgcacacggacactcttcagcatcagtgactaaaatttaggtgattgcatggaacagtgagcacattacccatgccgtctcagttacttggaccaagctactaataaagtcagaggcatgggttagatgcagtatggcacagtaacccttggtccaaaaaacagttactataccaagcatgcattaattaaaaccaggagggaaattatttttctcttcctgtatgaaaattagttttagaaaacatttaaaaaataaaagcctcattgctgggtgataggctaccttgcttgaatcagctcagttactaggctaacaaagcaaaagcaaaaaaaaaaaaacaaaaaacaaaaacaaaacaaaaaacccaaactcagcacattccatcatcaccaccccaaaaaattaatttaaaaaaatgttgccccaacgatgggtgaacggtatcatcttaaaacacaaaggacagccatttctgaggagtcaagagaaccttaggaacttgaaaacgccaccaaagggtggtgagaagggagaatctatgtttggcacaggaaccacgaaggtgccagatgggtgacctcaagcagcagctgattagagwgggctgaattatagatgtcccccaaatcggtaccatgtagcctcgtagagacaaaatgggaaattctgagggggaaaaaaaccagatagatactaatttaagaagtctgggttccagccactggatgcattcctaacttacacttcccatgagattatgccccttacaagtagaaattagatacagcagaagataccttgagcaaagagagagagaatggggttggattggggaaactggcatcctcacaagcagcctgaagacctggaaaacctctgaagctaggcacctgggtaaagggtgtccatataacaaactcttcctagacagtgtcaggaggattggacctgggtcccgccagggctgtgtcactagtgccaaggacagtgcatggcacatagtaggtgctcaaggaacatctttcaacaaatgacaagtgaacatatatttgtacagtgtttttttttttactatatgagacccagaaaggaagattgagcaagatattataaaccaaaaataaaattctaaggccccccaaccatctgaaaggacttcctcctcagccaggactcttttttttttttttttttttgaaatgaagtcttgctctgttgtccaggctggagtgcagtggcacgatctcagctcactgcaacctcgactcctcaggttcaagcgcttctcctgcctcagcctcccgagtgacctggctaattttttgtatttttagtacagacatggttttgccatgttggccaggcaggtctcgaactcctgacctcaagtgacctcagtctcctaatagtgctgtgattacacccatgagccactgtgcccagccaggggtctttttaaaatttaacctgagagactgtttcaggccatgacaagaagtggggatctaacatgcctcatcatacctctccagcattaacaccaacacagaccttaagtctgataagaaacattttacaacctattctctctgaagcctgctatctgaaggcttcctctcagttgcagtgagccgagatcgcaccactgcactccagcctgggcgacagacccgtacttttttcttttcttttttcttttttgagatggagttttgctcttgttgcccaggctagagtgcaatggcaggatctcggctcactgcagcctcccggtttcaagcgattctcctgcctcagcctcctgagtagctgggattacaggtgcctgccaccatgcccagctaatttttttggtatttttagtacagacagggtttcgccatgttggccgggctggtcttgaactcctggcctcaggtgatccacctgcctcagcttcccaaagtgctgggattacaggcgcgagccatcgcgcctggctagatgtatttcttaaatgtatttgattgaagtctcatgtctccctaaagtgtataaaaccaagctgcaccccgaccaccttagacacatgttctcaggacctcctgagggctgtgtcaccggccatggtcactcatatttggctcagaataaatctcttcaaatatgtcacagagtctgactcttttcatcgacaatattacatttattttacacatagaaaagtatttcaattccaattagaagtttcatacttgtccaaggccatgcaagatagacgtatcttctaccatagctgatatgttggcaccataacttaatcatattgcacatgtgcgtggtgttccacatttttaaagcccttttagctgcaattatgatactgatcggttagatattttagacagtgatgagacatttcttcatttttcagaataaataaactaaactttaattgactggctcatccggtataaatagccttttctggatcagaacccaggttttggggatcccagggctgagaattttcaatgatcacactgtccctctcctgagctagagaaaacctacagctccttgcacctcctgtcttccactccccagcagaaaacagaggagaagctgcaggaagtacagaaatttgagctccaaagccaggatctgaacgagtcagttggcaccaggggaccatctacaaaatatacatcagaacagcctgatctgctctctgggctcttttggacccatttagggatagagctagtggggcttgggggctgctggtaagcagcttgtgttttattttacccagaaaattccccaggtgatctgatttatcccctctgcgcaaaccgccttcgccactgtaatctctagcttagctgccagaggttatctgatactcttgctccagcagctctgggtaatggctctgcattggagtcgtacacagaaattctcttcttaccttgtggcttgggcttccctgctgcttttgagaggctcactgctagccgggccatgcgcttttctcctctgactcaccaactcccctcttggcttcctcctcctacttgcttttgcataaccgtccctactcagagcacatttcactgtccctcccttctgccaaaaacaaaaaaggacccaccttgcaagacgggcttgagaaagcactcgctcccaggaagctgtgaaagtaacagctttaacrctgctgagactcaaggggtggggagactgcttgaggtgggctgggagaagcaaatgaggaagcattttcccccagactggaggcatcctggcatgttgactactgaaaggcaactgtgaaggtcaactccctatgggcagagtggggaggtggggaaaaagagaaagagagagagagagacccagggagctagtagatgaggctgatagggaaatttcatgacacttacaagccgaaaggctacaaaatctcaaacctgatttttagaccttgttcttatctccaaggagaaaatgtgaaagttatttcttgcattacacctgcctgctcactccaccctgggtctagggaggtaacatttctcagcctctgtgttgtattcaatatcttcacccttgctacaagaggtaataaatattttctgggaggacatagatgtactggcttggtggtacaggagaaaaaaaagtcccctttaagaaaaaaagaaacaaattatcattaaagattacaacctctcccttgctgtgtgcccttgggcaaatcacttacctactccgtgctactttacacggttgtcatgagtctgaaacaatggatgcccgtgaataaacgtaaattgtggtggagaatggaagcctcagactttcaagtccaagatcttgccgggcaagtcataccacctctttgagccctagaatatcatcggtgttaaataagggtaacaatatctattttacagtattgttgtgaatgttaggattaatgcgtatgaagctcctaacacaataatatgacaatataagagttaaaaagtggttgaataataataccttcccaccgccacccacccccgcaactcagctgccacttccttttccagaccttggaagagagagagagcaggcagggagttgtgtgagctttgggatgatctttgccgatttccatcagctaagtccgctaagcacaaatgacaagaacctgtggtgcttgccttgacttgatttcaattgtgtggctcttcctccyttcctgtttctctctggcagagagaagagaaatttctcttcctccagtgaaggactttgggcagaggtgtaactggaagcactagaactgggcagtcggtagttttgcttttatgcacaaagagatgattcaggtgctggcacgacacagygagatggcacaaggcttcatcatgctactcagaatagtatgtaataaatgaactgtttatttctgtaattttcccatttaatattttcaaatcgtggttgatgatgagtagttaaaactgggaaacaaaaccgtggataaagaggggactcctgtagttttattccagccctttctaacattcttttcgtgtttttccagcgccttcccaaatatagtgaggtcactcaaatacaccataaccccaagtaattcagatcacctgccatctttcccgtgctaggaattcatgctggcagaatgccaagcagctgaagaaaggcatcctctggtcactagtatacggtggtgaccagcatgttcagatactggacttccaagggtctaccacattccacagcactgggaagaaatttgaatgctggtgtctgatatccaggccttcttgtggaagtcctgcagcccacgtctctaaggcagcactgtccaataacagtctctgtgatgatggaaatgttccatatctgcactatacagtagccactgtccacctgaaacgtgctagtgcaaccatattggatcgtgcagtcaagtaagagatctaatctttttctttttgagtctccaaaatctgataacagatatagacctctgtagaaaaatgtacaattgctcatatacaaacacaaaatcatgtgcaatgccaaggaatcccaagtttaaaatccgtacaaaaggctgtgtgtacttgaagtgatttagacaattgtctcctggggaccactattcagcggagtcgctgatctcatctttgcccttggaagtttaccatctttactgtctggggacccacctgagtggtgaagagacctggggtcagctactgacctagactctgattttctcaggggtcaaaaggatctttctgctggttatactacctactcctgctaccttaccctgaccatcactccaaatgagattgcagtttcttcacttccacacttacctacatatcttttctgtccctagtgacactgaaaggacagtgatgcttccttgagtttcttttcttatgggggctctagcattcctcatttttttacgctaagcatcagcctgcaatgcagatgtccaggcctgaaactgttgaggaacatgtcactccctacattggtcaccagccctgttttgcttaccaaagccagtgtctggcctgagtaggtcactggctaagtggctgagtttagagaatagattctggagggctttgtagtttggctaagtttctgaagtctatagagactggatcttagcatcacagggagccagcgccttcggaagaagtgtctgcaagccaggaaggaaatcttggttgctgtaaatcctattatcaaatgggtaattgctttcagtagaacttgcttccttgagctgggccctggtggtggacatctgtgtagggaatcccccagcaatacgatgtcccttatctgtgttagaaatatttgtttcaacagtgggagaataagttggactagaatagattagggaaaaaacgaacacagttttaagtttttcactggttcttgcttttttgttgctcccttgaagggcagaggggatgggaaaataggaaataatgagccaggagctcctagtaaaactcaggcatcccttatatgtctttgatggttcaggaacataacattgctgcataattgtggctttatctggaatcaggctcctgaaattctacctctggtcttccaaaaactgtcagagactgcttcaggtgacccgtgatgatttagtcagggagtttctggggatgaaatctggggagactatcagtgtgtcttccggtggactgtcacctcatgtatcacattgatcaccaatgtctgtctaaaggtaaaataaccttaaatagctgtcaaatttgccctcctttatatgtcaacagcccctgtcttcagtctgcctttcaattttttttttgcttgaatttctgccaacagtctctcactttttcccatatccccaatcttatgccctccagccttcccactctatgctgcagctagaatgatctttcctaggatggatctgatccccagcatttccctgatgaaaatgctacaaaagagctcattagagacacagtacaaattcctcgagatgcttagttaggcaccttttaagagttggtgtctctcggccaggtgtggtggctcacgcctgtaatcccagcactttgggaggccaaggtgggtgaatcgccagaggtcaggagttcgagaccagcctggccaacatggcgaaaccgtgtctctactaaaaatacaaaaatccaccaggtgtggtggcatagacctgtaatcccagctactcgagaggccgaggcaggagaatagcttgaactcagggagtggaggttgcaggtaggtgggtagatgatgtgctgggaatttgtggaaactcccttcttattgcttttattttcctagtgagtgaggggataaggttgtcagctgagtctgaggatggggaaggagttaatggaagcctgaagagagaggaagatatggagtggccacctgtgaggatacgttagtgactatgctagggtaatgaggtaagatagatgagtgaagccgaaggtgagtggtcataaacttaaaatgaaagcagatagcagaggtgtgtagtttttccagccctgttcggctactactacttgtgtggggataagtggagagttagatttaagtaagacctctgcttttctggaagagtacaatgaagtattagagaggcaagggagcctaggggatattcaaaggtgtaattatgataatgaaccatggaatctaagctggttaagaggagaaagaaggacagaaagattatagctgaactaagttggagggcaagttttttgggagtgaggaggtcaaggatttgagacatcagggctttgaaagtatcatctctaaggatattgagttcatgtagaattgtcccaggagtagagttggagagtggcaggggtcatatgactgtaatgagggccatatagtctggttaatatcagagtgaaagctggaaatgtttaggaaggagggagccagaataatctggaagcagcaatgaggaacaagaaaacytattccattgtggagtgtaagaaacagccaccacttgagaggactgcagagaaagcagtgtcttcaagggagacctagtttcctttagagcaagaaagtgaagaggaaattaagacacttcgagaaaagatggattttgtggatcccaacaagggtgtcgggatggggagggtgggaaatggggtcagaaaatgagacatttggagccatttgggatgaaacacaagggataaggaacaactgaggatcctgggctacttgtgtgactggcataaaccaggataaaggaaataataacagataatgatggcctccaggaagatagtggtggccaaactgaaaacttggggaagggcagtgtgaagtacctgctggaagaggctggggtgctctctctttactcttggcaatggtgacgtggaggccagggtaggggtgttgttgaaactctagacattgagaaactgcatcaccacttctccaaacaatgcaaagcatctggagtcagcttggttgaaggaacaagatttttgggctgggcatggtggcttatgcctgtaatcccggcactttgggaggccaaggcgggcggatcacctgaggtcgggagttcgagaccagcctgaccaacatggagaaactccatctctactaaaaatacaaaattagctgggtgtggtggctcatgcctgtaatcccagccactcgggaggctggggcaggagaatcgcttgaacctgggaggcggaggctgtggtgagctgaggtcatgccattgcactccagcctgggcaacaagagtgaaattccatctcagagagtgagagagagagagagagagagagagagagagagagagagagagagagagagagagagagagaaagagtcttgactgagggagaaagaagagatagatcacggagcactgagggactaggtagttctccaggggatatcacaggagttcctgggtgctgacctgtgtgacatgaagtcatgtagtcatacagttggggtggatacagtggctcaagaatgccattgggtgacttatttctacagaccatcaacttcatgcttattgcctcatggccaggagacagctgtgcacatctagggctcacatctacattccagacaggaaactgcagaaaggttaatagctgcagggcatatgcatcacataaagtaaagacgtggaagcacttcagtctccaaagctcttggttcatgtgggttgctctgcttaaagcgccctctctgctttattgcctggttaacttgcgtcttctctttcaagattcaactcaagtcagcatcaccttctctgggaaaccattccttatgtccctaggctgagttaggtgccctggtctgtgtgttcagagctcatggcagattgccatgatgacctccattctcccatctttgtatccatgccctatgacatataactctgcctggggtctcagctatgctactcgctttgattgtagggattttttttttttttgagatggagtctcgcttctttacccaggctggagtgtaatggcacaatcttggctcactgcaacctccgcttccagggttcaagcaattctcccgcctcagcctccccagtagctgggattataggcatgtgccagcatgcccggctaatttttgtatttttagtagagacagggtttcactatgttggccaggctggtcttgaactcctgacctcaagtgatctgcctgcctaggcctcccaaaatgctgagattacaggcatgagctaccgtgcctggcctgttgggatgtttttaagcagaggctttaaagtaacttgtgcagttggacatgttcttgctcttgtgtcttagtcactgccgtgagatcatgcctgctggatgaaaggcacgggaagcacatccaaattaccatggttgtcctagctgaggccatcctagatcagccaatggcagctaaccaccagacacttcagtgaacccaagccaaatcagcagaactacctaagcaaccaccctagatgcacaagaaatgaggttttattgtataccactgaagtttcatggctggttgttactcagcattatagtagccttagaaaattgttgcagagtcccttcagcatagccacaagccttagccatgtctgtcttcccaactcacgttgggagagaatcaccttttatctgtgtatattacctcttgcctgtgtatacctagcacgtagcacaatgcttggcccatagaaggcgcttggtgaaagtctgggaaaggaaggaatgaatgagcctttgttcaaccttaaaaaggaactttttttttttttttgaracagagtctctctctgtcacccaggctggagtgcaatggcatgatctcaggtcactgcaacctctgcctcctgggttcaagcaattctcatgcctcagcgtccctagtagctaggattacaggcgtgtatcaccctgcccagcttttttttttttttttttttttttttttgagatggagtcttgctctgtcgcccaggctggagtgcartggcgtgatcttggctcactgcaatctccgcttcccgggttcaagcgattctcctgtctcagcctcctgagtagctgggactacaggtgcctgccaccacgcccggctaatttttctatttttagtagagatggggtttcaccatattggtcaggctggtcttgaactcctgacctcaggtgatccacccactttggccttccaaactgctgggattacaggcgtaagccaccgtgcctggcctaatttttgtacttttaatagagacaaggttttgccatgatgcccaggctcatctcaaactcctgacctcaagtgatctgcccaccttggcctctcaaagtggtgggactacaggcgtgagccactgcgcccagctgaaaacaacaacaacaacaacaacaaaaaacaggtgcacattccctataactaaacaatgtaatcaaatacacgcacccacagaaaacctggtccaacaaacatatgtgaagcgacaatataaaaccaagtctcatcactgtttaaagcacttttctacctcaagtacaatgattgtctctcaaacatggggcacttaattttacattttattgtattgtatagttcaatccaaagataatctaaatcccacaagtacattttaaaaggtcgaaggtaaagaagtagatatgactcagtgtcgatattttttctattattttcagtacgcaatactaaatcactctaaccactgacgtttcctaaacaatgtcaagaaacttgcattgcttaaaaaattatttgtattaacattaaaaacagaatttccactaggagaccacagaggacacatgtatctagtagcctagttaagtatgtggctggggtggygagaatatcatctttatgaaaggtcagtgttcacatgggattgtgtgtttgaggcacactaagaaaattaattttgtcaaagaagagggtttctgtagagcaatagtgaaaaagggtgtggatagggggcagaatagagcttaattgtggaaatctgagtgtaaggttagggcatttttatattctacttagcagagaatagttacaactttattttttatttttaagacaggctcattctgttatataggctggagtgcagtggtgcaatcacagttcactaccaccttgaccgcccgagctcaagcgatccttccacctcagcctcccaaatagctgggactatgtgtttttattttgtgtagagaaaaggtctcactttgttgcccaggctagttttgaactcctgggctcaagtgatcatcctgtcttggcctcctaaagtgttgggattacaggtgtgagccaccacatctggttgctttcaacctttgagcaagggaatgacataatgaagtgttgggtcaatctagctgctagattctagcagtatggtgaagtggtttttgcagaaacatgtttaatagtcatatcaaataatttaatgccaaaacactattatgcagatatacccatttatttaaaaatcacatatttcttaaagtctagattgatgcgaggatgcaaatgaacaagaaatcattttgagatcataaggtttgctcttctcttcctaatagtcatctagtttgttgcccgttgtgaatccatgaattactcgtttttttttctgagtattgggttgtcctcattttcctttgttttgcctttgatactctcccttgggtcctgttggtccagttccttgaaaaaataattacagtaggggtagaggtcagaagtaagaatgaatgagactccatgaagccaaaaccagaatcaacattgggataaactgttttaagctccctttccaagaacacagttcacccgagttatgatagcatttaccttttgggtgtgaggatatcattttgcctttgaagtgtgtttcataatccactgattggacacattgctatattgctgtcactatttctttttattcaagaggaacttaagagttaggaaggataaataactttgtccaaattattttgttatgttagtcacagaagcacgtcttttcacactccatgcctctctaagacctgctgtttcttctagaatrttctcctccccaccttactcccattccacctgccaaaaattcagccttctaaaccctgttcagatatgcctttcctgtgcaaccttcccttctccccgtgccagttctttctcctcgccccccaaagtaaattgtacaaacctctgtaatgatgcacatgcgtttacatatatgcctccctataggactataggggtcttccattttgtgcccccagcaccagcatctagtacacagtaggtgcttaattaacgtcggatacaagattagagaatctaaaggcaaggagggaaattttaaacccttccaaaatctaagcaaaagataaagaggcagcacctaaaaccacccccacttggattaattttttttttctttttttttttttttttgagacagagtctcgctctgtcgcccaggctggagtgcagtggcgcgatcttggctcactgcaagctccgcctcccaggttcacgcctttctcctgcctcagcctcccgagtagctgggactacaggcacccgccaccacgccsagctaattttttgtatttttagtagagacggggtttcaccgtgttagccaggatggtcttgatctcctgacctcgtgatccactagcctcggcctcccaaagtgctgggattacaggcgtgagccaccgcgcccggcctaattttttttttctttaatgtattagggaaggaggcttctcagccctcccgcagccgtcagggggtcgtcgtggggccgctttcccggcttcacctcgggggctcccatgcgatcccccgcagcctccccggcctcgcacgcacggtggccgtgacctctccccacaccgccccgcagcccctacgctctacatagtgcgcatgcactgtgcgccttgctgcgtttcccaagctgatgcaccctcttctttactcctctttgtccttttctcacgtttccttcgcccaggaactttgttttcccccttagaagacatctgcctttctggccatatcctccacccagcgcctccctggagagctggcagagccccgctgcggcgccaggagggggcttctgcgccctgggttgcgcttcctcttgcacgaggctttttccttccaacttctccagtgcgcagtcgggcggtgaggactcaaggaacgtgagcacaatttggttagggggcgaggaggaggtctaccctggcaggcaggccggcttttctagctgcttctagctccctgcagacaaaccactggtcccacaggcttagggttgaatcctgtaggtggatagtcctggggtctcacacacaacccatgccagaagaatgtttttattttcttatttttgctcacttgtattttttgggggacggcggggacagggtcttgctctgttgcccaggctggaatgcagtggtgctatcatagctcactgcagccttgaacttctgggcacatgtgattttcttgcctcagcctctcaggtagctgagcctacaggtgtgcaccaccactagcaagaacattatagaagaaacacctggcccccccccgccccacctttcttttttttttgtagagatgtagtagtcttgctatgtttgcccaggctggtcactcctgtattttctaatttttaaaagtgcgcatgtatttcttatgtgataaaaaccattaaatgcaaaaatatcttctttggaagtagggatcgtttgtgcagcagacttggcggaaatctcaaatatctgttgaaagtgcataaaagaatgtgcacatcaattttatcccgaatcctgcctcttctgaagttctaattcaaatgcagccttctcataaaacatttccttatatcctcaattacataggcctacaaagccttacctgatttggccacgcccagcccatcccattcctcactgaccccctcacctcctgctgttcctcattcctgaggctctgaaaccttggcctcttcctccctgttgttcctggcacactggagaaaatcgattaatatttgttgaatgagtgaatgaatgtgacctcttcctggtttgtatcattcggacaaaatctgttctgttctataattaggtatttgtcctatgtcccctactgttaagcaacttgaggcctcttacaccctgtgatatgacccctgctgtgcctggcacaatgcttgatatgtagtaatagcaaatattaacaataatagtaggaagagttgttacctgagtgattactaggggccaagtactgtattaaatatttataagtattacctcacttatatatataatgaccatgaagatacccagattataggaaggcatgtggccataaacgtagccttctattcttagtgctgctttacagcggaggaagctgaggcttagagaagttaagtagctcacccaaggtcacattgctaagacgcggcattacaggaaaatgcaatcctaaattattttcagatccatagttttcaaagtgtggtccaggaaccattggggtcctcgagaccctttcaggaggtctgtagatgcaaaatcattttaataatcatgctaggacatcgtttgccgtcttcattctcgtgtgtgtgtgtatggtggttttcccaaggctatgtgtcatgtgatatcaaatcaccttgaatgcagatgcagaaaggagaatccagttgtcttccattaaggcagactttaaagagattttcaaaactgtaaaataatgctaatcattccccttaatttttaaaaaataaaatatatttatttttaataaaagcatttttgtcaacatgtaatatgttcataattgtcatttttgaataaataaatatttaaaaatttatcaattttgatttctaatatggtaaatatctatagagaggagcccatataaacaaaaacactatgggattctcagtatctttccaagtgttaaggggccctgagaccaaaatgcttgagagtagatgtattagatagtatttgtttcctcgcaactctaaaatttaaaggttttcagctcctggggcagtttagataatttgtaactggtctaaattttcagtctgcagatcagcttggaaagagaggcagccctggggtctatctccatgcctggtcctgactggtcttggctacctggatttattctggtcttaactgctctgtgaacttctggaaactcccattcctgtcttgggctcacacatagctcccaggtagactcattatttcattcttttatcccccattctcttttatggttatgtggcatgtcagattttaccttgatcctggagtagacctttctcccaactttctatactgtcttacagaacaaaggtttttttttgtttttgtttttccaatatccaaacacttcctggattccggatgagccctgaatggcttatttcctgttgccatggcatgtacagaattataacatatcttacattctaaattatttctcattgattacctctgggaaaaggaactgggtggcaggagaaaagaagtaggaggaaatcttacctcttttgtaatagcttttgtacagaaattaaatttaaaactttgctccaagcaaagcaaaatcaacaaacaaaacaacaaaaagcaaaccatacacaaatatctcctgaagtgtgattatgtctagaacttccttgtttggtgggaaactcctttcagaagaggatcattttacagggtggattcagaagtagaaagcatgtcataggtcactggactgtgaagaaggaggtgcagtttagaatggagactgtctttgggaacttcaggttttggtttttttttccgccttcagatatctgaatcatagtttgctggaataaactaagaatatgaattggcctctctttatgaacattattttaaaaaatctttgcccaggcacagtggctcacgcctgtaatcctagcattttgggaggccgaggcaggcggattgttggagctcaggagttcgagaccagcctgggcagccatctctactaaaatagaaaaaattatctagatgtggtggtgtgcgactgtagtcccagctactctggaggctgaggcatgaggatcgcttgaacccgtaagagcaagattgcagtgagccgagatcatgcccctgcactccagcctgggtgacagagtgtctaaaaaaaaaaaaaagttgatgtactatgaacttagatatacaattgcttcttggccttttgactaacatcaagtgtaaacttgttttctccgtattttcctgtgctgatgcatttggagaaaggaggtaaacgcaggttctattcccaaccaggtcacctatttgctgtgtgatctttggccagtctcgccctgggcctccgtgccccacacctgttgcacaaaggtgagacttgcctttgaggracagttgagagggaaacagaagatccaggcagcaaagtcattcagaaaggtaaaagtgctattcaaaacctaagtagtactgctaaccttcatgctgaagactaaactctgatttttaaatcttggccaaattcctatctaagggttctgagaatctgctctacaaaccataaattctcatcagatgggttttatttaacttcatatatcatgacttactttccaatctgactgtggcataacattatgtgacaaagaagaaagtcaaaatattttaccccaaaactcgtttctttgccatgttttgaaatggtcctgcaaagctgtcctttgtggggggaaatgtgcatctaaagaatctctattaacgtagttagatctttttcttccagatcctcccaatctttaagagattaagtaagagtctagcaccttttaaaggtctgaataggaaacaatttgtcatctattgtctctaagggcagccactataagacttcaaaagaaccttggtctccatagtcttttgtcttaacctgaacattttctttctattgatcccaggtctttagacaaactcaaccaattgttgatcagaaaatgtttaaatttacctatactctggaagcttcccacctctcaacccgctttgggttgtcctgcctttctgaaccaaaccaatgtatttcttaaatgtatttgattgatgtctcatgcctccctaaaatatataaaaccaagccgtgccccgatcagcttgggcacatgttctcaggacctcctgagggctgtgtcatgggccatggtcactcatatttggctcagaataaatctcttcaaatattttacagagttttgactctttgtgttgacaatgcttaattctcaaaataccatgagaaggaaacaggaaactagatattgattccaatttcagattagcacagtaagacattaaggaaagttctccaagtttcaaagcaagtcagtaacagttgagaccactgttatctgcctttttccagtcttttgaggaaatattctcaaagcaaggggtcagcagtcagtggtcttcaaaktgggaagagtaaagtggacagttctaggggactccagttttagatcctcagcttcatgtgtggtcttctgggaatggccctggttgcttgcgcagatgctcctttcccaagcgcctcctataatctgttcttctcttgctttrcaaaaggagtgcatacccttaatctgccctgaattgcccctgggaggcaaaacctctggggcaccaaacaaagggacactttcaaatatggacttctgaaaaggctcttttaataatcaaaggggaaagggggagaaaacttgcctaccgtttaccttccgttgtcttgaacattttcctattgggaggaattggcctgcaaatggatattctgaattgaatattgtggagtaggaatagtggaatagaagttatttcacctcttctgagagaggttccaagatggctgaataggaacagctccagtctacagctcccagcatgagcgatgcagaagataggtgatttctgcttttccaactgaggtacccggttcatctcactggggcttgtcagacagtgggtgcagcccacagaatgtgagctgaagcagggcggggcatcacttcacccgggaagygcaaggggtcgggaaattccctttyctagccaagggaagccatgacagacggtacctggaaaatcgggacactcccaccctaatactgtgcttttccaatggtattagcaaatggcacaccaggagattatatcccacacctggctcagagggtcccacgcccatggagcctcgctcatttctagcacagcagtctgagattgaactgcaaggcggcagcaaggctcggggaggggcgtacaccattgctgaggcttgagtaggtaaacaaagtggctgggaagcttgaactgcggggagcccactgcagctcaaggaggcctgcatgtctctgtagactccacctctgagggcagggcatagctgaacaaaaggcagcagaaacttctgcagacttaaatgtccatgtctgacagctttgaagagagtagtggttctcccagaatggagtttgagatctgagaacggacagactgcctcctcaagtgggtccctgacccctgagtagcctaactgggagacamctcctagtaggggctgactracacctcatacagctgggtgcccctctgagatgaagcttccagaggaaggatcaggcagcaacattggcctttctgcagtaattgctgttctgcagcctatgctggtgatacccaggcaaacagggtctggagtggacccccagcaaactccaacagacctgcagctgagggtcctgactgtaagaaggaaaactaacaaacagaaaggacatccatgccaaaaccccatctgtacatccccatcatcaaagaccaaaggtagataaaaccacaaagatggggaaaaaccagagcagaaaagctgaaaattctaaaaatcagagcgcctcttctcctccaaaggaacacagctcctggccagcaacagaacaaagctggacggagaatgactttgacgagttgagagaaggcttcagtaataacaaacttctccgagctaaaggaggatgttcgaacccattgcaaagaagctaaaaactttgaaaaaagattagatgaatggctaagtagaataaacagcatagagaagaccttaaatgacctgatggagctgaaaaccatggcatgagaactacgtgacacatgcacaagcttcagtagccaattcgatcaagtggaagaaagggtatcagtgattgaagatcaaatgaatgaaatgaagcgagaagagaagtttagagaaaaaagagtaaaaagaaacaaacaaatcctccaagaaatatgggactatgtgaaaacaccaaatctacttttgattggtgtacctgaaagtgatggggagaatggaaccaagttggaaaacactcttcaggatattatccaggagaacttccccaacctagcaagataggccaacattcaaattcaggaaatacagagtacaccacaaagatactcctcgagaagagcaactccaagacacgtaattttcagattcagcaaagttgaaatgaaggaaaaaatattaagggcagccagatagaaaggtcgggttacccacaaagggaagcccatcagactaacagtggatctctcagcagaaactctacaagccagaagagagtgggggacagtattcaacattcttaaagaaaagcattttcaacccagaatttcatatccagccaaactaagcttcataagtgaaggagaaaaggagaaataaaatcctttacagacaagcaaatgctgagagattttgtcaccaccaggcctaccttacaagagctcctgaaggaagcactaaacatggaaaggaacacccggtaccagccactgcaaaaacatgctaaattgtaaagaccatcgatgctaggaagaaactgcatcaactaatgagcaagataaccagctaacatcataatgacaggatcaaattcacacataacaatattaaccttagatgtaaatgggctaaatgctccaattaaaagacacagactggcaaattggatagagtcaagacctatcactatgctgtattcaggagacccatctcacgtgcagagacacacataggctcaaaataaagggatggaggaagatctaccaagcaaatggaaaacaaaaaaaggcaggggttgcaatcctagtctctgataaaacagactttaaaccaacaaagatcaaaggagacaaagaaggccattacataatggtaaagggatcaattcaacaagaagagctaactatcctaaatatatatccacccaatacaggagcacccagattcataaagcaagtccttagagacctacaagagacttagacccccacacaataataatgggaggctttaacaccccactgtcaatataagacagatccatgagccagaaagttaacaaggatatccaggaattgaactcagctctgcaccaagcagacctaatagacatctacagaactctccaccccaaatcaacagaatatacattcttctcagcaccacatcgcacttattccaaaattgaccacatagttggaagtaaagcagttctcagcaaatgtaaaagaacagaaattataacaaactgtctctcagaccacagtgcaatcaaactagagctccagtctgggcaacgagactgaaactccatctcaaaaaaaaaaaaaaaattcggagagaaattaactctgattattttattggtttgaaaatgaggatcagagtgtccaattaggttatatggtgggtatttttcataggtgaaatgaaatagatttccaaggctttttaacaagaatgtatttaaaacataggatgagataaaaatatttttattgaaaaaatattaaattggtgatggtggtttgatataaatattttgattttccagtagtttttgagtattatcaacaagttaaacaaggtgtatcttaagtgaaagaataatagcaggctgatgcactgtgatcctagtgctttgggagactgaggtgggaagactgcttgaggctaggagttcaaggtgagcatggacaacatagtaagaccccatctctacaaaaataaaaataagacaatttaatggggcatggtggtgcatgcctgtagtcctagctacttgggaggctgaggcaggagaatcacttgagctcaggagttcaaggctacagtgagctatgattgtgccactgcactgcactccagcctgggtgatacacaagaccttgtctcaaaaaaaaaaaaaagaaagaataaccagtataattaattataattacctgcctcaaaattaataattaataagtctaattaataaartaagtctcaaaatcaataactaattaatataataatgataatttctgaagttgagtatactagtttctaaaaattaagagagtggtgactctgacaactagggaacaaattcttctgcaggtttccatttactggctttcattaaaattgaagaggaactccatttcataatgatggatccaggttgtgtcattgatagctgctaaaaccattagatggaaagataataacactgaacccactgcacataccatctgtgaaggattcttgccaaagtataaaatctgaatctgaccaagtcttgagatctaaagatcaattttcaggaaattcagaggccagaagagcatgttaaacagtaagccaaggagatgcaaagagacttaagagaaatatcagccaaatgcaatttgtgggcctcgttaggatcttgagttaaaaaaccaacactaaaaaagaaaagaaaagaaagagaagaaaaaccaacactaaaatctaaaccaaaccaaaacaaaaatatgtgtgagacaattaggggaaatttgcacattagatggatattgaatgacttgcatttcttaggtgtactggtttataagttatgttttcaaaacatccttatttttaagagagatatatatagaagtatttacaggtgaagtaaaagtgtgtaacctgggatttgcttcaaaacagtccagcagtgatgaagtggtgtgaggtggagaggagatgggaaaggtagagatgaaacaagattggccatgggttgatgataacattgttgatgctggtgatgggcacatagggattctttttattcttctatatttgtgtagacttgagcttgtcagtataaaaaattaaagaataagtaaaaacaaacctaaaaaacaaattaatgcattgaaagaatacctaacctagccatgagctgatagatcactaaagataaatttttgaggaggggtgtggtggctcaggcctgtaatcccagtgctttggcaggtggaggtgggagagtcacttgaggctaggagttggagaccagcctgggtaagacccctgtttctacaraaaaacctttttaaattagccgggcgtggtggtatgtgcctgtagtcccagctacttgggagtctgagatgggagaatcgcttgagcccaggagtttgaggttacagtgagcaccactgcattctagcctgggtgacagcaggagagactctgtcttaaaaaaagagatttttttttaatgattaacaactgtgtgatttggggcataaaactcaaaaggattgagtgactgacactgatatctcaaaactctccatttctatcttcttgtttgtgtaaacagtgcttatatttctagaaacaaaatttaaaaatagagtttatgctgaactctcattctagtgtaatatttatccacaaatgtgtgaataaacagaaaaaagccccacccaatctattaaaacatctgtatttttaacaaattttttatttttgtgtttaataattatttatgttatttatcaaaacttgtaatatttatgttgttttgatcagttatatactaatagcaataataataaccaatccagaataagtttccactatttgaagactttggtgtcagtagagttttttaaagtttctaatttaaattatatacatattttatatatgataagataattgggagaaaactttcaaacctaaaaaattatacaagtttgaaagtttgtggagaagtgtaatggaaacataatttcaaggaggaaaaggaatgacaagttaaaacgactgttaaagaaaagattgttcatatattttttaaaataggcgatcaagtctgaaattaatagtgcattaagattgtacggctatatttaaaagattgatgtaacagttttattttaaattacatcctttgcaactatttacacttatgtttgaaaatattaaatattagctaaaaacatattaggggatctgggtttattttcttttatggatttttttaattgagtaaaattcacataacataaaattaaccattaactatttcaaagtttacaatttgtgacattagtacattcacaactttgtacaaccacgatctcttatttctgagacattttcatcacctcaaaaggaaactctgtacccatgaaacagttactctccattctgccacaccccccaccaccccccaactgcttgtttgttttctgtctttatagatttatttgttctgaacattttgtataagtgaaatcatgcagcacgtggccctttctgtctgggttctttcgcttagcataatgttttcaaggttcattgcattgtagcatgtttcagtactttgttccttcttatggctgaataatattcaattgtatgaatacaccacattgtatttattcatcagttgatggacatttgggctgtttccatcttttcactattgagactggtgctgctgcaacaaacattcctctacaaggtgtttgtttgaatacctgttttcagttcttttcggtacacagtattccgcctttctgctatttcagttatccttggttatccatggcccaaaaatattaaacagaaaattccagaagtaaacaattcctgggttttcaattgcatgtcattctgagtagtgtgatgcaaccyctccctgtcccgctctgtcctgcctggtacgtgagtcacacctttgttcagcatttccacactgtcgatgctacccacctgtcagtcacctggtagctgttttagatatcagatcaactgttatcacattgcagagcttgtattcaagtaacccttatttaatggccccaaaatgcaagagtagtgatactggcatattattattattgttctattttatcattgttgttaatctcttactgtgcctaatttataaattaaaccttattgtaggtatgtatgtataggaaaaaaacatggtgtacataggatttggtacgatgcacgatttcaggtattcactgtgggtcttggaacctatcccctgaggataagggggaactactatgtacctagcagtggaattgctggtaattttatgcttaacgttttgaggaaccaccaaactttcccacagtgactgcactattttacgtttccaccagtgatgcacaaggtttccaatttccccacattctccacaactcttgttattttccattttaattatggctgatctagtgggtgtgaaatagtatctctttttttttttttctttgagacagagtctcgctctgtcaccaggctggagtgcagtggtatgatcttgactcactgcaacctccactccctggttcaagcaattcccttgcctcagcctcctgagtagctgggattataggtgctgccaccacgcccagctattttttttttttttgtatttttagtaaagatggggtttcatcatgttggccagactggtcttgaactcctgacttcagggaagccacccgccttggcctcccaaagtgctgggattacaggagtgagtcaccgcgcccagcctcgttttggttttgatttgcatttccctgatgactaacgacattgagcatcttttcatgtgtttgatggccatgactacctaaactaattttttaatgaaactgttttaatgggtatgaaagcaaaaaaaggttgcagaccatggcttgtaagtgagaacatgcggcatttggttttctgtccctgtgttaatctgcttaggataatggcctccagctctatccatgttgctgcaaaagacatgatctcattcctttttatggctgtgtagtattccatggcatagatgaaccacattttctttattctgtacgatgaagtttgaatgccaaagtgagtcccttgcacacagtgagtgtttcccatgctagtttgttggtttgtcatgacaaccagaagggaccttctatcctcgcagacattctttagtgggagtgcaccaggaaagacacgtctgtgtcaggctggaggaaagtgaaggaaccaggaagcgtgtgggcaaatggatttgtggatggccaaagagctgtgaaagtaagaagagagagtctccagactctaggaaagcggagaacaccgtgagtggcaatctccacaggtgcattgttagatcattggacagcatcctactcctatatccgtacgtgctccctaacacggaatctggcgcatagtaggtacaccaggtggctgctgaatcaagttggtcactgttgatctctgtcccatagtaggtacaccagatggctgctgaatcaggttggtcactgttgatctctgtcccatgatggctctgtcgagtccctcttgtctccttgatggaattaagaggtagacatcttgggtgctgctcctgctctgccctcatccctgcccatctcagtctgacattcyccatggttccccatgacctcctaccagcatgtcccttggatcactagttttagtgctaaatatccccgatgctcttgatcattatttctagaaattctcttcttccttgtcatttctattatgtttgtgctacctgtaggcatggctgtgtttggggtcctagaatcacacccagtcctctgtggtaaagaagaaattgtgagactatggcatttttttttttttttcgctgatagacccttaccccagatgttttgtaggtttatctggggttattcactgcctctaaggctcctctgcagacagtataagcctgcttgataatgttttgagagccaggtgggagaatggagctggggcagtggcaacgccttgtgatgtttgttcagcatgcacacttttaatcatctccttgttttaaatccactgtctccatctggccctctgctggtgttttccccagagaataaagctcctatattgcaaagtttgggaggagaggtctttgggctttgcaggtgggaatgagatcggtgggtccaattgatccttatacgtctgtcacatggctcgcctctgccttgtgaagtctctgatgcccgatccctgagcctttccactgggtgaatcagcttgcttcctggtatcaccgaaacactgtgaacatctctcatctgcgtttgtctcctttctcactctcttgtccttgtgaatctgcagcctttttgtcctttcagtgtcatgttatggggctcaggaaatgccmatgttcattccacttacatctaatatgcaactattctttaaaatcaagtccatgcaatgtaatattctgcagctgttagaggaataacatatatctacatatctgggcatgctaagtgggtaatatagagtgttaagtgaaaaaagcaagttgtaggttggcttgtaaaatacgacactatttgcattacaaattttaaatattatctataaatacgcatgtatacatatagtgtgtatatatacatatatagagagtaacatatattatcctagcattatctgagataatataaataaatgtcaaagtacatatggagagctagtggaatattttcacgtaggcaaaatatttaaatatttcatgtagcctggactgggccaggcacggtggctcatgcctgtaatcccagcactttaggaggctgaggtgggaggatcacttaaggccaggagttcaagactagtctgggaaatayggtgaaaccctgggtctacagaaaaattaaaaaattagccaggcatggtggcatgcacttgtagtcccagctactcgcaaggctgaggcaggaggactgctttagcccagcaggtcaaggctgcagtgagcggtgatggtgccaccactctccagcctggtcaatagagtgagacaccctctctttstatgtatatatgggactgatttaaaaggctaggcattctggtgaatgtaaaattaactttgagggccatgaagcctgggagcatcgttcacattgtgttctatgtgactggttccccctagagtttcacaactgcagtggcccttcctgggaggtccctagtgggagaagctgtcattctgtgaaacattagggagtgctcatttgcaaaggagttgcttctcccacatgtaattcctagtgacccgtaccccaggacatgtgtgtttgacagtggttaatgatcctcttgagctatgccggggaggccaactcacaaggtgaataataacagctagacttctatttacagagatacccattctagcatgttgtgggaaacctaggctttctcacaaaagcaactagctcttcctccttccaaccaccctcacctcccaaacaaacaactcccaaatcaaacaagaagaaatggaaaattttcagttcaagctcaatggcaaggggttgagaggaatttagccatatgattgaatgttctctaggaacatgtctctagcagtggttctcaagctttactgcctagaataatcacctggggaggtttcaaaaatcccacacccaggctgaatgcatatggatatttgtatctttggacagggtttctccaccttggctctatagacatttgggacgagataattctttgctgtaggagctgtcctgtgcattgtgggttgtttaactgcacccttgggctctacccactagatgccagtagcacacttacctagttgtactgaccaaaagacatatccatgtatttctagtagtggggcaaaccacctagttgagaatcactgttttgcggggtgggtcctaggcactatgtttttttaaaaaacttcctaggtgatcccaatgtgcagccaagtttgagaaccagtgctctgatggattttcccttggaaagcgtagcctggtggtaagtcccagaaattttggagtacatttttataaactgtgatataatattgattcagtaagaatggatatattctgagccagatgagtggacccactcatcctgtctagtagacatctgtttctctccatcaaggggagtttggaaaacaaacaggctgtgaacaccttgatgagccagatgaagggtgtcatgagccagatgagcttatagtagacagagaacctttacagcgaacaaggtatgcaaataatgaaagctctaagcaacattagaaaaccacagggcgtacgttattggtgctaagataatgtctatcattgactggaggtcctctgtggatcaaggtcttgtgctagaggatctatttacatgtcatcacataagaaggcatctaagttaataataatagtagtaataataataaatagggcggatgtaaagaacacgcatgtcgatacttctgaaacatgctttaaccttaactgytgtatataagcacttatgtaatttgagtgcttctctgtctcactgtggcaggaattgtagatgggctcacgcaaaccccccctttccatcttcttcctactatggaagcaagaaagtaaaaaaacttgccttacagattcctctgctgttaggagcagccatgtgacataattttggccattaagaatgtaagctctatgaggacaagggtttttttwatttttctattttgttctctgctggtcaaaaactcatcatattgtacactctaaacatctctggtctattgtacattaattttaaacccaataatgtataaaattaaagagcaattgttaagaaaatccaaaggcaaattacaaattggaaggaaacattttcttggccctgaaggaagttgaggtgaggatcctgaggcactgagaccctgtgcttaaatttctggtaaatcgcagagctagctgaaatttatcccgctgacactagatgtcaccattgtgccaagtaaatgtagctgctgttcagagtgcagttcaatattcaggacagagtcaggctcttcaaatggttggagattgttaatttttcttccctcttgatgccagaatatggtctggttcaaaaatgacgacagtaataatgatggaggagagcaaagatcacctggtggccatcaggcagaccatctggaggcaaaactccctgtctgaggaattagaaagtaattagacttgcctattatctaaagctggcatctggtaccagacttcttcsccctaaatttataagtaactaggagttctatacatctccgaaatccatgcacgttgaaactcattgtgcatcccttgctgacatcaaggcactaaaatgtctacaaatgtgatcatttttcatgacctacrttgctaatgtggtccacattacccttaagctcctgctttaaggtccataaatacccctaaggaaaatccaccagcacgctcagtcctctcttgctgaagtgcctcactgccctctcctgcagtgttctttctatctaataaaactttccttttcaaacctatactgtaaattcttttttaccacctgcaagccagccacttgccattgctggggctctgatacctcgcctggcagggatcagagaagtttgtacgaggagcaacaaataagataattctacccagtatgagaccacatttacattattaaagctaataaatatgcaaaaaagtttcaatctatgttggaaaagacccaaaattaaatatttgaaatgaagtaggccgggcgcagtggctcacacctgtaatcccagcactttgggaggccgaggtgggtggatcacgagatcaggagttcgagaccagcttgaccaacatggtgaaaccctgtctctactaaaaatacaaaaattagctgggcatggtggtgggcgcctgtagtcccagctactcgggaggttgacacaggtgaatcgcttgaacccaggaggcagaggttgcagtaagccgagatcacaccactgcactccagcctgggtgacagagtgagtctccatctcaaaaaaaaaaaaaagatgaagtagggcataacattgcaaatcactaactagatgaaaactttgggtgtgctcggggagaagagggaagagaaagacctcaggaatgaacaaagaagctcaagggaagagtagctcagaacaccatcaatgacaagcaagtaaaataagaaaaagcatgaggacagttaattactacttcaaggtaacaggcttgggagggagaagcagattaaaatggcatgttgaaattctgaatgaagttgctaagacacttgaacaaaaacacagtaaattcacagaattgcagaacttttgtgtgcggagtgaaaagaggggaagagaacagtgctggcacactgcgttgggctgttctcaccttgctataaagaaatagctgagactgggtaatttatacagaaaagaggtttaattggctcatggttctgcaggctgtacaggaagcatgatgctggcatctgctcagcttctggggaggcctcaggaaacttacaattatggccaaagttgaaggggaagcagtcacatcacatggcaggagcaggaccaagagagagagcggggaggagccacatccttttaaacaaccagatctcaggaagactcactcactatcgcaaggacagcaccaagggcatagtgctaaatcattcatgagaactccgcccctatgatccagtcacctcccaccaggccccacctccaccactggggattacatttcaacatgagatttgggcagggacacatatccaaactataccaaacaccatctttagaaaacaaggcactagagcccaaactccacacatgctaactctccatggactgccartatcttcaaggagccactcactctctcgcttgcaggtctagcatccaaatctgcacaagagggatcttccacaagatgggagcatgaaaaagaaatgtagaagataaacaacaagaacgtataaaaataaaagctaatatgcttagctcagaacaaagaactaaaaaccaaggtggcactttggtctgaaacttctatttttattctttttggagatggagtcttgctctgttacccagacactgtacccaggggtacagtggcacgatcttgcctcactgcagcattcatctcttgggttcaagtgactctcctgcctcagcttcctgagaagctgggactacaggtgcacaccacgatgtccagctaatttttatattttttattagagatggagtttcaccatgttggccagattagccttgaactcctgaccttaagtgatccacctgcctccgcctcccagagtgctgggattacaggcatgagccaccacgcccagccagtctgaaacttgtaggacaaagatatgtaataaaatctctgcaaatgaactgaccaatggcccttcctcctatttggtgttgattagattccggaagatttttgaggggttgttagattcctgtagctcactttcattttatttgagagtcaccttactgtaggaaatggatgttctctgtgagtaagccaaatcctgaggataaattatttcaaaggatcatcttggaatcagaagaaaactaattggtaaatttctgttctaatacacttagatctgattccagtgctgaagggcctagtctagggttttcaactctaacttttttgttgtttttgtttttttgagagacagagtctcgctctgttgcccagggtggagtgcagtggtgcgatctcagcttactgcaaactccacctccaaggttcaagcaattctcctgcctcagcttcccaagtagctggaactacaggcgtgtgccactctgcccagctaatttttatatttttagtggagatggggtttcactatatgttggccaggctggtcttgaactcctgacctcaggtgatccacccgcctcggcctcccaaatcaactcttactttttaatagaggcttttactggtataagcagaagtacgagaaaataatttttctaatactgtctgatttcattttttacatttaagcctaccttgataatttatttagctgttaaaaagtgttagtttttcataaacttccataattttataaaacttacagtcatcttccaaagttaatttggaaattaattttgcaccccagaatgctatttccaagtgaattagcatcttaagtggtggttaagtcactacctggaaatgaaaatcagtttttccataatggagcaattttgttatatgtatatgtcagtgcaacaaaacaattacaatattagcaaataccaaataaaaaatttcttccatttcattctctttattaagacagcaggtataatgtgagagaaattaattacaatataatgcaagttctataaatgtaaatattttttgtctattttattcactgctctatccccagaatgatacctggcacataaccagtaaaacctcgataaatatttgctgaatagatagccattggagaattaggagtttattgaagatgttatggargaggcctcctgggaatgtctaagggctttaaaacttgatctcttaaaactatggtcattaaaaacaaaatacagagagagccaaaatttggttaatggatacaaaaggagaactagatagcaggactgagttctagcattctaaagcataatagaatgactataattaacaataatttattgtattttgaatagctagaagagtggattttgaatgttcccagcacaaagaaatgataaatgtttgaggcgatggatatgctaattatgtggatttgatcattatgtattgtatatatgtattgaaatatcacacagtatcccataggtatgtacagttattattattaattaaaactaataaaagcaaaaatagagttttccattccacattcaagttttatctctagttcgtctactataattacccattaccaaggtcttttttttttttccaacacatttaatgaacaggcagagagggagactgagttttctgagaatattgagtaaatattgaaaaagagaaaaaggagaacaaagatgtttaggaagagtgtgcgaggagccactagagttggacttgaataaaataaaatcaaactcctggatcacactaccaactcacactaaacatggtggggaacaagtcaagatgttaaataacaccacagccaaacacagaatgggagaaattctgtaggacaaatagtccaacgtcttcaaagaacaaatgtcatttttaaaaggaggacaaattgttatatatacttaagagacttaagagacatattgctaaatgaagtatgatgaccttgtttggatcatgattagaaagaccacctgtagacctggcgaggtggctcacacctgtaatcccaacactttgggaggccgaggtgggtggatctcttgaggtcaggagtttgagaccagcctgacttacatggtaaaaccccatcactactaaaaaaatagaaaaaaattagccgggtgtggtggcgcatgcctgtaatcccagctacttgggaggctgaggcaggagaattgcttgaaccaaggaggctgaagttacagtgagccaagatcgtgccattgcactccagcctggggaacaacagcaaaactctgtctcaaaacaaacaaacaaacaaaaaaaaacccaccacaacaaaaaacaaacaaaaaaaccccacctgtacaaagccatttttgagacaatcagggaaaattgaatatggctgggtattagggggtattaagacttttattaatggtaatataattgtgttatctttatccccttatctttatctcctagagaaacacagtgaagtactgacagtagaaatgatatgatgtctgagttcaactccagcaaaacaggtaaacaataacagcaaaagtgtgtgtgcacatgtttacatgtgtgtttgtaggagcagatgcaatgagatggaattgaagctggtgatgatggatgggcaccgggggtccattatactactttacagagtaacttttaaaaacctaaaattaaaagtttaaaaaatatgggctgggcgcggtggctcacgcctgtaatcccagcactttgggaggctgaggcgggcagatcccctgaggtccggagtttgagaccagcctggccaacatggtgaaagcctatctctactaaaaatacaaaaattacccgggtgtggtggcacacgcctgtaatcccagctacttgggaggctgaggcaggagaatcgcttgaactcgggaggcggaggttgcagtgagccgagattgcgccactgcactacagcaatggggggacaagaacgagacttcatctaaaaaaaaaaaaagtttaaaaaataaggaaaacatgaaagaaaaaaactccaggcaactctaaaataataagaatgtacacagaactatatttaaatatatatattttaaacgtgggcatgtgtatatttgtgagaaagagacagaagtgtggcctcagagcttccagttgtgaaaggtcaaagaacacaggcaagaggagcaagagaaaagacggctgattacgtctcccagaaatttccactaggtggtactgttgtggtccttattttattaatataatttttattaaaactctgctggtttgggccgggagcggtggctcacgcctgtaatcccagcactttgggaggctgaggcaggcggatcacaaggtcaggagatcgagaccatcctggctaacacagtgaaaccccatctctactaaaaatacaaaaaattagccgggcgtgctggcgggtgcctgtagtcccagctactcgggaggctgaggcaggaggatggcatgaacctgggaggcggagcttgcagtgagccgagattgcgccactgcactccgtcatgggcgacacagcgagactctgtctcaaaaaacaaaacaaaaccctgctggtttgacacagttgaactcccattccataaaaccctacttctgtatcttccaagattccacatcctctcttaatttgaacctatgtcatgagaggtttcctcctaaaatgtcattgctttctagggttccttccttaacccactgctttcatcagtggtgctcaaacattaatgtgtgtcataatcatccaggggacatgtgaaaaatacagaaacttaggcccctattctatttaaatgaaccatctgggcctttgaacttgtaaccgaaggcaggtctggccgcttgctgcttgcagaatccaataacaagagcgagctatgatagaaagaaagtgacattattctttaccaaaacttgcagtggggaagtggctggattcacatccaaggtaaccacttcaaattttaggctgaggagaagggcttaaaaaagggaacttggaatgggaggcatgtgagaggggtactgagtacaaggtctacrtgtcttgttccagtggctatcttgagctgtggtccacttagagtgtgggctggcatcatctcaacaatggccaggttattttctaactgccttgaatttctggaattttgcagctgggtccctatgcttggtctgtttcaagattagcccctggaatttctaagtaatcacataattagataccagcatatagttagataaaaatgtgcatggtgtaaggaagtgtatggtaagaaagggagggacgtggtgtttcaaagaaagtaaatttcaaggctgtactttaagactaaggagaagaaaacaatgatatatgcagtaagcttcaaggttatatcttgagactagggaaaaaacagaaaaaagaaaaaaggttttaaaatgcattttcaggctaggctgtttggttacaaattctctgttggctcattgtgatcccatctggtcttacatctttatccacccatatcactacctctgccctgcactttcccctgggcttcagatgacatgtccaactagatgtatttccatgcagacaccaaaaactcattattgcttgtccgcctctccctctgaaacctaaccacctactcagttaccccaggcaaaacccagtataattttagccttcctcctctgattcaccaaataattagagttacaattctcataatggttcacatttattgagtgtgatgtagaacaagtgtactctcatatgctgctactaaacaggaaattggtacaagcacactgaaaaactgcattttacacggagacttcagagacatattgttaaatgcagcgtaaggaccttgtttaggtcatgattagaataaaccacctgtaaaaagacatttttgagacaatcagggaaaatggattatggctgggtattaaaggatattaagaattgttattagctgggcatggtggctcatgcctgtaatcccagcactttgggaggctgaggcagaggatctcttgagcccaggagttcaagaccagcctgggcaacatagcaaggccccatctctaaaacattaaaaaagaaaaaattattaatagtaataaagttgtgttatctttttgcttataccacctggtctggtggcagttattgactgaggcgaaatgtatgatatccaatgactcagcaaattcactcttaagtatgtttaagaaagataagagcttatgttcaccagacgtgtgaaaatgtttattgcagttattcataaataatcttcaaggttattcataagagccaaaaagtaaaaaaaaaactaaatgtccatcacagtagatttttttgggtaaaaaaatgtggtttatttaacaatgaaccattaaacaatgataaaaatgaatgaactatagttatatccaatagatgaatctcaaagatattatgttagattaaagaaatgagctgcatggttctattacaatatgattccatttatataaagtttaaaaacaggtaaagctaaggtgatggaggtcagaatagtgattattttggggaggctatcaactaggaaggggtataacagagaggtttttggggtgctggggacattctatatcttgatcaggttgaagttacatatataaatattcatcaagttttacacttaagatttgtactctttactgaacttaaattataccttatctgggcacagtggcacatgcctatatacccagctattkgagaggctgattggggagaatcacttgagctcagaagtgcaaatccagcctgggcaacatggagagacccctactctaaagaaaaaaaaaactaaataaaaatgaaacaatcaattaattagaaatgtagcgaatgtttacaataagttagatatgaaaataaatgattttcacatgttgtttaatcctctcaacagcctacaaagtaggtattaatattgtacccattttataggtgagaaaattgaaggcacagagaatctaggtaacttgccccaaatcacagttaataaatggaggcttggaaacattagtttggcttaacatatttcaacttcttcactatgagacacagaactacgtatctgaggcagtgacagagtgcttatgtgtgtatactgaggccaaactatcatggtttgaattctggctctgccacataagagctgtgcatgactttgagcacgttatttaatctttctgtgttcagtttcctcatctgtaaaatgggactcgtgtcatcttatatggttctttggcccttatttcagaatttgatgatttttcctcttacagttactgttgctcttctctctctctcttcctgaagggactgaggtcagaaagcttgtgtccacggtgtgagagcatagaaaggcgtattgggacttggaataccacttagtatattgttctggaaagccagtttgacatggtggaaataatctagggtttaaatcttaactctgatacctattatatgctgtggccttactgaaactctttgagtcttggttttctcttactcatgattcattctgcgttgagtgcttgtattatctgtcccactctcccttatagtaagggagtataatcatatatgtccaactctttattcatcaaaaaatgattattgatcatgaactgtgttataaacactattctagaaactcrggatacagtcatggacaagatagaaaagcctctttcttgaggagtttacactctgcagaaagcctgagggttgctcttgaagacctggatcatggtcccatttgtctggacttgtgttgctgaagtcccaactgaacagcaagtccaactagtcatcctggaagtcctcagctcatgatgagctagctattttagcactctgatcttctaagaaccaaccctgaactgccaccaggctttgcttatactatctagtctggtagtaaaaagtgtacagatgcccaaacccactgaggtttataaccattttcaaaggttttaataaaaagattgaatactggattaactccagagcctattcaggctcaattcctaagctattaataatcgctaatatctagtgagtgtaataattactaatatctagtgagtgtttagtatgtgctagacattgtactgatttacatgtactaacatctaatcctcacaacaatccggggaataaatactattattatcctagttttagaaataaatgtgacacttacaggttaagtaatgcaccaaaggtcacagagtggtcctttggcctttgaaacaaagcatcctgatgccaggctgtgctccttaccactatgtcatactgttgtaaaggagatgggactaagaagctctaagtccccagtttgttttgtaattctgtgacagtgatcacaaacgttttgacagtccagcaaaatcctggccagagttctcttttgtggacccagaaagccacaggcactaacactttagagctatctctcttagcccatatgccctgcgcttttggcattttctttatcatttagaggggaaggagggcaagggtctgaggagccttgaatggtgacttggactccaggggtagtggcaaaccattggaggttacagtgcatggaattaaagacagcttgaatggtataatctgactggctcattttacagaagacaaaagctgctcagagacacaagggtcttcctcaatggcccgtgagtggcagagcttgtgaaaggaagttgattcactgcgagtgaaccagaactcagaaagaccagtaagcawccaggaaacaccrgccaccatctaggcctgtggtgatggcggttttatcacgaattccttcctgacaatcaactgctcccgggcagaagcgatcgctttcttgacccacccaaatggacaatgacccaggcgtgaggttcctgaggagagaaaaaagtgtgtacaaggaaaggaagaggatgtctcccaatcggaaacaccgagatgcggaaaagttgcaccgtagaaagagcagccgtgctcatgacgcacttctggcctccaarcgccccacaagcgtgacgcacttccggcctcctaaccgttctcgctagcggtgcgcttctggcctgttttgagtccgcgctcaaaggtgccaaagtgcaaggacccacagttgggcggagcttgggttgggagtgagacagcatagcagtccaggctggtcctttgagcgcagctcaaagaaggggacggggagggcgtcactatacaaytgtggccgggtgggacctgggctgtttgctcttggaggctgtacagctgcaagctttgccgctcacgaactggagctggagaaagagccccccaaggatgggaggatgacagaagtgtctgcagatggcactgcctgggcaccaggagaggcaaggactccagctgattcctacctcctagggaagccatccccactcttagttggggccggcttaagtctttaaccaaggctcttgcagttgcagtgtctgtttcttttgaagaggcagatttggagacctgtgtccaaacaaatgccattgtcccatagtgtttttatgtttttgttagtttgttttggtttttttgagacgaagtctcgctcttgtcacccaggctggagtgcaatggcaccatctctactcactgcaacctccgcctcccgagttcaagtgattctcctgcctcagcctcccgagtagctgggattacaggtgcctgccaccacacccggctaatttttgtatttttagtagagacggggtttcaccatgttggtcagacgggtctcaaactcctgacctcaggcgatccgcctgtctcggcctcccaaagtgctgggattacaggcgtgagccactgtgaccagtctgaactcacttttaattttaggagcttgttttgtagattctttgggacttcttatacagataatcatgttgcctgcagatagtaacagttttgttctgagtttcgaatctgtgtgtctttcatttcatttctttttctttttcttttttttttttttttgagatagtctcgttctgtcacccaggctggagtgcagtggcatattctcagcttactgcatcctccacctcccgggttcaagcaattctcatgtctcagcctcctgagtagctgggattacaggcacacaccaccacacctggctcatttttatatttttagtagagatgcgatttctccatgttggccaggctggtcttgaactcctggcctcaagcaatccatccaccttkgcctcccaaagtgctgggattacaggtgtgagccactgtgtctgacctatgtgccttttatttctttttctggccttgctcttgctaagactcccaatatgatgttaaatagtagtggtaagagcagacatacctgccatgttcccaatcttggagggaaagacattctgtctttcatcattaagtatgtttgcagctgcaaggagagaataatattgaattatatgtcagtatagatactgcagcacaatatttagcttaactacatatttttttgcagccaaggcaaaaatgactttgtgcatgaaacttaagttccaccacagcctcagcctatttgtggctgggattttcagacatatgggagagaagttagtattttcaagtcaggattaagtaacagtaaatatgccatgatcatacaccatactctgggtatcatgatctgatattacttatagcttcagttaaagatactgtaggagttagagggagagctggatagttaggctgtgaggtgaccagaaagaaaggtggttcccattggaatctaaggaatggtcaaagcttgaaagtaattatgtttgatggtagagattgtgacagacatgagtatgagtattgtattagtccgttgtcacagtgctatacagatatacctgagactgggtaatttatggagaaaagaggtttaattggctaacagttccacaggctgtacaggaggcatggctggggaggcctcaggatacttacaatcatggtggaaagcaaaggggaagcaggcacaatcttcacatggccagcaggagagagacagcaaaggaggaagcgcaacacacttcgaaacaaccagatcacatgagaactcactatcacgagaacagcaagggggaaatccgcccccatgatccaatcaccttccaccatgttcctcccccaacactgaagatcataattcaacatgagatttgcctggggacacagagccaaaacatatcaagtatacatttccttagaggtgatacattggctgggaagacaggtcagtgtgaattagctattattattaatgatcttgaaaactctctgggagactttccagacaaatgagagtggaaattttcttcctttccactccctgcaaaacaaaaataagttattcccaactctttttgtttttaattttagtgttcccatcttctggccawgaatatactcaactcttcaccaagtaaacatacgggttcccatgtttctaaaaaccgataaaattaacaatagagacttgtttttgttttatatccagacttaatggtcatttatgtaatgtaaatatccagaataggcaaatctataaagaaagtggttgtctagaattgggggaagaagagaggtatgtacatgtgtgtctattaattttctattgctgctgtaacaaattgccatgagtagtggcgtaaaacaacactaatttatcttagagttttggaggtcagaaatccaaaatgggtcccactggtataaattcaggatttagactaaggagagaatctgtttccttgcctttttcatcttctggaggccacccactttccttgacccttggccccttcctccatcttcaaagccagtgaggttgggccaagtccttcttgtgctgtcatttttgtgattctctttcaattccctctttcacgttcaagaactcttatgattacactgggcccacctgaataatccaagataatcatctttttttttttgacagggtctcgctttgttgcccaggctggagtgcagtggctcaatcaaggctcactgcagccttgacctcccaggctcaagtgatcctcccaactcagctagtagctgggactacaggcgtgtgcccacacctggccaatttttgttcctttttggaatttttttttttttttttcggtagagacagggttttgtcatgttgcccaggctggtttgaactcccaggctcaagtgatctgcccacctgggcctcccacagtgctgggattacagatgtgagccactgtgcctagccccaagataatcttaaagttggctgactagcaatcttaattccacctgcaacctcaatttccctttgtcatgtaacttaatgtactcacaggttctagagattaggacatatacatctttgaggggaacaaaacaccattctgcttaccagagggaaaatggagagtgactgctgatggttatgaggttcctttggggagatgaaaatgtcctgaaactgattgtggtgatgtttgcgcaagtctctgaacacactaaaacctatttaattttatactctgcattgatgaattgtatggtgtgtgaattaaatgttaataaggcaggtgtgtgtgtgtgtgttcagtatttttraaactaaattctttcaccttcttgcctgaaaccagctcctcttcttcaattcctgatctcagctaatggcaccttcatctatcaggtcatccaaaattcatggctattatagattgctctggctgccttgtattcagtcattaaaaaaaaaaatgtccaccgttttcacttcctaaatagttacttaatatatccctccttagacctggtctttctttctttttgtttttttttgtttttttggttttttttttttttgagatggagttttgcttttgtcgcccaggctggagtgcaatggcacaatctcggctcactgcaacctccrcctctcgggttcaagcaattctcctgcctcagcctcccgagtagctgggattacaggtgcccgccattacgcctggctaatttttgtatttttagtagagacgaggtttcaccacgttgaccaggctggtctcgaactcctgacctcaggtgatctgcccgccttggcctccgaaagtgctgggattacaggcgtgagccaccgcgcctggcctgctgacctggtctttcttaacgtgtctgggtctttacctctaaggaggacagcttttttgtgcaaagaccctttggcagtctggtgacaccttcaaaaccaatgaacatacaattaaacagttttttagaatttgtgatacagaaatataagtgcagctttaccaacgtgatgaaatgtaatgacaagacttgaggtgggcccgataacaacaaggacaatttcaaattagtgacgagaatagccatattctgagatctgcatcaactgtaatgtgatatgaaaatatctgtgatttctatcggtgacagtcacagatacggctgatactacagtagtttgttgccaacatagaagaaaatgctaaatttcggttagagattagcgaaaacaatgatatactttctttcctattcaaggtctctgaggatccccgggtggaaactcctcccgggagtaaaaccacacaaccactgagaagaccgctccggcatcctagagagtacgcgtgtgagcctgggtgcaaggccaaagtagtgacgcacttccgttcacgcaccgctttctgtttttcctgaggtgagtgttggggtttgtcgcctaggagtccttgctaggctcaggcactgcacctctagagaaggctgtcggcttcgtccctgctgcctcagtggagggagacagggcggcccctccgggaccggggagcggaggctgctcgcgggccggtcccggtctccctctggtgccttcgctcccccacgcctgcatcggcgccttgggaaatggaggctgtggatatgggcggctggatggaagggacgcctctgttctcgacgccgcccaaaccccatctgctcattgggccacagctgcttactgagcagctatgtgccagttcctgctctagattccggggatgcagcggtgaatgaggcggggcgtgggccccgcccccaggaagctttccgcccaatgggaaagtcatgtattaatcaaatctggttatttcactccacctgcccgtgacttagtgcacgtagatcgaagaccaagttcttgacgtgcacaaagtgtggctttgtcccttgtgacttcttcagcatcatctaacagcacactctcctttgactgctactacagtgttcttgatccttcactactagaacatggcttttgcgtatgctgttacttttgtaaagatttccttcataccttagttaatttattttcttaagcttcccatccacgttagtttcccctggcagtgatttaaattgtggacttaaaagttatttgagagaatcttgattaatgtgtctttcctttagactaagctctgcgagggacaggatcatgccccttctctctctacttcatctgttgtgtgtcacacgtggccttgcatgaaatatgtatgagataaatatttgttgaatgaagaaagcacaaatcaatatataatttcaaactggattaagtggtatataggaaaaggagtacggtgcgagtggagtgtttaacagagacacctgacctggtctgtagagcgatcatgatctgaaggtgaagggtggatagattactggagagaatggcggctagattactggagagaatggcaggcagagaatctcagttgtaatggttctgagattggagaagagtagttcatacagaagaaacagcaggtatgaaggtcctgagttagcacagaggaaactgaaagaaggccattgtagctaaactaagagaaaagagggtggcggcacaagatgaggctcgcagaaaacagcatcatgcattaagtccctgtagggaagatgctggctttttatagaatattgctgtttaactagaatacaaagtgtctgtaagagatgatatagttaaaacaataacccagatgttttagtgtgttgagttggcccttcagggtcctttggtaatcagtttctggttttcatggcccttgagtggggcaatgaacaaaaaagatgcctgctccaggtccaagtaaaggaagacttgctctgagatttttttcctgagttttcttggccattcttgtctattattttatgttaaccttaaaatcattttgccagttctaaaagcattcctgttaggattactattggaaagaatttagtgtagttattaaaagcaggaggcggtgcctcacgcctgtaatcccatcactttgggaggccgaggtgggtggatcgctagaggccagtagtttgaggactagtctgggcaatatgatgaaaccctgtctctactaaaattacaaaaatgagccaggtgtggtggcacatgcctgtaatcccagttacttgagaggctgaggcaggagaattgcttgaacctgggaggccgtggttacagtcagctgagatcacgccattgcactccagcccaggtgacagtgagattcttgtctcaacaaacaaacaaacagacaaaaacatgacctttgaagcctggcagatctagtgtgggatccgagttcatccattcaccagctgagtgatcttggtagaagaaattattctcttagccttgtcttctcatttgggaaaaattaaaggttcaaaagattgttgtgaggactaaataagagaatatgtatttttcatccaaaagcatgatacttgctatttttaaccttttatattctcagtcaaatttatttttaaaaataaaggtctgagattcttcttgttaggtttcgctctgagtttattggtgtcttttgcttgttttgctcttcatttagcttggtgttggtgaggacaggctctggtgtcctaggacaagttacttattctttcaaaatctgtttcctcagaattacaaacctcatggtatgatgtggattaaaaagtacatatttatgcaccactaacccagtgagcatttagtaagtgaatgctgcttgctattggcaaatttattgctctaaagagagcattttactgggctgagctcactgttggttctctctgtttcttccctcagcctttgcctgctaagagggagaccaggtcatggcagccatgcctctgaaagctcaataccaggtgagctgtggatccctgaggtcagctctatggaggtctgagttgaaggaaatgaggtggataaaggtgattctggcaagtcttagagccaaagcagtaggaaaacccctgctgattccctccagtaggactgggtgctggggaaagagctaggggcagtgaagatggaaacaggagagagtgatctggaaagctgaagtacagcctcctgaatactgagaatctctcctgggccagaggatccccaggttcagtagctgtccctctgcagagggaattgtgagaacgagggactcaggctggtgatgtagggatccaggataggatggaagtgactaagatcagcaagggcacaaggtttttgggaagtagcagcagagggacagcaggaagaagacaagaaagagggggcctatctaatttgtcctccaaaagaaaggaggaagtttgggcttcagaatcaggaaacatatgtccttgaggtcagtactgctggcgaagtgaggcaatgggctgtgataggaaaagtctacactcccaacaggacacctgaagttagggatctgttaggcctcagtggcatcatagccttgagccagtcacataattgctttgcatcttaactggattcatttgtaaggtgaacataagtaccttacatttttgggacagagaattgatttcttgaattacatttcactttttgagacggagttgctgctttgtcatttcttttctcctggcacttatttatccagtaacttagtatccatgaaccatatcccaaatcataatctcatatttctcacatccttcagttttctctacctgactgtgtcactgatatatcagcttccttggagctcccaccctcttctggtttttccacaagtgtctgacatcacactatattgcagtcctgatcactcagtttctaaattgctgtgtaattgttgactatgttctcccctgataccatttccagagagacacaaagtcttgttgtttttccttctctctctgccacttgtgccatctttcagattacatttagagtttgttgttccttctctggaattttgtttgcagcgcttcccggatagattctctgtgtatagttgtgcacctttccatcactttgtcacctaatacagctcagtttcctgagtttggattttatcctccaatccagggttctcagacttcagtgtacatcagaattacctggagggctcactgaagtatggacttctctcagagtggggcccaagaatttgcctaacaaattcccaagtgttgcatccgctactggtggtggtctggagaccacactctgaataccactgytctagttagtggtgattcattcaagaggttcattcaggagttgatgaagtcaggttgtcagctgggcagaggatagattcagtgtgggacaagactggaagtagagctaaagtgtccccagctgttgacctagtttactgattgtaccacagtgaagaagagtcagattccagaaataacgtaggtaataaaattggcaggacttgagtattaactgtcagcaatgagtgatgatgggggttagaatgtctaggattaatctgaagttctagcattagagactgggttgaaattggtgttatcaacagagagggaaaaatattgtcacactgccacttagtttatataaattagaaaggaagccattttggggaagatgagtttggggttgcttggtgagtcagtgtgttgggtcatccagagagtctgaggcagtgctgggatgagggggatgtggatatgtgcaaaatcagttgaggcattggaaggtcggagtgtattccctgagcactccggtaacgaagttcaataccaacatctgaggagtgaatagaggctctaaaccagatgccagaactttgtggaaaggtagagttgaggccagcagggagggagaagggtgtctgttgaaaaagcatgaggggctgggcatggtggctcattcccgtaatcccagcactttgggaggccgaggcagacggatctcttgagtccaggagtttgagaccagcctggggaacgtggcaaaaccttgtctctacagaaaatacaaagattagcctggcatggtggtgtgcacctatagtcccagctactcaagagtctgaggcgggaggatcacctgagctgggaggtcgaggctgcagtgagctgagattgtgccactgcactccaacctgggtgacagagcaagacactgtcaaaaacagaaaaaaaagagaaaaagaaccaaaaccgaaagaaagaaagaaaaaaaaacccaagaagcatgaggcttggttggcagaagctattacagattgtcttggagctataaagataaggagctaaaagagctacccagcagcagcaatttaattctagaagcatggttttctaggaaaagccatcaaggagcagagtggattgtgccaggagactctgagctccctctacaggatgctcttgagcacaggcagcccagtcctttatacaagaatcgaatgggagtcggatgagataggcccatcagtgcaaaccatgactctgtgcttgtttcatgggcataaggtttggggcagggtgaacacatgtggggaacagatagattggctgagaatagggagtacctaataggaataggtgggtcctgagataccatttgaagcaaattgtccacctgtaggtacaaaagtaaaagactgaaaatatttactaaatcaaagagatttttgccctaggaaggttaactaataagagactttttttcctagggtttaaaaaatgttaaatcacattttatgacagtcaattttatatcctaatggaatctcttctggtagtgagagaagttccagatttttcgttgtaaaaatagtcatataatggtctaatatccagttctktcacattttctcattacctatccctcacaggactttccctcaagtccctacctgtcccctctgccccacactctggcccggagccagaggattggctctggggcagcaggaacctgttgttttaggagatggtgaccttcgaggatgtggctgtgcacttcaccaagacagaatggactggcctttctcctgcccagagggccctgtacagaagtgtgatgttggagaattttgggaacctgactgctttgggtaaggccattttcctcctaggactcagatctgtacttttccagtttccttccttcttttacagcctggggggaggagtgtggagtggagaggagaggttgtctcttgtgtcctccactgagtgactgcagagctgaggctcagtgaccaacttcaaagattgctgggtagggagaggtcttgggtcactttggtctcccaatgaagggaattactgtcccctggtaagagtatgttccatcttccaagaggctctgcacagtaaggaataagtagtagttgttgtctggggaagggcatgtccccttccctgtgtttgctcatgccttgtggatctcactgacttacttatccttgagtgttttttttaggaagaagtcacaaatgctcagtttcctgttgatcggaatctctttggccttctccagtcgagaaccctcttctgtgggtcttattcttactgagactcctggggttttccttcttttgacacagcagatacagggctgaaaagtaccattttcttcctgttttcagggtacccagttcccaaacctgcactgatctcacttttggagagaggggacatggcttggggcctggaagcacaggatgatcccccagcagagaggaccaaaaacgtctgtaaaggtaggtgaggcagatttagaaccaacaattgtagcgttttatggagcactgtattttaaaatgaatcatgctgggcaggatttaaataaaatagatgatttcacctaataggtaaaatatgaaacgtttctcaccaatcttaactcttaccaacatgtaatcactcagtacgtctcatctgcaatccttgaatccattgttcctttctgagtttcaacattgcctaccttagttgtcctccttggttgggatggatttattcaggagcagtttttgagcaacttgccatgtgctgaacgttgtttaagaagttctggcaggtacaagttatggagacagatgtaaaaagcgaaaaagaaaagtattaagtgctgttgggagtgggacggagaatgtgaaggtaaaatgggccagatcttcccaaaagttggccataaatggggagagctgagtcagataacactaggaagtcatggcatgggaggagctttttgaattcataggaattcagagctgagcacagggcgtgaggtgcctttagaataggcaagtggatggctagagcaggccattgagaaggtgggtggagagtctgagataaaaggcaggtctgaaacagtactctaacacagctgggttgaaacgatccccaggaagaaaaaatgaaggctgaatcttaaccattaagggatatttaatttcagtgagagaaggaagagaaagtagacagtcaaatagatgggggccaccaagagcaaacagtgaaattgaaggcagaggcaggagtttcagtgcaggtggtttgcagagagcaaatacgtggaaaataatgaagctagcacagcacttcagcctcttattctaagaatctgaaaaagaatcatcaagacaattgagaacctgttggtttgttctcacacgcttcctctgtctggtgattattctttttcagactcttggttaccttgtttacttcaatctcagattactctcctctgaacattctccttcggagttcccttactcctttaactcacactcataggatgaacttgattaaccatcacatgagtcccaggtaacccacattaatgttaaaaccaagcccatcatttcatataaaatggattgactttaactcatttaaaatgtcatccaatcttttggaacacaaatgccattttatgggctgtttgtctcctttttgctgataggagaaagaatactctcagtctgggtgtgtctaagtaaactgttcatcccttttcaaatagagagtctaggacagtagtttctctgcatgtttgaggttcagcagttttagggcgtttcctcatcgtctatagtccatgtgtggttctgcagttaagaacctctgaactaggtaatcttacaacatattgggaataatactctctaagcacttctgtgattttctttctctctgtcttgccacaacccagtgtctgtaatgttcagtgtcttaagtcttttgggacatctgcagggtatgagtttttaaaaagaacaacaattcatcctttgcctttgctttctgatactgttctgtttcactttctgattctaagtcttgccagccccgatgtcactacttgttcttaagacctgtgccttctttggcattttgtaggctgtaagtagcatcaattcaaaagatactagctcatgccagggatgaccagacatcattcaaatattagagtagaaaagcttaggaagcagtctcgtgtgttgtgtccactgataccctgttccacctcaatgttctctgcctgtgtgatatttggcactttcactttaacagccttttcttcccagcatgctgatgtgaaagttgaaatgatctcttttaaagccttatcattttcaatgctctattatttctagtatagttctcaggtggcattatttgtgttttctatctcttatgtcagatgttgagaccaacattgacagtgagtccacattaatccagggaatttctgaagaaagagatgggatgatgtcacatggtcagctgaagagtgtccctcagagaactgacttcccagaaacacgtaatgtggaaaagcaccaggacatccccacagtgaaaaatatccaaggaaaggttccaagaatcccctgtgcaaggaaacctttcatatgtgaggagtgtgggaaatccttcagctacttttcttactatgctagacaccagagaatccacactggggagaaaccttttgagtgtagtgagtgtggaaaagcctttaatggtaattcttcgttaattcggcaccagaggattcacactggagagagaccctatcastgtgaggagtgtgggcgagcctttaatgataatgcaaatctgatcaggcatcagagaatccacagtggggacagaccctattactgtacagagtgtgggaatagtttcacsagtagttccgagtttgttatacatcagagaatccacactggggagaaaccstatgagtgtaatgagtgtggcaaagcttttgttggtaattcacccytacttcggcatcagaaaatccacactggagagaaaccctatgagtgtaatgagtgtggcaaaagctttggaaggacttcccatctaagccaacatcagcgtattcacacaggggaaaagccttattcttgtaaagtatgtggacaagccttcaattttcatacaaaactaactcggcaccagagaattcacagtgaggagaaaccctttgactgtgtagattgtggaaaagccttcagtgctcaggaacaattaaaaaggcatctgagaattcatactcaggagtcttcctatgtatgtgatgagtgtggaaaagccttgactagcaaaagaaatcttcatcagcatcaaagaatccatactggagagaaaccctatgagtgtagcaagtatgagaaggcctttgggacttcttcccagctaggtcaccttgagcatgtctactctggagagaagcctgtgctggacatttgtcgttttggcctcccagaattttttacccccttttactggtaatagtacactccagtgaaatgtactgagtggattccgtcttctactcaggaatggaatgtgtgacacaggcctgactcagcctctgatccatccctcaagccacagttaatgattcagatgtcagtagatgaccaaagatggttcaattagagtcccaggattgcaagagctaataggaacaaatactctccccccgcccacccccattggttttaatgctgagaagaagaactagactcttacagaggtgagaatgaagtccacacagcaaaaatgcatctgagaattggagagcagtaaaagactgaagataatgtttgaacagccacatacaccatgcctgaagctaaaaatatatacgggtttttgaattgcagcagccaataaattccatttttgtttggttggttttggctttggcacacctgarttaggttttcttgccttggaacagaattttgacttaaacagtgttgtcattgtagcagttgtttgaagttttcagggataacatacctgatggagaaatgttttgtgtgtatgatatatgggaaagtctttagttatagtcatggcagctcctcaaccccatgattgtgatgagattgggaagcccactgtaacactggagagcccaggttatatcagacaccactagtagatagaagttctaacaacttgagctctgtaacaaaaatctcattgtactacaaaattatgtctgcaccagtgaatccattctcaagaaaagtcttaactaggaaactaaaagctttcactcttaaagctttcattttctgtttattcagttttttatttggaatggatgctactctaggccttwaactgagaaatgccaggctattgtagctattatatcttggtatttgccattttaattcctaggacagcacgcccgctttgcccttgacctggctagggagccaaggaaatgccatggttcttggtcataagacacactgcagagatctctcagtaggaaaacagggctggcccttttctttggtgatgaacacaaactgcaccctktttttctcccacgtgtccttccgctgccagccagtgttggaatctccctacccaattccagacttaattgcttactgcgtctagcacctgggtggcttcaccacctcttccttacttgtcagcagatgaatgagcagttgtatcatgtgcttgggttgaccaatgaatgatagacttggggaattgagtaaacaccttttaattgaagtataacacaaacataaaaatgcatgagtcagccaggcgcggtggctcacacttgtaatcccagtactttgggaggccgaggtgggcgattcatcaggtcaagagatcgagaccatcctggccaacatggtgaaaccccgtctctactaaaaatacaagaattagctgggcgtggtggtgcatgcctgtagtcccagctgctcaggaagctggggcaggcgaattgcttgaacccgggaggcggaggttgtagtgagccgagattacaccactgcactccagcctggtgacagagtgagattcctcaataaaataaaataaaaccatgaatcatggttgtacaacttgaatttttacaaagaacatagccttataatcaccaagataaataaatagaacataggaccttacaagtctcctgtaccttgttagagtccttatggaacctctaccctgacttctatcaccagaaattattttgcctgtttttgttcttttgtgtcaatggaatcatcagtacagattcattctcattgctatgtcgtattccattacatgaatataccacaatttattgcttactgtcggtgggcatttgggttatttccagggggatctttttgaaggcagaaaacctaaaagccactcagaaaaaaaaactggttaaagtaaccatggtcagggactgcttcaaatgctgctgcatcagcccagctgccctgtagtaaatgataacagcagtaatttttttttggcacttaacatgtgacagacactttcctagtcactacacagatttactcaatatgataactttatgaagagtgtgctayaattaactccatgttacagttgggaagacattaattaggttgcctaaggacacagtagtggagtaggtattcgaatacaggcagtctggtttcagaactcatgttctagctgttgcacagtatggccctatggaagttgtatgtaaagtatgtgacactgtatcttggtaacagaagagagattgttggaagaaacagatatggtccttaggggtggaggagaatattaggataaagtcaagatggggaggctttgcttggcttcacacaatgggaggtggagaattggcatcaaagaggaaaccataggttgagatagaatcataaaatatgtccagtacaaactgtcccaggagagttgtcatgagggaggtagcatgcctctagtagggagaggatccggttcttagcactgcctccctgtcttattggctgtgtacctctcaacagcgtctgaaaatgggtgtcttcatatcatgtacctgaagcagagagctggcccgactgaggtccaagtaaggccccccaacttcagccttgaggtgtagggatagctgagygaggtttgtttccttttctctgttcttcactactgagtagttagctcccttggcccctgaccccagtgccactgtcaggaagccccctccaattgagtaactgtctttgaatcagttatgattaatgtactcgttttctttggcttcttaacagaaatctgttctcacagttctagaggctagaagtctgaaaacaatttccctgggcagaaacagtttgtcagcaaagccatactccctcagaaggctctagggcagaatctggtctttctttaagctgctggtggctgccggcattccttagtggcaacatcactgcaatctctgctgtcttcacatcaccttctctgtgtccaatctccctggcctctctctcataagggcatttgtgatggcatttaggactcacccaaatagtccaggataattatttatcttaggacccttaatttagtgacaactgcaagaactttgccatttagggcaacattcatgcgttccaggaatcaggacctggtatctttggatgggtattattcagcccaccaccgtcactgaggttcatctgtatatatcagaaaacccctaaacaagacaccctaatacaagatagaatttttcttaggagtctggagatagcccagggcagctaaggcagttctacaatgttagtggggaccaaatctccttccaaagtaccacttggccatcctcaacggggccattatcctcatggtccaaggtggctgctagaactccaaccatcaagagcttgttccagacagtagaggaaggggaagaagagcatggcactttgccttaaggaagactttctgtaagtaccatagaacatttccagttaaatgtttatttcaagaacttagtcacctgactatacctggctcccgaggacactatatccttcasctgagtggcagtgtactacatcaaataacttcgagattttgtttaggaggaggaaggagaacaagtgtttgagtggatagctagcagcctctgccatggcgcatgactgccattgtattctacatgtctaaaagctttggataaggaaaaaaaaattggtatttgaatttcaatgtgcataacaactctaggrtagttgctatatttatccccagtttacaggctgggtatagtgaaatctagtagattgatgggagaatagagcagatacctctgagatgcacgcacatcactttggcacacctcttgctttcgctgtagctgcggtgaacagttgtatgtgaacttagagctccctttgcactgctcaaacactccacatgccttctgacattctgcttcaggcacttttccagagctcactcaactaggaagcacagcctgcgaatacacagggcaagttagcaatcccagaaaaacccttaatgatgctggacaagagtttgaggataaaggttccagtttcccatctttcaagtggacaattagaggaggaattctttactctttcctggaggtcccagtgctcatagcatcaacctttagaacacttcatattgtcatttcctcctatcctgtctcactccttgggttcttttagtactgcttcctgggatcatctcctgaataaatgtgcgttcgagtccttgtctcaagccctgccttcagggaaacccaaactaatgagagggagacagaactttcaggcaatgagaatgtgtcttatattctagtagtgaatattagtagtctactcaactgaaatcctttagatgttagaggatggcccagatgagcatttttgtgatgaaatcccattctgttttcagtggtggctgcacatttcttatttctacttcaaagaagcttcctctcagagcaactatgctgtggggcacaacgttttcgtgtgtcactgaagtgcctaattttagatagactaagttgtttatataactgtagctatgtgtggccaggaggtaaaacatggtaaatatcacggttatcagcctgtaaggaggacctggcaatgcatgtccctcagattatcaactaaaacaagcacttggagccatgcaaataaaagaatccttagaagtatgccacatacaataaatgattttattaattactcaactttttttttgacacagggtcttgctctaccacccaggctggagtgcagtggcacgatcatggctcactgcagacttgccctcccaggctcaagtgatcctcgtacctcagcctcsctagtagttgggactacaggcatgcgccaccacacccagtttatatatatatataaattttttttttgagatggagtctcgctctgttgcccaggctggagtgcagtggcatgatctcggctcactgcaacctctgcctcgtgggttcaagcgactcttctgccttagcctcctgagtagctgggactacaggcaagcgccaccacgcctggctaatttttgtatttttagtagagatggggtttcaccatattggccaggctggtctcgaactcctgaccttgtgatctgcccacctcagcctctcaaagtactgggattacaggtgtgagccattgtgcccatcaatttatgtatattttgtagagacaaggtttcactatgttgcccaggctggtctagaactcctgaggccaagcaatcctcccaccttggtctcccaaagtgccggaatcacagacatgggtcactgtgcctggcaataaatatttatttagtgacttctgtgtgctaagcaacatgctagatgatagcacatgatgacagaacatgttactgatgagcaacatggagcttctctccagttcctggtgctactgccttgttctgagccaccaacatttctttcctagactaccacaattgctccttaagtagtctccccacttctgctcttgaatccttctaatctatctgccagtcagcagccaggtgtgcttttaaaaatatggaacataacatgcttttcttaaaacatttcaatgggtttccattgaccttggaataaaatccaaactctttaacatggcctgcaaagctctaatgacttcatggcgcagcacttcctccctcctctctccccatgatgtgtcaagctttttttttttttttttttccactgaagggcctacacatgctattcctcctgcctggaatgctgtctccttgattatgtgcccagatagttcattcttatctttcaggtctcagcccaagatcaagatcacttcctcaggcctttccttacctccaagttaaaatggtattcccttgatattatctcctaaacaccttgctctttacctccctcacacgaatgaaagtttacaataatatatttatccaggtgtggatttacttaaaagttgtgtcccccactacagtctatgttctacaaagactgtaacatgtaagctttgtttttcttcatctataaaatagatataatacctactggatcttcttcagtatggatgtgaagaaagcattacataataaacataaatgtgtctaatagttaatgaagtgcaattcagattaaagatgtctttgggccaggcatcatggcacatgtctataatcctagcactttgggagactaaaatggttggatcccttgaggccaggagttccaaaccagccaacgcagcatagcgagaccccatctctacaaaaaagagaaaagaaagaaaaatgttttcatggctcagaacacctgaatgcaaggtaactcaccaggaaaggagtgtaagttagttgaataaagcaattggaacacacgaagtttcaggttttattacatttttattatgttcaaatagtgttgaggtaatttattgttaacaacaagaacaatacatagcttccttgtcttttaaatctttcaaatacaaataattcatgttaacaaaaatttataygatgtaagaaagcttcccagaagagcctctcttagccatttgggcccacaataaattatcatccttggaatctctggattttgaggcagagtgatagagaagacaagtaggaactggggcactgggtgatacgtgtcaggttctgaccaaatgaattcaaagaaaggaatagggtgagattaagtatttggatatcaggcttaaaatatagccagagggaggctgggcatggtggctaatgcctgtaatctcagcactttgggaggccaaggcaggtggatcacctgaggtcaggagttcgagaccagcctggtcgatatggtgaaaccccatctctactaaatatacaaaaatcagccaggtgtagtggtgggcgcctgtaatcccagttactcgggaggctgaggccagagaatcgcttgaacccgggaggtggaggttgcagtgaactgagatcgtgccactgcactccagactgggtgacaagagtgagactcctcaaaaacacacacacatatatagtcagaggggaccaacacaccaggttggaggacaatggttctgaggccagccccagaaccttggagagcgccacagacacccccccccaccccccactgagtcggagctagcaccttggacagcaccacggcttctctgttttctactgctgtcctttgtacctggatgacactaaacacaggttgtagtggtcactgttaatttcttggggctttccactccggtgtacctggcaattgtaatcctctaaaatcagcagtcttttacaaggttctttatgacacggtgggggttgagattctttctcttccttctagaaacttcagcatcagagctgataattggaccgattcccttgggaggtctatgggattggtacctagtatcattgtgttatgccagaggccaacgtccttcaagttaggggaaaatgtgtaatacctggtcatactatgtaaggaagaatgctcagggctcttcctaggcacatataagcaaattatcaggcaatacatgtgagaaagaaggtatgttgtattcatttggagacaggctgcttgattctttttcatgccctctcctcacgtgctaacccccacctgttaacctattttcagaaacatacaatggattggatctgctttctctgtggtaaaaatcttccgaacttgattgttgttagcatgtttctgtgaggttatgcacaaaaaactttgaaggagtttggcactgtaggtctttctcctacttataatatgtcatatttacaaacttatgcattactaacttcattactgacaaataaaaaagtgtaatcaggtccacaaataatttagaggaggggaaaagttaacattaattgagcaactactgaatcctggtccctgttgtatgtactttaagcaaaacattatgtgtagtatttacaacaactgtgaactattatctcatttttcagatgaatcattggaatttcagaaaagctaagtggttgtccaaggtctcatagctagtaggtgaagaaatcaggacttctcagtcctgtacatttatttttaattttcttttctctgtgtttgtttttgaatagtttctgttgctatgtcttcaaattcactcatcttttttctgtaatgtctaatctgccgttaatcccatccaatgtatttttattgcacattataggtttttatctttagaagwttgatttgggtcttttttatatgtttcatttctccaccaaacttttagatgtatcagatatggttgtaataacttttaaatgtcattgcctactaattctgttgtgactatttcagaagtctatcaggattagtttttaatgtaatttcttggattatgaattactggtccaagtagatagtattaatttaaactctatacttaatgatgcaaactatgattataaatttttagaagacatttctactaccacttcaaagcttaggcaaggaccataagattctttgttatctctctttgttcatgagatttttaaaaaatttatcctttcatgattggatgagtgtatgtgtgtgagaaaagtctctgttcctattccttgttcctgtaatatgcctcctgcatattataattctgctttctcagatatcaagacttacaactcttcaccattcccacccctgttggccaaagcatcagctgaggtcctcagtccaaaccaatgcctctggttttagtttcttgtttggttttggtacgtgggtacactttcctgtgagttaagtatttaaaatgatgtcgaatattatatcttattctaaatttctagattctagtttatattatttgctacattgccctcaactgaattctgcgtaatatttattgtcttaaacttattgttgtgagatattaatatagctgtgccattttccctttcccttaatacttgtctgatatatctattttccattctttgactttcaatacttgtgctttcttaagtttcagtagtaccttataagcatctaacattttctttccttccttccttcctttctttctctttctttctctttctctctctctttctttctttctctctccttctctctctctttttttttttgacggagtctcattctgtcacccaggctggagtgcagtggcatgatcttggctcactacaacctccgcctctcgggttcaagcaattctcctgccccagcttccccagtagctgggattacaggtgtgcgccaccacgctgggctaatttttgtatttttagtaaagacaaggtttcaccatgttggccaggctggtcttgaactcctgagctcaggtgatctgtccacgttggcctctcaaagtgctgggattataggcatgaggcactgtccagtcacttctaacattttttctgcgtaaattttagaatcattttcacaagttttaaaacaaatcctataggggttttatttggtatgacgttggacttatggattaaataaagaaaactacccttcctactgaaggattacctgtgcctttccatttacacaaggggttttcattggtttagtccccaaatgtttaaaattttcttgatatatgtcttatacatttattagtaaacttattcctatatatgtttggttgctttgagaataagaccttgccctaccctagtacatttctccacatagattaaatgatttattcacagaactcacaacatcaataagtaggtaaaaattttgtagcctgaaaacagccttgaactcctggaatgaacatcaaccagacagttgttttgccacagttttcatgagaagaagcaggcaaagccatctttactctgtcctattaaaactggaaacaacaagaaatattttttcttttttgagacggagtttcgctcttgtcgcccaggctggagtgcaatggcgctatctcagcccaccacaacttccgcctcctgggttcaggcgattctctggcctcagcctcccgagtagctgggaatacaggcatgcgccaccacgcctggctaattttgtatttttagtagagacagagtttctccaygttagtcaggctggtctcgaactcccaacctcaggtaactccccccayctcagcctgccaaagtgctgggattccaggtgtgagccaccacgcctggccaacaaaaaagattttttttaacatgagaagattgtcagctttccctggtggtcagagaggaagggctttagagaggtcttggggctgcagggacaaagggtgcaggagaagaagccttagagctgagcaggaggaaactgacactacatggctgcaggcccagcatggaaatgaacttctagaatgctgtagtcgaagagccagcttaattttttaactcttgtgttgtgtgatttttccatccttcctcatttctaggggtattagttaggctatgggcttggaaattaatttgaagaacccaaataaatgtggtttaaatttgatgaaagtttatttctctctcatgtatcatcagaaagtaagccatctggggctgatatagcagctctgtgcctcctccttttagttgctctgtcatccccagcagccacacccttattcacatggtccaagatgctctgatgctctcccttgtcaacattccacctggtcgatgaaggtttgggggcagggagggcatgtcccttgtctttaaggacacagcatcacattttcttacagcctgtttgccagaagttggtcacatggacacactttgccttaaagaatgctgggaaatgtgtgctttttccctgagctgtcatgtcccttgctagagattctgtaaccttataagaatggaagaacaggggctgacagacaagaactgatctccatctctccagacctaccatagagcttttgaaacttggtttgtgcattattatctcatttttctgatatgtctgaagtaggagtaggagctttgtggttatttagagagctttattttctcaactgtaaaattaggcaatgggtttatkatgcaaacatttggggccagcatttatgtgatctgattccttcctatttctttcaacaagtcctcactcctgatttctgaccctagaaagaagtgaaaaccagaacttattgacaagagcaacgtaatccccagctattactctgcccaatcattttcttaatgaactcattttggaaaacagtgaagatcagggtcagggcaaggcagagaagggcacctggccatggtcactgtcaaggtccaaggcataagacatatcctacccttggggacacacaaagtaggcttctgcctaagagttagggctggagcctttggaccattgtcaacaacaaatgtttattgctctccttctttctgccagttattctctagctgaggatgatgatgttgaacaagatagatacagtgtctgttccctgcagccaccagagaagacagacatataaataaactatcaccattaagtaagtacacagtgctgtgatggcacataaatgagtgtcctgccttattctgggtgatgagggaaggcttgcttcccatgcaaaatgggatttgagctcacacttccagtaacagtcaagatggagggtaggaatgggaagggaagggcattctagatttagagaacagcatttttagcatgtagggctgaggtagagtcagggaatgaatgggagtgataagaagccacagaggcaagtgggagccaaataccagtctccagtgcagcagcgttggatggatcagagctggaaggaagaaaagcccacattaccagggttagggggtgtgtgagggggtggggattttaagggtcgtccaatccagtggcatttagtactgtctcccttcccccagggctcattttggaattttatggtaggtattttgttatatttggtgtcagtggtaacattgctactagcgttgtggataggagccaggatcctgcaatgtacaggacagtcctgcccactgaaaaaatgttcacactttcaaatgtcttgctgaacattcaggtaggtgaaaattctatttctaaattatctgaatctaaacctgttttctggataaacatgtatttttgcacagttttaacatacactgatcttccaggaatgtaattattgtataatcaagagacgattgtcctgtgtttcattcagaacttcacgaaaacatgtttgccattttggatcataattttgtgacttttgcaacaatgtaagtcacagctttgtggctgtggcactcagacaacgtctatgtgtaaaggcgaccaccttattaggtctcctgcagcagccaagaccaaacacattgaagtatgtgtttttaaacgacagatgacggtcctcttttttttctctttcattacacttaaggcataacattagtttttaatatgtaggtgtgtatgttatgtatgattttctaggccattatatatgaatatcaggtcaggagaataagatggacattacaaactatttgttagaaaaagggggcaytgggtgtgacagcgcgccatccactggtccatttccaagactcccacacgtggctgcacctgcagcttcacctccccgggctgggtccccgcttggctctgattcttacctgccccattccccaggggtaacagtcaccgtgggccagacccgagctagccgacagggatgcggccacagctggccgggcgtgaccaccaccgaggcgcagcgaccttgctcctagagaggcccggccgcctggtgacgcacttccggcagcgccggggagcagtccgctacggaggtgagtgcagggctccgggcgctgtgtgccgtsccctgtccsccaggctctgggtccggttgagacgcactcccaccctgggtgctgcagggtctcccgtggcctacgctgccaggaggcccaggctgggagagggagcagggcggcggcccggggtgctcttccgcgctcctcgactccagctttggtctttgtggctcaatagcttgcgcccattggaaggggaaacgcacgttgctgtcccagccacgaggccctgagcatttagcacttggtcgacgggggaagatgtgtcggtgcagctaaaagatggaatatttgcgggcgtgaagcggcccgaggtgataccacaagtcttttgacatgctgaggtctggcaggaacattaacctatgtgcatcccgagtatggaccgtgtgctcccaggctcctgacatagggtcatgaattagggccgagtgggagcgcagagcccctcccagtcacccggcagcagaagcagcccggcttttggaggacattgtctcctggagcagtgtcagtcccaaaaggtaactcagccctgcttctctcggctcagggttgacartgacctgggaatgacttctacaacgtaattacgaattcactcagttttagaatatatttagtagtctcagaatcgctaattcatacccccatgaaaagcaaatttactacctaaagtacagtacttggatacaggtctttttgtctttactcttatggtatttagtcaaaatactgttttccaaagttgcttaccccttttctttcctaccacttaagtgtggttatgttcactgtagtatagttaagcacattggctgttctttgtattacattttgggtcctcaatttcaccccatccttgctggtttatatatttatttaaaatatatatttatatgttacatatatagtagtaaacatccatgaacacaccacccaattaagaaagagaagattgccagtactgctgaatttatcaatgtgttcctcctcctcaacccaactcccagcctccaacccctagaggtaacagttatattgacttttgtgttaattgtagccctgttattttaaaaaataattacatatgcatgtatctgtaagcaatgtacttaaattttttttttgagcttcatataaatggcaccattgtgtgtataagtcatctgggactcgcataattcaatgttaagtttccaaattcattctgtgtgtagcttctgggtaatgttccattgtaaaaactgtatgaaaatttatcgatgtattttcaatggacatgtgggttgttttcagtgttttgttattaaaatgtgctgataatatttttgtacgtacttcctacatatgagagtttctctagtgtgtaagtttttaaaattaggcacaaatgttgaattatgttaaacatctttggcatctgttgagatggacagtgtgtttatctttctttgatttattaatgtgaaaaatatactaattagtatcttcgtgggataatcctacttactcatgatgtatttaatgaactattggagtctattccttgatagaatttttgcattagaattcataaatgagactggtctgtagtttttgcatcagtattgtgctggcaccataaaaagaattgggaaacttactttgctgtgctctgctacggtttacatagtgttagaattactcatttccgaaacattgaaagaatttgctcatgacacatctgagctcagtgttttgtgagagttagttcttcactggccatcttggtttaattaggtaaaagtaatcaaggattatgtagaaaatctatataatgtcataacaggaaaaaacctggaatcgtatttaaaaaaaaaaactatccccttgggagggagccaagagaccaaagaatgccttggacgagtccagcttggcaagtagatgagtttattaggacttacatacttactcctggatggcagcaggacagctttagagacctgtgatgcccctcgtctctaagtactttttagagaattttctggctgtttgcctactgcatttaaacgatgagacttttcttggtaggttctcatatactttctaggatgtttacgttcttgcaaacacctgctcctctgctgagccccatggtcttgactcactgcccggtcttcaaggttcaggcagcaggtatacacccttgactagctgagcggggtagctatcacactacatatgtaattggtagagttggtttattatctaaaaatggagttgtatattctcccatcacagaataagttttctctttaaacaccagataatatatttttttaaatggacatgagtcacaaaaaaaccctgaaaaatgtgtaaagtagaagttagtagattgggttatataaccatcatgcaataaagccagaacttataaacagaagaaattagcaacagtaaactatcctaagcaattactaggtcagagacaaaacagaattgctgactgactataaaacagtaattaaaacatgaaatataaaaacctctggaatgtggcaaatagtgtatcccaaggaaaatttgtggccttataggctttaattgccaaataggaagaatgaaaataaatgaataagtcatgcaacctcaagaaggtgggaaaaaagccttttgtagtctaagcttccccaaaagcagaacgtggaacaaagatttgtatgtaggaatttatttaggaatatggtcacaggggcagagtgaaagacaaggggagtgaaacagagatgggagaactggtacaaggatgcattggtatgctcggccctcaacaggctctgccttgcagggcgtttgaggagccttggagtcttaaggctgccccgctgggggatcgacggggaaaacatttatccattggtttctctcccctattggtcaagggggtcccacaggtgttaatgcctctgcacttcagggcccagcaggtgtccacaggtgtcccacataggacaccagagaagccccagggcaggaaccaggcataggtgatgtaggtccttgtgaaggttctggtagcttgcagcttcacaaagctgactaacctctgtagaactggactgaggatgggataagaggattggagtggtgcttacactgccccttacagagctgaaggaacaaactaagagcagaattagtgaatttaaaacaaatagaagaaagtagtgttgctcaactagaaaagctggttctttgaaaataaaaggaaaccacattaaaataagtaaaacactgctcagcctaactgtattagtctgcttgggctgccataacaaaataccatagactgggtggcttcaccaacatacttatttctcacagtcctggagactggaagtccaggatcaaggtgccagctgattttggctcctgccagggttgccttcctggcttatagatagtagccctctcgttgtgtcctcacatgggggaggcggggagtgagtggtttcgtgggctctgggtctctccttcttcttgtaaaggcatcacccctattggacctcatttaaccttaggacctttagtcccacccttaggacctcatttatccttgtaacctcctgacaggccccgtctccatatacagtcacattggaggctagagcttcaacatatgaatttggcaggggcataaatgtttagtctctaactctaaccctgggaaaaaggtctagaaagcacatatattcaaaagaagaagtgggaaaagcaaactagctctggatatggaggaaatggaaagaatcatgaaccagtattttctgcaactctgtactagtaaagttgaaatcctggaagaaatggatgatattttaggaaaatgtaatttcaagactgactttaggggcagtaaaagtcagaaaatcactagtccatatgtttttgaatacagtgaacaagaggctctgggtcacgggactggctgctacagtgatctcctctctcaggagctgacgcagaagtgtaggccttggctcattcactatcagaagactggaaagtttgggaaacagcctggttcctaacttccagctcagcttcctaaggacagcctgtgctgtccttaggaggactgacctctcaagacctctccagaggtgttaggattcttgaggacattcagagctctgaggaagtggggcaggatactggggggcagctgccttctccaggcgctgcctccctggggtctgactccccaggcttgtgtactggggctgcagcccagccagtccagcttctcctgctgtgatactgaagataatgcttgtgttgagaaagagaaataagtcaaagatcttggtattgtcctatttcttgaaatgaattgtggatacatgactctttgctttattttttaggctctgcatacattttattttatttttattttttatttttttgagatagcgtctcactctcatcacccaggctggagtgcagtggtgtgatactggctcactgcagccttgacctcccgggctcaagtgatcctcctacctcagactcccgaatagctgggaccacaggcatgtgtcaccacctctggctaatttttttttttttgagacggagtcttgctctgttgcccaggctggagtgcagtggygcaatcttggctcactgcaagctctgcctcccgggttcacaccattctcctgcctctgccacccgagtagctgggactacaggcgcccgccagcacgcccggctaatttttatatttttagtrgagacggggtttcaccgtgttagccaggatggtctygatctcctgaccttgtgatccacccgccctggcctcccaaagtgctgggattacaggcttgagccaccgcgcccagcctaatttttgtattttttatagagacagggttttgccatgtgtccaggctggtctcgaactcctgagctcaagtgatccacccgccttggcctctcaaactgttgggattataggcacgagccaccgtgcccagcaggttttatatgcactcttcttcttctttttatttttaatttttatttgtttatttttaaattttatatatatactcttcagtgtgtgtgatatgtatcagaattgtaaagtcctagggttcctggcagtgaatttcagtgtcatagcctggagtcctaggcactgagccagtgaacagatcattcccttcttgggcagctcctgttcgcactcctatttggatgcaagctgcctgtgtcttgcattttctgtgaggggctatgttgctctggttggggtggcttgcctcacacttgtctctctttgtgtttctccttagctccagcccttctctgagacggggaccaggggatggcagccatgcacctgacagcctggccccaggtgagctgtggggtccttcagctcttcctctgggcagtttcagattgaaaaacattgagaaggggagctggtgagcctcgggatgacagctgcttccacctgctggactggaacttgtgggaaagaggtgttgtgcagggagggcggcagagaccaggacagtagcgagtggaggaagcgggagagtgagcaggagagcaggagggtggtggtcttctgcacactgagggtctctgctcctctctacaggagcacccccagcatagggctctgggtgaatggggacgtggaaaccgcccctgtgggatgtactgtgcaggggtgtcagtggagcacagtcgcagaggattggactatctgtggtggggatgtasagaagaggaatagcaggacctgatcagagaaggatggccgtgcctctaattcaggggtaagggaaggtcacagggaktggagtcaagggagggggaagacagtcacatgggacggaatgtctcattgtgcttgtgaagctttcaaagtttaggatgcagactttaggtctctgagaagagctttccaccctgtcctgcaggaaagaggtgttgtgcggggaacctgcagaacataaacctgcaaaccaaattttccatacattttcagggacttcacggatcccctgaagctcatccatggacttccatggactacaggttgggaacagtccacagtcacaccagttgtatctttggaggcttactatgctccaggagccatactaagccctttgtatggtcgtttggtcctgacaaccgcctctgtgataagtgctgtgttgtactctttccacctaaaaagaaaaggcaaaaggggagtagagtaacttgcccaggatcacagagttattgtgtgattcagaactgcttagccataagacagctgtggaaccagtgatgttaacttggtcagatttgtgatgtgtatggaataatttgtaaggaagattcaaaagcacggtgaccacttcacaaagaagaatcccactggtcccgtgacatgggcttcatcaaggaaagccatcattaaagagggatccaattcaagtaatgcttaagatagaaaaatcatggccgggtgtggtggctcacacctgtaatcccagcactttgcgaggctgaggtggttggatcacttgaggtcaggagttcaagatcagcccagccaacatggtgaaaccctgtctctgctaaaaatagaaaaattagctgggttttatggtgcatgcctatagtcccagctactcaggaggctgaggcaggagaattgcttgagcccgggaggcagagggtgcagtgagccgaggtcatgccactgcgcttcagcctgggtgacagagcgagactccaactcaaagaaaaaaaaaaatctttcggacatagagactcaaaggatttgtggtgataaggaaggtgggaagtcaagaacaatccccaggtttctggctgaggtttcttgtgagggtgattctgaccccagctgaagtgtaagttcagaaggaagtgccaacttaccagggtggtggtggcggcacacagtgaagacattatattttgtgcagagaagttacttgttgaaggtcacacaaagaaggctcacagaaacacctaaaggttggactagaattgctgatgggtggaggtcagtaaattccaggaagacacatcctagcagagaggagttgagcagcagatccctgccagtgagcccccatggttgttagagcaggctgaggtgggcagagggtaagcctcccagaggctgcagctgcccaggaggggtggttgggcctgggagtgacacgaagcgtccctgagtggtggagcttgtgccaaccacatagcttagtgatgcaaaggrgagagtagccggccagtgggaaggccggtctccctgctttcccaaatgttcttggagaaacagtgaagctttcggagaagttggaaaggatgagacttgaatgggagagggtaaggaaaattctggctttccaggaagaccctgcagcctgggcagcatggagcatccttggctggaggtgctcaagcagaggctgcacagccccttgttggggggtctgtgaagggaatctggtggggctggatgagacagaagccgtggatgatctttgggggtggcttgagctgtgaggatgagggcgatgggtgggcagcagaacagggctgaggttaggcgcaggggagtggtgtgggacctgctggtggatcagccccgagtttgctgggagggagcagcttatctaaaagagtggagttggctttagagaatttgcttatggaaatttttttctttcagcctgtcttaatgtgacctcttatttgtgtgaaaaatggcatgaggtttccctgctgtgggagaatgtggatactttgtagtttactttctcgatattttttttctgagatcttccccttgttgttaatactaattttgtrctctcacaagcaccctccccaagcccttatactgcgctctgcccctcacttagggcctgagctatggaattggccctagggcagcaggaacctattgtttcagaagtcggtgacctttgaggacgtggctgtgtacttcacccaggcggaatgggatggcctgtcccctgcacagaggaccctgtacagggatgtgatgctggagaattatgggaatgtggcctccctgggtaagacctctctaccctgggaacctggaatctgccaattggggttcctggcttgcttctcccttacaggttactgaggggatctctggtaatcctttactgagtgagaaccccagagctgttcctaatctagacttagaggttactggcaggggcaaatgccaagccttttgtaggcctatataggactttgcttggaactggtatgcactgttgatccaacccatgaaagctatgttttggaaacactggaatccagttgcttcctgttccacagtggcatcttcagttgccccctcatcttacctgtcttgagtcttttcaaggatctcagtgtactctggattatttcaggccaaggtcaaaaagtggtatccctttgggcagaatctccctgcttgccctgcatgaggtctcctaggcctacagtctgggccctaaccaggctctcccacacgttcccaagccttcacccccaacccccacatttgcctcccaaagcccttggaagtctccaaggtctctttagtccttcctaagccccacagtactttcccgtagtcctgaggcttgggacctcctggggttcttaccttccctccccattgctgagacagtctgagaagaggcttaggaatttgtctgtgggagtttattcatctgtctctcctatttacctctcccaaaccaggatttccacttctcaaacctgctgtgatctcacaactggagggaggargtgagctggggggctcatctccactggctgcaggaacaggcctccagggcctccagactggtaagggaggtacatatttcccactctgttggaatttagcactttaggcataaagccagctttagcaacatataaacatactgtgtttattggccagtcatacagagtgaagtttgagtaaattttgatgattcatagagataggtagtccttatctttctgtcttcaaagtttgttgtgtctaattccaagaacagatcttttttcaaacccttcattctgactcttcaatgctaattttggaatcctgcctttctcagacaaaattaagggactcagtagtttgggggttccttgccatttctaagcattattcacatagtgtggaggatacagaattaacagccttttcacacagatagaagtgcttaaaagcacagtctttagaggagacttttctgaggtccagtcccaactgtgctgcttcctaatttgcgtgactttgagtaggttatttgagtgttctcatctctgaaaatgggttaataataaaaggaggtaatagtactatcttgtgggttgaggtttaaatgagataacacatatcaaatacctagcttataatgtgtgctcagttcagtatttttattttggttttggggaatacagctgtacacagggaaggtaatgtggaagggaggaagtgctcttaatttttgcttcttaaatgtgaatgtgtaaaggaatcctgaggtcttacagatatgcagtaagtgtggagtctgcatttctatgaagttccctggtgatgtggcgatgccagtacttctggttaccagaccacacttgaaggagcagggctccaattggtgccagcagagtagctgccaaatgacttctcattccccccgaggccccccgttatttcttatatttagggtctgtgagattctcttgaattttttcagtgagtcttcatttttcttagatggtttctgtaggtttttattccttttgatcattctatcagacgatatctgaccaaagaaggcatgttttggaaatggagtttgccgtataatggccttgacaaatatagggaaaaaagtgatattgtgaggtcttaatcaaaggaccctgtattttattctgtagacagctgactgtcctgaagtctttgacttttccaggaaacccatcatgatcctagctggtgatagaaacattaatgtagtcagtgtgtgtgggttaattgggatgaggaatcaaacaggctctaggcaggcagaagggagggcaaagggcatgaggcccatggcagcagtgttgactttctttttaaaaatcttcagaagcccagtcagtgatacctgtttaagactcatttgctgtaactgtgtcaaatggccatcctcactgcaagagaggaaagtgaaaacgagagatatttcacctatcatattgagaataattaaattatattcaatgttggtgagagtgcagcaaagcaggaatagacttctggagaggatgactagacatctgatagtatagatgtcttagtcagtttgggctacaataacagactgccatagattggatggcttataaacaacagaaatttatttcatacagttctagtccaagatcaaggttcaggcaggttctgtctggcaagggcctgcttcccggctaatagacagctgtcttctcactgtatcctcacatggtggcaagaaagggagctctctgggctcttttttaagggcattaatcccattcatgagggttctgccatagctcaacctcctgatacaatcacatcaggggttaggacttcagaatatgaatttgtggggaggacaaacattcagtctatagcaacagatgagtattatttttttagttgggaagagaccagtattatttagaaagtgcttgctggggaatccaggcaattggaggggcttattgagggcaattatgaaatactggggcagggggcatattacatgtggttgaggagtgatgaaagatgaaaaaatatgaggcagcattttgggactgagcttttgagaaagttgggaacaaatgcagagatgagtagttctagttctaaagactattgggattataaaaagatttttagggaatgatcaagtttaggattagaggaagaagtgaaaggaaaaggcaaggttaatgcagcagtatttggaggggaatgggaagaaaggggatgagatggacctcaaatagagcctgtctaaagtagaaatgaagttgaaggacaaattttggaaagcccacagttaatgttctaaggaaagaaacaaaattatttccattttgctccctggtgctgctgactgttgtcatcttccaagttgccatattctgttggatcctgtgccttttccttcttcagcattttccatttttttttaagtaaggaactgagtgctataggaacaactaagaagaaactgcagggtgtagaaaagcatggtgtgattaaaagaatgctgagctggtggacaagacctagaattttattccactactgtcacttttttttttttttgagatggagtctcgctctgtcgcccaaactggagtgcagtggcaagaacttggctcaccgcaacttccgtttcccgggttcgagcaattctcctgcctcatcctcccgagtagctggaactacaggcacgtaccaccacacccggctaattttttgtggtttagtagagacggggtttcactgtgttgcccaggctggttgcaaactcccaagctcaggcaatctgcctgcttcagcctcccaaagtgttgggattacaggtgtgagctaccgtgcccagctgtcacttttaaccttcatgtgattggttatgttctctacagtggccttgtattaggcacagtgggaatggtgattttttttttatcattactttcattgcttttcattactttcataatattgacacctattcaacagtacagaaagtgtataaagtagggaagcaagtccactaaacttcctatgccagtttatttagtttcttatggattcttctagaagttttctaggtatgtacaaatatatatatctgtcttttatatttttctttacacagctgaaaatctattctatatactgttttttcaacttgtttttccatttgattgtatyttggatgtctttttacgtcagcatatatggatttattgtattcttttastagttagttacaaattacttatcccaycttatggagaaaccctatgttttttgacctagtctggtgattttaaggagccccctgattattatggtcttttatagcacagttctcttctttttcctaacatggttcttacatgacattttatgttttctgttttttatagtagatattcagactgacaatgatttgacaaaggaaatgtatgaaggaaaagagaatgtatcatttgaacttcaaagagacttttcccaggaaacagacttttcagaagcctctcttctagagaaacaacaggaagtccactcagcaggaaatataaagaaggagaagagcaacaccattgatggaacagtgaaagatgagacaagccccgtggaggagtgtttttttagtcaaagttcaaactcatatcagtgtcataccatcactggagagcagccctctgggtgtacaggattggggaaatccatcagctttgatacaaaactcgtgaagcatgaaataattaattctgaggaaagacctttcaaatgtgaagaattagtagagccctttaggtgtgactctcaacttattcaacatcaagagaacaacactgaggaaaagccttatcagtgttcggagtgtggcaaagctttcagcattaatgagaaattaatttggcatcagagacttcacagtggggagaaacccttcaaatgtgtggagtgtgggaaaagcttcagctacagttcccattatatcacacatcagacaatccacagtggggagaagccctatcagtgtaagatgtgtgggaaggccttcagtgttaatggaagcctaagtaggcatcagagaatccatacgggagagaagccctatcagtgcaaggaatgtggaaatggcttcagctgtagttctgcatatattacacatcagagagtccacactggagagaaaccttacgagtgtaatgactgtgggaaagcgttcaatgttaatgcaaaattaattcaacatcagagaatccatactggagagaaaccttatgaatgtaatgaatgtggaaaaggcttcaggtgcagctcccagcttaggcagcatcagagcatccacacaggagaaaagccctatcagtgtaaagagtgtggaaaaggcttcaataataatacaaaactcattcagcatcagagaatccacacaggtgagaaaccctatgaatgcactgaatgtggaaaagccttcagtgtcaaagggaagttaatccaacaccagagaattcacacaggcgagaaaccctatgagtgtaatgaatgcgggaaagccttcagatgtaactcccaatttcggcagcatctgagaattcacactggggagaagccctatgagtgtaatgagtgtggaaaggccttcagcgttaatgggaaactaatgcggcatcagagaattcacactggggagaaaccttttgaatgtaatgagtgtgggagatgctttacttctaaaagaaacctacttgatcatcaccgaatccatactggagaaaagccctatcaatgtaaggaatgtgggaaagccttcagtatcaatgccaaactaactaggcatcagaggatacatactggggagaaacctttcaaatgtatggaatgtgagaaagcattcagctgtagttctaactatattgtgcaccagagaatccatacaggrgagaaaccctttcagtgtaaggagtgtggaaaagccttccatgttaatgcccatttaattcggcatcagagaagccacactggggagaaacccttcagatgtgtggaatgtggcaaaggcttcagctttagttctgactacattatacatcagacagtccacacttggaagaaaccctatatgtgtagtgtgtgtgggaaagcattcaggtttagcttccagctcagtcagcatcagagtgtccatagtgaaggaaaatcctaataatgagaaagatatagaaaactcttaaggttaatgccaaaatggatcaagtatcatcagattcatccattgaaaaacctccaagagggcatgaatatggcagagtcttcatatggaaacagtttttattctattcagtttaaatcaggaaaggatgaccagttaaagagaaacatccaaaaatagctttgttttgtaccaacaggaattagaaaatataatgaaaagatttcgttcccagcagcatcaagaaaagtagattttctagaaataaacagttatggaggacttgtatggagaaatttaagtcttcactgagggccactttacaaaggaaatttgaataaatggagagagagagaagccttgttgttggataggaaaacccgtactaaagatactctacctacattaatttatttgtttaatttttgacaacaagcatgtattacttttgaaaagatgaaaaataaagwtttatttaaaaaaggaaaaaggtatgagtacatttttaattttcatgtaattgagaaaacctttctaagtattagatgaaagctagaaactatccacagggtatgtactgataaattgactactcaaaaactaaatattcctgtatgtttttgttttaaagtttaaaagataaagcgcaaaatggggaaatacttttgtaaaatttgtgatataaaagtgtagtatttgggcatggtggatcagacctgtaatctcagtgctttgggaggctgagacgggaagattgcgtgaggccatgagttccagacctgtatgggcaacatagcaagatcccatcgctacaaaaaataataaaagccaggcgtggtggtatgtgcctgcagtccttgctgcttgggaggctgaggcaggaggatcacctgactccaggaattcgaggctgcagtgagctatgaccaccactgcactccagcctgggtggcagtgagaccctgtctcttaaaacattaatatctaaagataaataatttagacacactaacaggcagcttttaaacagatactaaaaaatgactgttaaagtaagaagaggtattcaatctcagtactctaaggtgtgaaaattagtaagtttttttgcatattacattgttatatatgcatacatgtgatactatgcagctgtcaaaaatgacatttactatagatgccctttatataagtataaaatgtagtcaacaagatagcatgttacagggtttctattttgtaataactggaactcttgcataaacacatggcttttcaggtcctgaaggaaggtggctaccttggattcccagtctcattggtggttttcaaggtctctgatgaagatcttggaagcctcaagatactctttggaagggaatctctcaacaccttaaaaaattctaagcaataggctgggcgcagtggctcacgcctgttatcccagcactttgggaggccaaggtgggcggatcatgaggtcaggagattgagaccatcctggccaacatggtgaaaccccgtgtcttccaaaaatataaaaattagccaggcatggtggtgcgtgcctatagtcccagttactcaggatgctgaggcaggagaatcacttgaacccaggaggcggaggctgcagtgagccaagatcatgccactgcactccagcctgggcgacagagtgagactctgtcttaaaaaaaaaagattctaagcactaataggagcaggcaagctaactatcaggaagctgaagaacagcaggcccaatagtaagtagtaagaaagggacatgataacttctgccatcccccaagtgccacacaccatctccttaccatgcccacctgtgagctctgtaaggcatatgctgtctctggcccccaggctccttagaacagaagctagtctgcatttagtttagaatgaggttcaaaaccactggaggttttctgaatgtgggacagttatttaagataattggactgggagcatcactcttccttcagatcctcatgttccaggacttctgacgtgccacagataaaaacaggagaaaagcaatcgctagtaaatgagacttaacgatcaccagcaaactccaaatcctcataaacatccctgtaggcccacagatactcaagtgtcctcaaagtcagacagacgaatgaggctacacagagtgacaaggagtagggagggtggagaattgaagagtgcatcccctacctaaagaaggcagcctcaactcagctgtagcaaattctgggtaggcagcaaagcagttccagtaatgccaaatattctgggtcttcaaaaagttagaaatccgattttaaaaaatccgaaatctctctctgtccctctttttgcttgttaagatgaaggttattgtcccagaatccttgaacaatttttagtaaaagtccatttctagatggtggttttcttcaataaatcatacagcagaatctatttgtgtacaccaggacagtataatagtatggagaaaatagggtcatcacctgttaatggtagtaaagaaacactgcttttcacaagacctttgataccaaatgtgtcggtttttcacacgattctccaattctctgcagacaccaactgggtgtcctacaattttttttttttttttgagacagtcgctctgtcacccaggctggaatgcagtggcctgatctcggctcactgcaagctccacctcccgggttcatgccattctgcctcagcctcccaagtagctgggcctacaggcacccgccaccacgcccggctaattttttgtatttttagtagagacggggtttcaccgtgttagccaggatggtcttgatctcctgacctcatgatccgcccacctcagcctcccagagtgctgggattacaggcgtgagccaccgcgcccggccctacaattttaacaattgacactttcagagtaagtgaagacaccacaggttaagggctcacttccacatgactgccctgcacttcagacacaagttacaagtagagggtccccaggttacccatgcttctgtgtgatagggctacaaattgggggttcccatgacccccttttccagctcagtaatttgctaaaacagtgcacagaactcaggaaaacatgttactattaccattttgttgtaaaggatacaaatgaacagccagatgaagaattacttagggtaaggactggaggttgggttatcttctcactcagacaaatgacgtggtcccacccttaagtttgctgtaagtctgctctacgttcacaggactgtgaaagggtggggccccaatcagaggtagtcaaactgaattttatccccgggagagtccaaggacagctgggggagaaatgcctagaaaatgcataatatatacttttaaaagacacataatcatcattttgcccatttccaagttttggatatcttttttttttttttttttttttttgcacacagatgagaaaacaggtctgaagtgtcttcatatctctgggcctccatttgatcatctgtaaaatggggtaacagagaacctgccttccagatacggttgtgaggcctgaaatacttgcttccaggaaaggctcagccagagcctggcccagaggtggtgaagggggtggtggtttgagtgtgtgcacatctgatgtacagtcatgcacaggtgcacacatgcaggaagcccccaaatccttctcccataggcacaagcgagatgcacacacacacccagggacacacacagtgtaccccatagacctccacatacacagacacacatggacacacatggaccccccacatacatagacacacacacagtgcaccctgcggacccccacatccacagacacgcatagatcacaaacagataccccatcacacatagccaacgcacaaggacacacacagacccccccaacatacatagacacatgcacacacatagacatacacacagacccccacacacatagacacatacacacatagacacacagagactcccccccacacccatagacacacataagacacacatgcacacatagacaaagacacagacccctcacatacatagacacacacacacggtgtaccccacagacccccacatccacagacacacctagtggtacacatggtacaccctacaggccacaccctcacatagacactcctgcaccagctctctgtagctcaagggctggtgtcggccaggagtgctgccttgagtattgcaaaggagccattcctgtccgaaagcttgtcacgtggcacgggaccttggtagagtgtcctagggatgccatcgtgtaagtctgccccaccccaggcatcctaggagctgggcatgggaggaggcagcccctggagcccccagaccacaccttggggagaggggagagcaggacccttcttctccttgaccagccagccctgttcctctgggctgttccagaccaagcactgagaccctggaggggtccaagtcctggatttacatttagagaaactgaggcccagagatggatgggacgaccccctggtcatgcagcaaaccaggggctgatgtggtctctcactggggccagaggagagtttagaaggccagggctcaccccagccttcccagttgatggacagcctctgcaggtctctgagacatggcagtccgtagagggggacaagaagtcctgcagccctggcttcccgcagggtccacagtttctttgcagtggcaggatcaaggctcggactcatggaagattgagaatcctagaggacataacctgatatctcagatctgccaccaatgtcccatgtgaccctgggcctctcagcctcaggctcctggtcagcatagggtggggatggtcccaggactctgacggttttctccctctccgtaggcttgttactgtccagggcaggtcatctgctcagacctcaatgactggagggtgaagaaggcagtcagacacctgcaaagcctcgtgaagtcacatgaccccaccacccaggagactgggtagccttggtgttcaccacaccagtcttgagccatgtgcgtgcagtggaggccttaccaggacagcaagaaacctgagcacaggagactccagaaccccgcacagtagcacttctgcttgtcttaactggagccctgggcctggaagggggaggattaaagtctttctccttcagtcgggatctgcatgttctgtccctgcagtgcaaggtgcacacacccaccttggcctgtcacattggaagggacctcagagaacacctgggcctgctctggctaggtcaggaggggaaatagaagctcaaaggaaaacatggctgtcctgtctcaaggcacccgcaggtagaggggagagcctggtgcgaggcctaagcagggcgtccatgcgctgaggagcagagctcctgtgtcatctgcacagtctcccggaggcctgggggccctctctctgcaggggctgggggttctgggaagaggctctggattctctcctgttctctctgcctttgaaatctccactcctgcacatctgttatcttctggcctggagaggatgaggacatcctccgacacattccattgcactccattccattccagcactgtccgcaggccccttccacaggccaggggttgaccacctgctggggaatcctacatgggtcaaccttggccttctcctggggaacgccgcagcctgggggaaggcgaggacccctgtagccccttcccctagctcgcaggcccagagacccactacagaccaggtggtcctttagcacatcctgtaccgggcagggtctcagggacctcccctgcacggtctgggccacctctgctcgctttccggctttctcctccttctggatctctcactgtgccgcctgttccccaagtggcttcagtgttcctgaggcgtggcccccaccccctgccagccaccgaaatcccacccaccttcggctcaagcccagcctccaggaagccttcccgactgccctgcggcaccaagcctccgtcctctggttgccccgagggacctcagcgcccccgccacggtaaggggctgttctgccgtggatccccgcgcgtctgctggtccccaccccgccatcggcccgcagccccgcggcccacgtgctcccaggctggggccgcccgcggaggtgctggcgccggcgacgccggctggagttggagactgcgcgtgagcgcccgagggcctgtctgcctatgcgtcggccgtgggccagcgcttctgaccctgggcctcggctctggcctcggtctggaagggggcaggggagcggggccctgcgtccggaagtctgcgccctgcgcggtgggcggagaagccacgaggagtccttgctgcccccggcccttggtgccccctggcggccggcgcgctcgctgcacccctgcccg

SEQ ID NO: 97126 - DNA, 22802 bp, Homo sapiens
  misc_feature (1)...(22802): n = A,T,C or G
caggtctgatgaagtatccaaaatcaagctcctgaccatccccaaacctgccccttctgcagggtttacctcgctagtcggcgccatccttgattcttctctttctcccacccaggccatcatctcttgcctggttgatacccacagcctcccctttgggctttatccttatccccatcatagctgccagagggatcctgtgaaaacactccccagcctgctcattcctctgccctaagcctgcatggcacagagcaaaagccagttgttatgggacctaggaagtcctgtgggatgggccccagcctgcatcttcatcctcttctccccaccccactccattcactctctgcctatcgctcaccagcctataccacctgcctcagggcctttgcactgaccatttaggccacattccaggctcttttcacacgttgcctcctctgagaagccctccctgaccactctgcccatacctcatgcctcttgattccccttacctggcttgtggtttcagcactttccctgtgtgtgtttgtttttcttggcatgagagcaggacctaagtgtctgttccctgttgattccccagtgccaggcatgcagtgcaaactctagaaatattttttgcatgaaggaatgagtgattgaatgcagcaagggtctggaggctgaggaccaggcagacagacattcagagttgctggaacgcgacagagacagggagtcagactggtcatgcaagatcctgggcctgcccttgggtcctggggagccacggaaggttgtgggtgccagagggttgcggtcagagtcacagtcaagggccttctgagacctgtgccccctccccaccctccctccccacctcctcaggccagctctggggtctcggcaggtggtccgcaacatgacctccgagttcttcgctgcccagctccgggcccagatctctgacgacaccactcacccgatctcctactacaagcccgagttctacacgccggatgacgggggcactgctcacctgtctgtcgtcgcagaggacggcagtgctgtgtccgccaccagcaccatcaacctctagtaggggctgctgggccgcctgggtgggaaagggccaggggcgggtggcccagggactgcccacttatccagtaaggtggctccgtcacctcttttcctggtgggaaactgaggcccaaccttggtagcttatcctgggcctctcagtgagtatgtttgagcctcagtgggtggatagggaccaggctgggccaggcaaggtcgggcactgtctgacctggctgggcggtagctttggctccaaggtccgctccccggtcagcgggatcctgttcaataatgaaatggacgacttcagctctcccagcatcaccaacgagtttggggtacccccctcacctgccaatttcatccagccaggtatggggtggaggtccgggggtgggggactggggtggagaggggcgggtgtcctgggcaggcagctgacgggcatccctgtcttctcccatcggccgcagggaagcagccgctctcgtccatgtgcccgacgatcatggtgggccaggacggccaggtccggatggtggtgggagctgctgggggcacacagatcaccacggccactgcactggtatgtgtcacaccttttctccctggccgtgcccaccctgcacagcccccaagccatgctgatcacactcccatgccccaggccatcatctacaacctctggttcggctatgacgtgaagcgggccgtggaggagccccggctgcacaaccagcttctgcccaacgtcacgacagtggagagaaacattgaccaggtgggccgggggttggagaaactgagtcacggtgtggggccccagggcatcctgggctggaggcctggatcatcacagagtggacaattgttggtgtcctctctctagtgcctgggccatctggagcccctgtgccatgagggccaagccccctgctccagtgagacccagcaggccccaacctgctcttcctgatgacctggcccgaaatggcaccacctgggctgaggcctgtgaccacacaggtgtggttcaggtggcatctggagccctgctcaggcttcccctctcctcccacccccaggcagtgactgcagccctggagacccggcaccatcacacccagatcgcgtccaccttcatcgctgtggtgcaagccatcgtccgcacggctggtggctgggcagctgcctcggactccaggaaaggcggggagcctgccggctactgagtgctccaggaggacaaggctgacaagcaatccagggacaagatactcaccaggaccaggaaggggactctgggggactggcttcccctgtgagcagcagagcagcacaataaatgaggccactgtgccaggctccaggtggcctccctgccctgtctccccactctctgggcctcagtgtattgtgtgtgaaatggagccatctgactggggaggaacagagaggtgggattcggagatcttcacaatgcgggcactggaactagcctcagcatcttcagcatggggagagccaggcacatggctgggggccaggggaaggttcacaccaagctctgccccttcccaccctgatccctcggactttggggccaggccctcccttactggggctgggcagtgacactacctaggatcagccaccagggggtaccacgaccctggcactttcttaggcagagggtggccagctgatgctgggaacccgggtgccttcttagacccgtaggcgtccagctcaccctgccgatgacactggaggtgaagctgaggtccgaggaatggggactgggcaacaggctggaggaaaacatctcggtcagagccacgcccctggggggtttccaagtttaagcccagagtgaaacccaagcttgtgatcctctccagagggaggcctggttctcagggaacagcaaacgggaagatgtccccagatcccagggatcagggcttggaccagccggggacgcagcccagagggagtgggtccagaaggaaacagctagacacagcagccttcaccatcggcagcccctccaggcctccctcagggcctgctccctcctctgtgcacagttccaacacctggggcagggttctgggaagggctggtggaggtgggctggtgggaggcggtgatcacagcccagcacctggatatcaccaggggcactggggccaggggccaggtgaggccaggtcggggctatccttcaggatccccgaagacctggtgattccaaagggcccatagacaaacagggttttctgcctgtggagtcaagtcccactgggtctgagctctggagggctgtgtctctggggctctgcaggggtgagatggaggtgggctcaactggtgtacaagtcactcttcaatccttattttatttatttaatttttttaaaaaaaatttaaaccaatagagatggggtctcactatgttgatcaggctggtcttaactcctgacttcaagcagtccccccatctcagtctcccaaagtgctaggattacaggggtgagacactgcacccggcctcaatccttattttggcctgagaggaaaggccgtggccccatttgcaggggagaagactgaagctggaggggcaggccttgctctgggttgcacagcagcaacagaagtgggagctggccacgaggcttcctcgactcgacacactggtggggtacaccctggttctccaggtcccatggggctcagcccaggactacctcggggggtgagggacttaaatcctctccttcattctcatcgccccttcccccatcatttcctgaggaaggacattcagggacctgaaggagcggcctgcccctccacatctgtgggtgtttctcatcaggtgggacaagagactgagaaaagaaagagacacagagacaaagtatagagaaagaaaagtgggcccaggggacctgcgctcagcatacagaggccccacgctggcatcagtctctgagttccctagtatttattgatcattatctctaccatctcagagagggggatgtagcaggacaatatggtaatagtggggagagggtcagcaggaaaacacgtgaacaaatgtctctgtgtcataaacaaggttaagaaaaaggtgctgtgctttgatgtgcatatacataaacatctcaatgcattaaagagcagtattgccaccagcatgtcccacctccagccctaaggcagttttctcctatctcagtagatggaatatacaattgggttttacacattcctttgcccagggacgatcaggagacagatgccttcctcttatctcaactgcaaagaggccttccttcctcttatactaatcctcctcagcacagaccctttacgggtgtcgggctggggaacggtcaggtcttttccttcccacaaggccatatttcagactgtcacatggggagaaaccttggacaatacctggctttcctaggcagaggtccctgcggccttctgcagtgttttgtgcccctgcttacttgagattagggagtggtgatgacttttaacaagcatgctgccttcaagcatttgtttaacaaagcacatcctgcacagccctgaatccattaaaccttgagtcgacacagtacttgtttctgtgagcacagggttggggatagggttacagattaacagcatctcaaggcaaaagaatttttcttactacagaacaaaatggagcctcttacgtctacttctttctacatagacacagtaacagtctgatatctctttcttttccccacagggaccttcctggctgtgcctcggatcaggaccagaatgacacccattcatttccctgggcctttgctccggtggtccctgcaccctggcctctgcctgacgaggatggtggggagaggaggggggacatcccccacgctgctgtctccactgtggcctctgagcttccaggactgcagcgggtgggtgggtggcctggcctaagcccaggaatgcacttcagctcctggttgagcaatgtcactgaggcttgggagtcgggtggggacgggaggaggcgtccgcaggccccccctaccgtgagaggcagccgtgggaacagcctacctctaaacaatcgctgcagcccaggctgaccaggggctctggccggacataggggcctggcaggctgtgtggcctgtaaggacacagtctgtctctgtgcctcagtttctctgctgcccagatggagaggcccagactccaggtgtagacatctggagcaggcagtgttcagctggggagggagcggggaggactatgggggccacgtgggaagaagtccagcccacatcacctgcacccctgctgagcctggtcaacagaggccctcagtgggtcctcactctcctggctgcctcccatttaggcaccctgaggcctggggagaacagagccaggccagtgtccccagagaggctgcgctgccagcacagtagtagcagatttggattcagggaagtagacctgcagccagggtgggaaagagctgcaggcggggtggagcccccacatggcacagcccccctccttggaggtctatgctgcatttccaggacagcaagtcccagggatggatggtgcctggtgccaagggctagaggcatggtctgtctgcattccctacaggggcatcttgtagtcaccagcatttgatgctgtcaagtccccctgtcctctgtgcagactgggaagcccttggtcaccctggggggggttgggggacccaggccaggctgcagaaacataaggacttgaacccgggtcctgagtgacaccaccttgggtcctcctccctctgcctctgttcagctccaccttgatggtgactaggctgggccatgcggagagggttaggggatagagatgggagctggggagcagggctccactctgggaggggggcagccttgccggatccagggcagagttaagcggccccagctctgctttcctagagctgctgagaacccgggaaatggtgtggaggttccggggagccctgcccctacctggcaaccgcagtgcagcaggcaccaagttctcctgcacattgcgacagtgtgaccctgggctctggcgggcagtaggtggggcctttggacctaccagcagtgagggagttaacacagcagctgactcctctaggcaaggaaaactcccctcagacgctttgctgcctggcctcctgccagcaacaagcaggagctgaaaaccagaagttgaggcgtgagtttggycactccgtagtgtgcacttggtgagggcagcagctcgccacagctgccagccgtctgtccattcacccatctgtccatctggcagcccgctgttcagacccgtctgtctgtccgcccatctgtaagcccatctctgtcccattgtctatctgaccatctttctcttactgtcctctttgtctagctatctggcctatctgtcgatccatcttcgtgtctgtcttcagcccccacctgtttgtccatctgtccaattacctgtgagtctatctatgcaccttcttgtccattcatctgcccacccatctgtccctccrtctgcccaccggcctcccctctccttctgggccgcagagccatggcccaggactgcagagccatggttggcctggtcctgctggggctggggcttgtgctggctgtcattgtgctggctgtggtcctctctcgacaccaggccccatttgacccccggcctttgcccacgccgctgttgctgnnnnnnnnnnnnnnnnnnnnnnnnnnnnnnnnnnnnnnnnnnnnnnnnnnnnnnnnnnnnnnnnnnnnnnnnnnnnnnnnnnnnnnnnnnnnnnnnnnnnnnnnnnnnnnnnnnnnnnnnnnnnnnnnnnnnnnnnnnnnnnnnnnnnnnnnnnnnnnnnnnnnnnnnnnnnnnnnnnnnnnnnnnnnnnnnnnnnnnnnnnnnnnnnnnnnnnnnnnnnnnnnnnnnnnnnnnnnnnnnnnnnnnnnnnnnnnnnnnnnnnnnnnnnnnnnnnnnnnnnnnnnnnnnnnnnnnnnnnnnnnnnnnnnnnnnnnnnnnnnnnnnnnnnnnnnnnnnnnnnnnnnnnnnnnnnnnnnnnnnnnnnnnnnnnnnnnnnnnnnnnnnnnnnnnnnnnnnnnnnnnnnnnnnnnnnnnnnnnnnnnnnnnnnnnnnnnnnnnnnnnnnnnnnnnnnnnnnnnnnnnnnnnnnnnnnnnnnnnnnnnnnnnnnnnnnnnnnnnnnnnnnnnnnnnnnnnnnnnnnnnnnnnnnnnnnnnnnnnnnnnnnnnnnnnnnnnnnnnnnnnnnnnnnnnnnnnnnnnnnnnnnnnnnnnnnnnnnnnnnnnnnnnnnnnnnnnnnnnnnnnnnnnnnnnnnnnnnnnnnnnnnnnnnnnnnnnnnnnnnnnnnnnnnnnnnnnnnnnnnnnnnnnnnnnnnnnnnnnnnnnnnnnnnnnnnnnnnnnnnnnnnnnnnnnnnnnnnnnnnnnnnnnnnnnnnnnnnnnnnnnnnnnnnnnnnnnnnnnnnnnnnnnnnnnnnnnnnnnnnnnnnnnnnnnnnnnnnnnnnnnnnnnnnnnnnnnnnnnnnnnnnnnnnnnnnnnnnnnnnnnnnnnnnnnnnnnnnnnnnnnnnnnnnnnnnnnnnnnnnnnnnnnnnnnnnnnnnnnnnnnnnnnnnnnnnnnnnnnnnnnnnnnnnnnnnnnnnnnnnnnnnnnnnnnnnnnnnnnnnnnnnnnnnnnnnnnnnnnnnnnnnnnnnnnnnnnnnnnnnnnnnnnnnnnnnnnnnnnnnnnnnnnnnnnnnnnnnnnnnnnnnnnnnnnnnnnnnnnnnnnnnnnnnnnnnnnnnnnnnnnnnnnnnnnnnnnnnnnnnnnnnnnnnnnnnnnnnnnnnnnnnnnnnnnnnnnnnnnnnnnnnnnnnnnnnnnnnnnnnnnnnnnnnnnnnnnnnnnnnnnnnnnnnnnnnnnnnnnnnnnnnnnnnnnnnnnnnnnnnnnnnnnnnnnnnnnnnnnnnnnnnnnnnnnnnnnnnnnnnnnnnnnnnnnnnnnnnnnnnnnnnnnnnnnnnnnnnnnnnnnnnnnnnnnnnnnnnnnnnnnnnnnnnnnnnnnnnnnnnnnnnnnnnnnnnnnnnnnnnnnnnnnnnnnnnnnnnnnnnnnnnnnnnnnnnnnnnnnnnnnnnnnnnnnnnnnnnnnnnnnnnnnnnnnnnnnnnnnnnnnnnnnnnnnnnnnnnnnnnnnnnnnnnnnnnnnnnnnnnnnnnnnnnnnnnnnnnnnnnnnnnnnnnnnnnnnnnnnnnnnnnnnnnnnnnnnnnnnnnnnnnnnnnnnnnnnnnnnnnnnnnnnnnnnnnnnnnnnnnnnnnnnnnnnnnnnnnnnnnnnnnnnnnnnnnnnnnnnnnnnnnnnnnnnnnnnnnnnnnnnnnnnnnnnnnnnnnnnnnnnnnnnnnnnnnnnnnnnnnnnnnnnnnnnnnnnnnnnnnnnnnnnnnnnnnnnnnnnnnnnnnnnnnnnnnnnnnnnnnnnnnnnnnnnnnnnnnnnnnnnnnnnnnnnnnnnnnnnnnnnnnnnnnnnnnnnnnnnnnnnnnnnnnnnnnnnnnnnnnnnnnnnnnnnnnnnnnnnnnnnnnnnnnnnnnnnnnnnnnnnnnnnnnnnnnnnnnnnnnnnnnnnnnnnnnnnnnnnnnnnnnnnnnnnnnnnnnnnnnnnnnnnnnnnnnnnnnnnnnnnnnnnnnnnnnnnnnnnnnnnnnnnnnnnnnnnnnnnnnnnnnnnnnnnnnnnnnnnnnnnnnnnnnnnnnnnnnnnnnnnnnnnnnnnnnnnnnnnnnnnnnnnnnnnnnnnnnnnnnnnnnnnnnnnnnnnnnnnnnnnnnnnnnnnnnnnnnnnnnnnnnnnnnnnnnnnnnnnnnnnnnnnnnnnnnnnnnnnnnnnnnnnnnnnnnnnnnnnnnnnnnnnnnnnnnnnnnnnnnnnnnnnnnnnnnnnnnnnnnnnnnnnnnnnnnnnnnnnnnnnnnnnnnnnnnnnnnnnnnnnnnnnnnnnnnnnnnnnnnnnnnnnnnnnnnnnnnnnnnnnnnnnnnnnnnnnnnnnnnnnnnnnnnnnnnnnnnnnnnnnnnnnnnnnnnnnnnnnnnnnnnnnnnnnnnnnnnnnnnnnnnnnnnnnnnnnnnnnnnnnnnnnnnnnnnnnnnnnnnnnnnnnnnnnnnnnnnnnnnnnnnnnnnnnnnnnnnnnnnnnnnnnnnnnnnnnnnnnnnnnnnnnnnnnnnnnnnnnnnnnnnnnnnnnnnnnnnnnnnnnnnnnnnnnnnnnnnnnnnnnnnnnnnnnnnnnnnnnnnnnnnnnnnnnnnnnnnnnnnnnnnnnnnnnnnnnnnnnnnnnnnnnnnnnnnnnnnnnnnnnnnnnnnnnnnnnnnnnnnnnnnnnnnnnnnnnnnnnnnnnnnnnnnnnnnnnnnnnnnnnnnnnnnnnnnnnnnnnnnnnnnnnnnnnnnnnnnnnnnnnnnnnnnnnnnnnnnnnnnnnnnnnnnnnnnnnnnnnnnnnnnnnnnnnnnnnnnnnnnnnnnnnnnnnnnnnnnnnnnnnnnnnnnnnnnnnnnnnnnnnnnnnnnnnnnnnnnnnnnnnnnnnnnnnnnnnnnnnnnnnnnnnnnnnnnnnnnnnnnnnnnnnnnnnnnnnnnnnnnnnnnnnnnnnnnnnnnnnnnnnnnnnnnnnnnnnnnnnnnnnnnnnnnnnnnnnnnnnnnnnnnnnnnnnnnnnnnnnnnnnnnnnnnnnnnnnnnnnnnnnnnnnnnnnnnnnnnnnnnnnnnnnnnnnnnnnnnnnnnnnnnnnnnnnnnnnnnnnnnnnnnnnnnnnnnnnnnnnnnnnnnnnnnnnnnnnnnnnnnnnnnnnnnnnnnnnnnnnnnnnnnnnnnnnnnnnnnnnnnnnnnnnnnnnnnnnnnnnnnnnnnnnnnnnnnnnnnnnnnnnnnnnnnnnnnnnnnnnnnnnnnnnnnnnnnnnnnnnnnnnnnnnnnnnnnnnnnnnnnnnnnnnnnnnnnnnnnnnnnnnnnnnnnnnnnnnnnnnnnnnnnnnnnnnnnnnnnnnnnnnnnnnnnnnnnnnnnnnnnnnnnnnnnnnnnnnnnnnnnnnnnnnnnnnnnnnnnnnnnnnnnnnnnnnnnnnnnnnnnnnnnnnnnnnnnnnnnnnnnnnnnnnnnnnnnnnnnnnnnnnnnnnnnnnnnnnnnnnnnnnnnnnnnnnnnnnnnnnnnnnnnnnnnnnnnnnnnnnnnnnnnnnnnnnnnnnnnnnnnnnnnnnnnnnnnnnnnnnnnnnnnnnnnnnnnnnnnnnnnnnnnnnnnnnnnnnnnnnnnnnnnnnnnnnnnnnnnnnnnnnnnnnnnnnnnnnnnnnnnnnnnnnnnnnnnnnnnnnnnnnnnnnnnnnnnnnnnnnnnnnnnnnnnnnnnnnnnnnnnnnnnnnnnnnnnnnnnnnnnnnnnnnnnnnnnnnnnnnnnnnnnnnnnnnnnnnnnnnnnnnnnnnnnnnnnnnnnnnnnnnnnnnnnnnnnnnnnnnnnnnnnnnnnnnnnnnnnnnnnnnnnnnnnnnnnnnnnnnnnnnnnnnnnnnnnnnnnnnnnnnnnnnnnnnnnnnnnnnnnnnnnnnnnnnnnnnnnnnnnnnnnnnnnnnnnnnnnnnnnnnnnnnnnnnnnnnnnnnnnnnnnnnnnnnnnnnnnnnnnnnnnnnnnnnnnnnnnnnnnnnnnnnnnnnnnnnnnnnnnnnnnnnnnnnnnnnnnnnnnnnnnnnnnnnnnnnnnnnnnnnnnnnnnnnnnnnnnnnnnnnnnnnnnnnnnnnnnnnnnnnnnnnnnnnnnnnnnnnnnnnnnnnnnnnnnnnnnnnnnnnnnnnnnnnnnnnnnnnnnnnnnnnnnnnnnnnnnnnnnnnnnnnnnnnnnnnnnnnnnnnnnnnnnnnnnnnnnnnnnnnnnnnnnnnnnnnnnnnnnnnnnnnnnnnnnnnnnnnnnnnnnnnnnnnnnnnnnnnnnnnnnnnnnnnnnnnnnnnnnnnnnnnnnnnnnnnnnnnnnnnnnnnnnnnnnnnnnnnnnnnnnnnnnnnnnnnnnnnnnnnnnnnnnnnnnnnnnnnnnnnnnnnnnnnnnnnnnnnnnnnnnnnnnnnnnnnnnnnnnnnnnnnnnnnnnnnnnnnnnnnnnnnnnnnnnnnnnnnnnnnnnnnnnnnnnnnnnnnnnnnnnnnnnnnnnnnnnnnnnnnnnnnnnnnnnnnnnnnnnnnnnnnnnnnnnnnnnnnnnnnnnnnnnnnnnnnnnnnnnnnnnnnnnnnnnnnnnnnnnnnnnnnnnnnnnnnnnnnnnnnnnnnnnnnnnnnnnnnnnnnnnnnnnnnnnnnnnnnnnnnnnnnnnnnnnnnnnnnnnnnnnnnnnnnnnnnnnnnnnnnnnnnnnnnnnnnnnnnnnnnnnnnnnnnnnnnnnnnnnnnnnnnnnnnnnnnnnnnnnnnnnnnnnnnnnnnnnnnnnnnnnnnnnnnnnnnnnnnnnnnnnnnnnnnnnnnnnnnnnnnnnnnnnnnnnnnnnnnnnnnnnnnnnnnnnnnnnnnnnnnnnnnnnnnnnnnnnnnnnnnnnnnnnnnnnnnnnnnnnnnnnnnnnnnnnnnnnnnnnnnnnnnnnnnnnnnnnnnnnnnnnnnnnnnnnnnnnnnnnnnnnnnnnnnnnnnnnnnnnnnnnnnnnnnnnnnnnnnnnnnnnnnnnnnnnnnnnnnnnnnnnnnnnnnnnnnnnnnnnnnnnnnnnnnnnnnnnnnnnnnnnnnnnnnnnnnnnnnnnnnnnnnnnnnnnnnnnnnnnnnnnnnnnnnnnnnnnnnnnnnnnnnnnnnnnnnnnnnnnnnnnnnnnnnnnnnnnnnnnnnnnnnnnnnnnnnnnnnnnnnnnnnnnnnnnnnnnnnnnnnnnnnnnnnnnnnnnnnnnnnnnnnnnnnnnnnnnnnnnnnnnnnnnnnnnnnnnnnnnnnnnnnnnnnnnnnnnnnnnnnnnnnnnnnnnnnnnnnnnnnnnnnnnnnnnnnnnnnnnnnnnnnnnnnnnnnnnnnnnnnnnnnnnnnnnnnnnnnnnnnnnnnnnnnnnnnnnnnnnnnnnnnnnnnnnnnnnnnnnnnnnnnnnnnnnntatgtaagagtaaagagaattgtgtaatgaagccccgagtatccattcaatttcaacaacaatctcatggccaagctaatttcatgtatactctttcctgcttccctctaccccacattatttcagtgcaaatcccagatatataactgtacccatacatatttcagtatgttttatttattttaaaccccacaatatatcattttctatactactgtaatttcataccaataacattcatttagatttacccacacgtttacctcttctgttaccctttatttttatttataaaaatatctttgggaagaaatatctttcagcacatggtcaaggatctcctgagggctatgtcatgggcaaaatatacatatatattccatatatatacacacatatacacacacacacatatatacacatatacacacacacatatatatattccactttcacttttttgtttgtttgttttttgagaccgagtctcgctctgtggcccaggctggagtgcggtggtgggatctcagctcactgcaacttctgcctcctgggttcaggtgattctcctgtctcagcctcctgrgtagctgggattacaggtgttagccatcacgtctggctaatttttgttktttttttttttttgagacggagtatcgctctgtcacccaggctggagtgcagtggcaagatcttgtctcactgcaacctccacctctcaggttcaagcaattcttgtgcctcagcctcctgagtagctgggattacaggcatccaccaccacatctggctaatttgtgtatttttggtagagatggggtttcaccatgttggccaggctggtctcgaacttctgacctcaggtgatccacctgcctcggccttccaaagtgctgggattacaggcatgagccaccatgcccagccattttcacttttgaaggatattgttaatgagcatagaattctaggttggcagatattttctttcctcagtttgaaaacatgattcccttgtatctgatttctcctgcttttattgggaagccaattctcaatctaattttgctcatttgaaggcaatggctttttctgttgttgtgttttctgaggtggagtctcactctgtcacccaggctggactgcagtggtgcaatctcagctcactgcaacctctgcctcctgggttcaagtgattcttctgcctcagcctcccaagtagctgggattacaggtgtccaccatcacacctggctaattgttgtatttttaatagagatgaacttttgccatgttggtcaggctgatcccaaactcctcatttsaggtgatccgcccgcctcagcctcccaaatgctgggattacaggcatgagacagcccacaaccctggcctgcaggcagtatcttttttcctctggctgctttgaaaagttttgtctttgttttgagcagtttacactgatgcatttaggtggctcctcattccatgacttgattcttttttgtccattttagaaaactgccagctttatctcttcaagtattatgtcttccccatcctctctctactctccttatgagactccaatttcacatgacttatgccttgttaaagtatcccccatgtctcttaatccatttcctgtatgttctatctgtttttctctttgtacttcaatttgtatagtttgtatcaaactatctcccaattagccgggcgtggtggtgggtgcctgtaatcccagctacttgggagcctgaggcaggagaattgcttgaacccgagaggtggaagttgtagtgagccgagatcatgccactgcactccagcctgggcaacagagtgagaccctgtctcaataaataaataaataaataaataccagttcactatttttttttatgtttgtgtctagtgtgctgttcaaattgagttcctaattccattttttttttagacttttttttttgagtctctatctgttgcccaggctggagttcagtggtgcaatctcaactcactgtagcctccacctcccaggttcaagcgattctcatgcctcagcctctcgagtaactgggattaccaccacgcctaactcatttttgtatttttagtagagatggggttctgccatgttggccaggctggtcttgaactcttggccttatgtgattggcctacctctgtctcccaaagtgctgggattataggcctaarccaccactcccagcctccttttttttttttttttttttttgagacggagtctcgctctgtcgcccaggctggagtagagtggtgcgatctcggctcactgcaacctccccctcccagttcaagtgattctcctgcctcagcctcccgagtagctaggactataggagcatgccaccatgcctggctaatttttgtaattttagtagagatggggattcaccatattggtcaggctggtcttgaacttctgacctcaggtgatctacccacctcagcctcccaaagtgctgggattacaggcgtgagtcaccacgcctagtgcatccattttttgtagttgccagttttctgatgaaattcttaattgtttctttatatccttgatatacatgtaaagaacttattttaaagtacatggtctgatgattttataatctggagatcctatgggcctttttaaaagttgtctgtgctttctcttgagcttttttcctgctgtcttatttccttgtttgcttagttgtttttaatttggcaatggaagttgtgtataaaaatcgttacaaataatttttttttttttttgagatggagtctcgctttgttgcccaagctggagtgcaatgacgtgatctcggctcactgcaacctctgcatcccagggttcaattctcctacctcagcctcccaagtagctgggattgcaggcaggtgccagcacgcctggctaatttttgtatttttagtagagatgggtttttaccatgttggtcaggctggtctcagactcctgacctcgtgatctgcccacctcagcctcccaaagtgctgggattacaggcgtgagccactgcgcccagccagaaataatttttaaaaataattttgagccccagcatgatggctcatgcttgtaatcccatcactttgggaggctgaggcgggcagattgcttgagcctaggagttcaagatcagcctgtacaacatggtgaaaccccatctctacaaaaaataaaaaattagctgtgtgtggtggtggtgtgtgcctgtagtcccagctgtttgggacgctnnnnnnnnnnnnnnnnnnnnttttgtatttttagcacaatgctgccatagccagtctgcccctacacccagcctggggccacatctcaggtctctcagtcctgaggagcccggtgccccacccctcacatcctctctccctgagtcagggcctgggtctcgtgagctgagtgactgatacttggtgtcctggatgagggcgtgatggagaggggccacagcgggtgtttcctgaccctcttccaggaaggtgctgctgccgctgcagggaggacacatacaggatgccccttcctgccccctgcctcccattgggcccacaaaagccagggcaagcctcccctccctgccagccacctggtctgcttcccagaaattctgtcttgcaggctgttgggaggatcccagtacttygtaaactaaagcaagggaggagtggccgttctctctgttcattcattcaccttttcattcattccttcttccctccattcccccatctgtccatccttccctgccctgattgctcatgccaccgccccccgcagcccctcctgacctggtcctttggtttctcttcagggatttctgtctcctcccacagggctgagaatggcagctcagggacaagtaggggctggggactgcttagtctccccagtggctctcaggggatttgagggtttgacgccagctgccaccccaggctgtgcccctcctctgctcaggaggacatacaggatgcaacacccacttaaactcgaagttgcaaagatgcaaatgagactggggtctcaggcaccagagaccacccgtgggcacgtggcttttgggattggagacctgctgccacagatctctgaagagtctggacctgctgggtctccccaagtgactctctgggggtctccatagcatgccctgctgtgtgcatgacggtcactggttgggtaggggtctctactctaaagctccctctgccggcatcccctcgaactctcccttggtgaagagagaggatgtggtttgccccagtgttttatcaaacaactctctccacttcctgttttaagaagctgggagtggaagagagcctggggctggccccagctgctgctgcgaaacaggggtcactggacgctgggaccctggccgggctggctggaggcctcaggaagaggcctgctacagtgtcatcctggccaagattcctccctgcagaggaccctggccacgctgccacagggtctgctggggccaccagaagcccatgctcctgcctccatctctcccctctgtgctcacctctcaccaggaggccctcccagagttcagtgtcctgctttttttttttttttttagatggtgtctcgttctgtcaccaggctggagtgcagtggcgcgatctcagctcactgcaacctctgcttccttggttcaaatgattctcctgcctcagcctcctgagtagctgggactacaggtgccagccaccacgcccaggtaatttttgtatttttagtagagacggggtttcaccatgttggccaggatggtctctatctcttgattcgcccgccttggcctcccaaagtgctggaattacaggagtgagtcatggcacccggcctcatctcctactctttcagcaccaggttttactcttgggattctgctacagccgcagcccctgggtgcgagttcctaagctttctgtgagtgtggacccagcaccgtgcctagtagacatacaaaaggagcatggtgacagtgaggtctgtcatctccagcataatgactgttttgatccttgtaaaaaaggtgatttttggctgggtgtggtggctcacacctgtaatcccagcactttgggaggccgatgggggtggctcacttgaggtcaggagttggagcccagcctgggcaacatggtgaaaccacgtctctactaaaaatacaaaaattagctgggcatggtaacggatgcctgtaatcccagctacttgggaggctgagacaggagaatcacttgaacccaggaggcaaaggttgcggtaagccaagattgtaccactgcactccagcctgggtgacagagcaagacttggtctcaaaaaaaaaaaaaaaagaaagaaagaaaagtttatatttttgttctaatggttatcttaatatcgtcattctataattgtatgttttatataattataatagctatataagatataatacccctagtatgttgttttttggatattctacttgctcctgatggttaatttatatgtcaacttggctaagctatggtgccccgttgtttggtcaaatacttgtcaatatcttgctgggaggttatttcatagatgtgattaacactgacagtcagttgactttaagtaaaacagattacccaccataatatgggtgggccacctccaatcagttgaaggccgtaagaacaaaaactgaggtttcccagagaagcaggaattctgcctcaagactgtaacacacaaaccctgcctgagtttctggcctgctgactgctctacagagtttaggttccagacttcgagatcaactcttacctgaatttatagcctgctggcttgccctacagattttaaacttgctagtccccacaatcatgtgagccaattcctcaataaatctctctctatgtataatctattggtttagtttctctgaaaagctttcacatccagtttcctggatgttaagaattactgaaactagctagtaacttcttttttttttttttttttttttttttgagacagagttttgctcttgttgcccaggctggaatgcaatggcacaatctcagctcaccgcaacctccacttcctgggtccaagcaattctcctccctcagcctcctgagtagctgggattacaggcatgtgccaccatgcttggctaatttttgtatttttagtagagacagggcttctccatgttggtcaggctggtcttgaactcccaacctcaggtgatcagccgccttggcctcacaaagtgctggaattacaggcatgagccaccgcacctggctcctagtaaattcttcttttccgtgatgtgtctcttacctctaataatacttttcttctttttttttttttgagacggagtctcgttctgtcgcccaggcgggagtgctgtggcgcgatctccgctcactgcaagctccgccttccgggttcacgccattctcctgcctcaacctcccgagtagctgggactacaggcgcccgccactgcgcccggctaattttttgtatttttagtagagacggggtttcaccgtggtctcgatctcctgacctcgtgatccgcccgcctcggcctcccaaagtgctgggattacaggcgtgagccaccgcgtccggccatacttttcttcttaaagtctacttcattaaaaatagttatgctgggcatggtggctcatggctgtaatctcggcactttgttggaggtcgaggtgggtggatcactgaagcccaggagttcaagaccaacctgggcaacgtggcgagaccctgcctctacaaaaaatacaaaaattagctgggtgtggctaatatacacttgtagtcccagctacttgggatgctgaggtgggagaatcgcttgagcctagaagggagagattgctgtaagccaagatcacatcactgcactccagcctgggagacagagtgaggctctatctccaaaaaaaaaaaaaaaaaaagttatacagctttcttggttagtgcatgcatgccatatttttcattattttccacctctctgtatccttatataaaaggcattagttgggttttactttattttcaattattttaatttttattgtccttttaaatgtaactaatgatttatttgggttgaaacccaccaccaatttgttttccatgcctattctatttcttcttatctcctctcacatcttgttttggatttattatttttattatttaatttcctccttctctattagtttcatagctctgcagtcttagagttattttaaaagatgacagtggattattttagagcttacaacatgcatccttcacttatcaaagtctaacatgagctagtactttttgttgttgttgagatagagagagtcttcctctgctgcccaggctggagtgcagtggagcaatcttggttcactgcaacctccacttcttgggttcaagcagttctcctgcctcagtcacctgagtagctgggaccacaggtgtgcaccactatgcccggccaatttttgtattcttttttagtagagacagggtttcaccatgttggccaggctggtcttgaactcctgaccttaagagatctgcctacctcggcgtcctaaagtgttgggattacaggcatgagccaccgcgcccagcctatgagttagtacttctatgctcttcctagtcagtacaagaaccttggaacaggaactaaatttacccccagtgacttatatgctaatatttttgtgtattttaaatatatatgtgtgcatagatgtatctgtgtgttttttgtgtttttattcttatttatgttgagagtgtagagctatgtaagagtaaagagaattgtgtaatgaagccccgagtatccattcaatttcaacaacaatctcatggccaagctaatttcatgtatactctttcctgcttccctctaccccacattatttcagtgcaaatcccagatatataactgtacccatacatatttcagtatgttttatttattttaaaccccacaatatatcattttctatactactgtaatttcataccaataacattcatttagatttacccacacgtttacctcttctgttacnnnnnnnnnnnnnnnnnnnnnnnnnnnnnnnnnnnnnnnnnnnnnnnnnnnnnnnnnnnnnnnnnnnnnnnnnnnnnnnnnnnnnnnnnnnnnnnnnnnnnnnnnnnnnnnnnnnnnnnnnnnnnnnnnnnnnnnnnnnnnnnnnnnnnnnnnnnnnnnnnnnnnnnnnnnnnnnnnnnnnnnnnnnnnnnnnnnnnnnnnnnnnnnnnnnnnnnnnnnnnnnnnnnnnnnnnnnnnnnnnnnnnnnnnnnnnnnnnnnnnnnnnnnnnnnnnnnnnnnnnnnnnnnnnnnnnnnnnnnnnnnnnnnnnnnnnnnnnnnnnnnnnnnnnnnnnnnnnnnnnnnnnnnnnnnnnnnnnnnnnnnnnnnnnnnnnnnnnnnnnnnnnnnnnnnnnnnnnnnnnnnnnnnnnnnnnnnnnnnnnnnnnnnnnnnnnnnnnnnnnnnnnnnnnnnnnnnnnnnnnnnnnnnnnnnnnnnnnnnnnnnnnnnnnnnnnnnnnnnnnnnnnnnnnnnnnnnnnnnnnnnnnnnnnnnnnnnnnnnnnnnnnnnnnnnnnnnnnnnnnnnnnnnnnnnnnnnnnnnnnnnnnnnnnnnnnnnnnnnnnnnnnnnnnnnnnnnnnnnnnnnnnnnnnnnnnnnnnnnnnnnnnnnnnnnnnnnnnnnnnnnnnnnnnnnnnnnnnnnnnnnnnnnnnnnnnnnnnnnnnnnnnnnnnnnnnnnnnnnnnnnnnnnnnnnnnnnnnnnnnnnnnnnnnnnnnnnnnnnnnnnnnnnnnnnnnnnnnnnnnnnnnnnnnnnnnnnnnnnnnnnnnnnnnnnnnnnnnnnnnnnnnnnnnnnnnnnnnnnnnnnnnnnnnnnnnnnnnnnnnnnnnnnnnnnnnnnnnnnnnnnnnnnnnnnnnnnnnnnnnnnnnnnnnnnnnnnnnnnnnnnnnnnnnnnnnnnnnnnnnnnnnnnnnnnnnnnnnnnnnnnnnnnnnnnnnnnnnnnnnnnnnnnnnnnnnnnnnnnnnnnnnnnnnnnnnnnnnnnnnnnnnnnnnnnnnnnnnnnnnnnnnnnnnnnnnnnnnnnnnnnnnnnnnnnnnnnnnnnnnnnnnnnnnnnnnnnnnnnnnnnnnnnnnnnnnnnnnnnnnnnnnnnnnnnnnnnnnnnnnnnnnnnnnnnnnnnnnnnnnnnnnnnnnnnnnnnnnnnnnnnnnnnnnnnnnnnnnnnnnnnnnnnnnnnnnnnnnnnnnnnnnnnnnnnnnnnnnnnnnnnnnnnnnnnnnnnnnnnnnnnnnnnnnnnnnnnnnnnnnnnnnnnnnnnnnnnnnnnnnnnnnnnnnnnnnnnnnnnnnnnnnnnnnnnnnnnnnnnnnnnnnnnnnnnnnnnnnnnnnnnnnnnnnnnnnnnnnnnnnnnnnnnnnnnnnnnnnnnnnnnnnnnnnnnnnnnnnnnnnnnnnnnnnnnnnnnnnnnnnnnnnnnnnnnnnnnnnnnnnnnnnnnnnnnnnnnnnnnnnnnnnnnnnnnnnnnnnnnnnnnnnnnnnnnnnnnnnnnnnnnnnnnnnnnnnnnnnnnnnnnnnnnnnnnnnnnnnnnnnnnnnnnnnnnnnnnnnnnnnnnnnnnnnnnnnnnnnnnnnnnnnnnnnnnnnnnnnnnnnnnnnnnnnnnnnnnnnnnnnnnnnnnnnnnnnnnnnnnnnnnnnnnnnnnnnnnnnnnnnnnnnnnnnnnnnnnnnnnnnnnnnnnnnnnnnnnnnnnnnnnnnnnnnnnnnnnnnnnnnnnnnnnnnnnnnnnnnnnnnnnnnnnnnnnnnnnnnnnnnnnnnnnnnnnnnnnnnnnnnnnnnnnnnnnnnnnnnnnnnnnnnnnnnnnnnnnnnnnnnnnnnnnnnnnnnnnnnnnnnnnnnnnnnnnnnnnnnnnnnnnnnnnnnnnnnnnnnnnnnnnnnnnnnnnnnnnnnnnnnnnnnnnnnnnnnnnnnnnnnnnnnnnnnnnnnnnnnnnnnnnnnnnnnnnnnnnnnnnnnnnnnnnnnnnnnnnnnnnnnnnnnnnnnnnnnnnnnnnnnnnnnnnnnnnnnnnnnnnnnnnnnnnnnnnnnnnnnnnnnnnnnnnnnnnnnnnnnnnnnnnnnnnnnnnnnnnnnnnnnnnnnnnnnnnnnnnnnnnnnnnnnnnnnnnnnnnnnnnnnnnnnnnnnnnnnnnnnnnnnnnnnnnnnnnnnnnnnnnnnnnnnnnnnnnnnnnnnnnnnnnnnnnnnnnnnnnnnnnnnnnnnnnnnnnnnnnnnnnnnnnnnnnnnnnnnnnnnnnnnnnnnnnnnnnnnnnnnnnnnnnnnnnnnnnnnnnnnnnnnnnnnnnnnnnnnnnnnnnnnnnnnnnnnnnnnnnnnnnnnnnnnnnnnnnnnnnnnnnnnnnnnnnnnnnnnnnnnnnnnnnnnnnnnnnnnnnnnn

SEQ ID NO: 97127 - DNA, 299941 bp, Homo sapiens
  misc_feature (1)...(299941): n = A,T,C or G
caacctttgtctcccgggttcaagcgattttcctgcctcaacctcccaagtagctgggattacaggcatacagcaccacgcctggataattttttgtatttagtagagacagggtttcaccatggtcaggctggtctcgaactcctgacctctggtaatccacccgcctcagcctcccaaagtgctgggattacaggcgtgacccaccatgcccagcggttttgtcttattaactaggaaggaatgctatcttccacccacatctcgctggctaggatggtgttacgtggccacccttagctttcagggaaccagagaatttttttttttttttaattgctaagcagatttctgtcctgaacaaaattggggttctgctaggatggagtaagaggagaatggatattgggttggtaactaccagtgcctgtcacataaatgaagaaaccaggcctcagagatgctaaggtcttgtccaaggtaagatatatggcaaagtcagactcagacccatgtcagtttgacatcagagtctatgttcttggccactgtgagagatgactcccttatcataatgcattgcaattgtctttggatttgttcatctcttcctccctagattgtgagctctttgggactaagaataattttttttttgtcatcttggtattccagacacttgcccataatttgttgaatgaataagtgaataaatgttagaactgcaacagtttctgcagctaaaaattctttctaggaaaatatttttatttatttattttttagacagagtctcactctgtcacccagtctggagtacagtggcatgatctcagctcactgcaacctctgtcctcctgagttcaagctattctcctgcctcagcctcctgagtaactgggattacaagtgcacggcaccacacccagctaatttttgtattttttagtagagacggggttttgccatgttggccaggctggtctcgaactcctgagctcaggtgatctgcctgcctcggcctcccaaagtgctgggattacaggcatgagccagtgaccgaaaatatttaatgtcctcttcctctgtaatgtttcctaactacctgcttctaaacaaatggctgcagatgtatataaaagaaatgatcggccgggcacggtggctcacgcctgtaatcccagcatttggggaggccgaggcgggcggatcatgaggtcaggagatcaagaccatcctggctaacatggtgaaaccctgtctctactaaaaatacaaaaaattagccgggtgtggtggtagacgcctgtagtcccagctactcgggaggctgaggcaggagaacggcgtgaacccgagaggcggagcttgcagtcagccaagattgcaccactgcactccagcctgcgcaacggagcaagactctgtctcaaaaaaaaaaaaaaaagaaaaaaaaaagaaaagaaatgatctggtctttgtgctgccatggatgcattttgcctcttctatgatttgtaggcgtttaactctcctctttctccttaaatacataatgcttgtttccagggcagggtccaatttttctttgttctgcctggtcattcagacatttctatactgcattgctctgtttctaagggacttgagcgttacctgaataacaaaaatttgagtcactggcagccccgatctcaaatctcatttcttgctgggtcaggggacagcccaggaagatctaacatcattaagatttcagtagtttggcaaggcaagcagggaagggagaattctctttttttggagagagagtctcactctgtagcccaggctggaatgcagtggcgcgatatcggctcactgcaacctctgccttccagattcaagcaattctactggctcagcctcttgagtagctgggattacaggcagctgtcaccacacctggctaaattttttgtatttttagtagaaatggggtttcaccattttgcccagtctggtcttgaactcctgacctcaagtgatctgcccgcttcggcctcctaaagtgctgggattacaggtgtgagccaccatgcccagttgggaagggagaattcttatgctaccagttcaataagtaaaaatttcagaagaccaactgctgatgtccctaggttaaagaaaaaaaaaaaaaagacaaaacccgctgttgtttcataggccaccaggaaatatcctggttatccctcaaagccatactgcttggttgaacaggatcaggttgtggggtactgccaagtggaaaccgctgacttaggttggggctaattcagcacaagaacaagcttgtaggcacttggacttccaccttggtggtccaaataataatactaagagatgtgtcagggctgggcgtggtggctcacgcctgtaatcccagcactttgggaggctgaggcgggaggatcagttgaggccaagagtttgagaccagcctgaccaacatggtgaaaccctgtctctgctaaaaatacacaaagttagctgggcatggtggtgcgtgactctaatcccagctacttggcaggctgaggcaggagaatcgcttgaatctgggaggcgggggttgcagtgagctgagattgggccactgcactccagcctgggagacagtgagatcctgtctcaaaaaaaagaagaagaagaagaagaaagaagaagaaagaagaaagaagaaagaagaaagaagaaagaagaagaagaagaagaagttgtttaaggcttctctttccaaggcccctggttaagcttactgtatcactaaccaaattagttgatgaataattaccacctattaagcagttactatgttaggcactgtgctaagtgtttacttttgtcccatttaatccttagaacaacactgtgactattattgttatcctacaaatgaggaatggaaggcttagtgaaacaaagtaatttgcccagcatagtggttgcaccaaggggttactggggtgctttgcttgccgcatgtgaatctctagcagccccactcaagtcaccttacataattaaaaaaaacccaataataatgatgatgatattctttgatcttgacaatgaatgttttttcactctcatttaaaatgtgaataaaggtcaggcctggtggttcatgcctgtaatcccagtacttcgggaggccaaagggggggaatcacttgaggtcaggagttcgagaccagcctggccaacatggtgaaaccctgtctctactaaaaatacaaaaaattagccgggcgtggtggtgggcgcctgtaatcacagctccttgggaagttgaggcacaagaattgcttgaacccaggaggtggaggttgcagtgagccgagatcacaccactgcactccagtctgggtgacagagcgagactccatctgaaaaaaaaaaagtgaataaagtgataatggtactactaataagctattattagttagctataagtgttagctgtaacacttatggagcgcttatcctaaatcattccgttcaaagttctaaacgtgataacattaaattcttacaataatcttttcaggaaggtattattgttatcctaatttgcagatgaagaaactgagacacagagggggtaagtagctgtcacaaggcatcatgacttgcaggtggcagagctaaaactctgctatttttactgatttataacacagcctaagtaatacaaacaatatgctcaatacaacaactcaccttcaaggcaagtcctcccgacttcccttccaaccagtctgcaatccccaaacaccttttatatggaagttcttagtcaccactggtcccagattacgtgggcaggaggtgggaagcctgcgttctcatctgggttggtctgactctgaagcagggatctttactgttgtactgttccagccccagccaggttaaacccaggttcaaaggccaaatcacacactggttggaaatgaccttggaaatcatctaacccagcgtttctcaacctccgcactattgacatttggggttggataactctcctggggggaccgtcctgtgcatgataggatgtcaagcaacattcctggcttctacacactagatgccagcagcacctccccactgtaacaatcaaaaatgccttcagtcggccaggcgcggcagctaactcctgtaatctcagcactttgggaggccgaggcaggcggatcacctgaagtcaggagttcgagaccagcctggccaacatggtgaaaccccatctctactaaaaatacaaaaattagttggtggcgcacacctgtagtcccagctactggggaggctgaggcaggagaatcgcttgaacccaggaggcagaggttgcagtcagccgagatcgcgccactgcacttaagcctgggcgacagagcgagactctgtctcaaaaaaaaaaaaaatgccttcagtcactgacaaatgtgggagtggaggtggtggaatggcaaaatttctccttggttgaaagccactgatccaaaccatctcattttacaaatgatggagctgaggtccaaagagatgaagtaacttgtttaagctagttagcaaagccaagattagaatccaggttattcacgcaatatccttttatttctataacgtacagggcacgatatggaactcagaggaagtcactgcagtccttgtcctcacagtctggtaggggagagaatctattgcacagatatctctatctccacgaagttggtaagtcataaagtgctcctcaggcagcaaggtacgaagaaagagaatatgttctcgtgttctgaattccggatctgccacttttttgctgcaggatttaactaaggttcagtttcatcatcaatgaaatggagatcatggtatctacttatatcaccagtttgaaacgggtctgtggatgcattgtgcaaactctaaagctcttacaaacatcgggtattattactaacttcattaggaatgtgagttatattagagtaaaagctctcagaactggggtgaaccatagaggggtggcttcattcctcgaccttccaatttgagacattttttcttctgcgggaggggaagcaggcaaatagcctgcctctcacagagtgcccattccctctccgggaaccaaggtgctcaggcgagtaaactcaggacttaactctgtacaactagtaccgcaagcaggagccactccctggccttcgggtctctcaagccccgcctgctccaggatacggccccgcccagaaaggagacagaccccgccccccccgcgctgccccgcactccagccgcgctgtgcctccaggacaatcccaggcccgtgccggagattcccgagcttccccgatcgcttcccggcctccctcgggcagccagcgaggagactacggagattgccgagggggcctggccccgccccccccgcgggccgccaccgcccccctcgccgtagcctcccgcgcgggctggagttctacatcccggtccctccctccctccctctttctctctccccgccttcccggtgctgccacagtggcgggtcggaggatcccggccagtcagctcgttcctgcctcgcgcccctcctccccccaaaataaacagccctccccacgcctcgggagcccggaccgcccccttcctccctcggccggcgtgctgtgagggagagtgtgagccagcgcggccggtgggcgagctccgggagtgcgagaggcggggcggcgcggcgggccgggccgggtttcgcgtgtgcgtgcgggggcgcgagcgagtgctcatcacgacccgccagtggccccgcgccgacaacccggcgggcgggcgggcggggagcaagcggtcaggcaaggagcggcggccgcgaggcgcggaggggcgcggagtccgctcgcgcgcacgcacgcacgcacgcgggggcgggggcaggcgcgcgcccgcctgtcgcgacagtcggggccgaggcccagggggaggtggcctgtcgcgggtcgcccggctcccggaggcgaggggggcgcgggcggatggcggagggcgcccagccgcatcagccgcctcagctcgggcccggcgccgccgcccggggcatgaagcgggagtcggagctggagctgccggtgcccggagcgggaggagacggagccgatcccggcctgagcaagcggccgcgcactgaggaggcggcggccgacggtggcggcgggatgcaggtgaccgcgcgggacggggcgcccagttattgcgggggtgggcgtgagggtcgacaccgggctccccggcttggagagagggagggcctccgggagtcctgggttggaggtgggatggggggccattcggggcctggttggaaggtggggcgagctcgggctaggaacgaaggttgcaggactgaacctggtgtgcccgagagggtcctgattcctgaggggccaggaggcacgacgagtggataggttttggggggaaatcgaacaaggttgagatggattccattttttcaaatccttccttagtgccttggggtggagtggaagccgggaaatcctggcttctctggactgagtcgaggaaaaggagatctggtgggaaacctcccgagaagagggagtaccttttggcagccctgggcacacgctgggatggggaagagaagtggcatttcaatgagaggagtgaaaagaaaactcctcgagagagccccgaggggatgtggctgagattgtgggttaaatcacacagagtgtgagaagtacaaggagtttggtaatgttatggggacacggtggtgctcagtctcatttactttgtggagcatactaatgagtctgaagggagacactagacatgtccctcctgttctttgccaattgcattctacatcaccaggacacaaaatagctctttaatgtcccgggctataaaaaaaatttttttatagggctattagaagactggattctcaattctggattgaaagataaacgtggttaatttgggtagggaatgggaaaggtattgatgtcagctgacttcatagttttgaagaagaccttgaaacctttggaggttttacgatttggtctttgcccagaaaatactgctatgacatgatgagtctcacctaccaacagttgtgcagacttgtgcctaattctctcggagtcataggatgttagagggatgctaggaggactagacatcatcttttccaggggttcttaacctgggaagacttggaagattcttactcatagtaggtgatgtgcactttttggtggaggagagtcaatagttttcatctttgttttttttggaggagattcaagtcccagcttgttttaaccaccttattttatagatggggaatcararrtsswgagaagatggtgacttgggtaaggccacccagttagctaatagtaaaactagaactagaagcctggtcttctaattcctattcctgtgctgtctccattacaccactcttggaaatctctgcagtgctaaaagacttcctgtgctctgctccctgcttttcaagcctctgcctgacttcctgtgttagggacagagctgtacttaagcctagcrtgtttgttgtatgcttcttggtctcctttgcagagtttaccctgttacttctgttgatttargtaaagtgaccctcttggtgtttatttttgaattcttttgttttgtttgcctgcttttattttccattagaactctgtcaggcagagggattgtgagaagtaaaagctcagggccatggcaaaaaagacaggaatgtgggagacttcaggtgaggtgagctaatattggatgataaggagggaagactggatgtaggtgctggtgagcaggttctacttggtgtgtgtgtgtgtgtgtgtgtgtgtrtgkgtatgtattcatttatcatttctgtcaatcctagttaatagtgagacccccgtccctttccctcatttactcctggggcctattatctgttggttgccttcaaactggctaaagatagtgatatttggaaatggagcagtgtgtagggacttcgcaggggtgtgcagaggaaagagtggttaggtccttgggggtacaaattggcagctgagagttatccctccgagaatccttttttcacttcttgtattttattttctttctatacattctcttttttttttttttgcccaggctggagtgcaatggcacgatctcggctcactgcaacctccacctccacctccacctctgggttcaagggattctcctgcctcagcttcctgagtagatgggattacaggcgtctgccaccatgcccagctaatttttcttatttttagtagagagggggtttcaccaggttggccaggctggtctcgaactcctgacctcaggtgattcacccacctcagcctcccaaaatgttgggattacaggtgtgagccaccacacccggccttctatacattcccattgttgtaggtccattcccctatgtcatacaggtattcaaatcattgatttaggccctgccttcaactagctgaatggttctgcagaaatctttcattttggggcctctgttttccttagttgtaaaataaagtatgtgtacaagatgatttcccttgtaatccacccacctcggcctcccaaagtgctgggattacaggtgtgaggcaccgcacccggccaagttctaagttaccttctaaaagttataagtccagttcactgtccttaaggtgcatgcaatctatgtggggagacaaatgggcgaaaagttttttttaaagaagcgtgcatttttaaagaagtgtgagagtattacatgaatatacttaatgtttattcattgaactaacatttattaagcagctgctacatcccaggcactgttttaaccctaagagatataatagtgaacaacaacaacaaaaaacccttgctgtcatggaactaatattgaatggaaagagacatctaataaatcaacaactataattgtgtggtgataagggctaaaaagaaaaagcagggaaagggagagatggaaagggagagaatgaagatggttacggaagggctttaagatagatggcctatgagtgaagtgaggtaatgggccattcagatgctttcggaaagagggttcaggtagaggaggtgagggtgcacaggcattgagaaagactgcttggtttgtttggaaacaggagaccaatgtattaatagctggagcagagagagcaagggcaggtagtcttaggagatggtatcagtggtttagaaatatctataggccctatgtaaatacacactttaaaaatcttagccgggcgcagtggctcacgcctgtaatcccagcactttgggagactgaggcgggtggatcgcctgagatcaggagttcgagaccagcctggccaacatagtgaaacccgtctctactaaaaatacaaaaaattagccaggcgtggtggcaggcgcctgtaatcccagctactagggaggctgaggcaggagaatcacttgaactcgggaggcggaggttgcagttagctgaggttgcgccattgcactccaggctgggcaacaagagcgaaaatctgtctcaaaaaaataaaaaaaatcttatcgtagccagtgttttgggtatgtgggtttgtcttaaagtacacgtcttttttttctttttttttgagatggagtctcactgttgcccaggctggagtgcagtggcttgatctcagctcactgcaacctctgcctcctgggttcaagcaattcttatgcctcagcctcctgagtagctgggattacaggcatgtgccaccacaccccgctaatttttgtatttatagtagagatgaggtttcaccatgttggccaggctggtctcgaactcctgacctcaggtgatcgcctgcgttggcctcccaaagtgctgagattacaggcatgagccactgcacctggcctgttttcttaacacgttttctaactccttttgtgaagccttccctgacagcttagttcacaccattccgatcctactcttgcctcttggtatattgatgcttaattgtgtgtcatcttttattgtcccttaattgttttattattcttgtttcactgctaagattgtaagcttctaaaagataggaactatatttcctttgtatttatccttcgtaatacctaacagttttgggtacttggtaagtgctcaatgcctgttaaattgaaattgaaatttaccttttacagatagttaaggattaagaaaaattgtgaaattccagagtgagggtatcatcacagaattttccaggcactttgaatgtcaaaggattaaccgctttttatagaataagttcatttactggggtcattcccaaggctgcttactaaatggagctgtagtgctaagcgttagattccaaagttgaatcttgttaagttgtaccactaagcttttggagtaaatcatcacttaccaaaatggagtttaggaaacgccagagagtctgtgatgcttttgttataatccttaggctcagaaggaaccctaggagaaagagaggaagggtcggtgctttcaaaggcagtatacagaaacttgatgtaggtggaagaggagtcagtgcagccctggaaagagtacagaaatagagaaacgtgaaccagagagtaggagggaagtgacaaactcaactggaaagctgatgtacagtttgagaaatgtagttaaagagagtacttggaaatactgtactcaaagtttgtgggaagttaaatgagttaaatatagggctattagaggttcatttcactttaagtttaatatgtatgaaatttacgctctatacaatgtagtggggaatgaattcttttggtcagcttttctagtgaacaatttgattcataaaaattttatttttgtgcagttttctaagagtttagctgctgtataaggtaagatgtaccttattacttatagctttcagcagaattctttgtgtcagtgaaatgttgatatggtataattattatatggccaagtaaccgcttctcaccatagagtcataaatccagtttagccaagtgggttcagcagttattcctattagcagctgattctagtagtaagatgactttctttcaggtttcagggaaggggttccagatagcctgaagttgctttgtagatgctgtgtttattgaagtagtttatcttcccatttgcttatttatgggcttatttcctcataggtggatgtctctttgtgccctcatttggtatttggtgctgaaactaagcatggtgctaccattcaagaagagttataaaaatattgtgttttttttttcttgcaagtaatttcatgaacaatatttcactgaaattactgaatttttcatctctccctgtcccagtgtccttgggctgccacagcaaaataccatagactgggtggcttaaacaacagacatttatttctcacagttttggaggctgggaagtccaagatgaaggtgccagcagatttcatgtctggtgagggcccaccttctggcttgtggatagctgtcttcttgctgtgtgttcacatggcctttcctttgtctgtgccctgggggagagagagtcagtggtctcttcctcttcttataagggcactcatttatcatgtagttcccaccctcatgacccaatctgaagctaattctagaggtcctacctccaaataccattacactggggttagggcttcaacatacgaaatttagagggacacagacattaagcctgtaacactaccagagtggtaaatattgtagatggagaaactgaggaacagtcatgtaaaacttgttgcttttttccccatgtcttacaaggaagtctgcagatgtaaaactggaaatgtatttgagaaggagaaagtcagatctgatttcaaagtagaattattcttcagggtgactcaagagattagcttgagttgartttgtctcccaactccctcccattttctagctactctgtcatttttttttcactatcacgctgacatgtgaacacaacagaagctaactagaaatttaactttcattttgctgtaaagcagactggtgcagacaggcctcaagtttacaggactgctgagaaagaaattgagttatgctactttgtataaacaaraatgttgctagtgaatctctagtttaacatctctcaggccttcagtttgatgtcaggctttaataatttgtagaaaaagacagtcattttagtaagcagatttctttgaatttttgttgatatacatttgtaaagcatagtaaacatctttattctggggcaaatgtgcacttccttcaaaggcaggagggaagaaccacagacatgattggaaggaaatggcagtaattggagcatgagcagacagatggagtgagggatggtgagtacatttggtgttttaggtggcccctaggagtattgagtttcttcttattctcctctacaaccccaatacaagcaggcagcttacatggctaaggtttcattatctaatccatcacagatcagcttgaataaacccattggctgatgctgatctagttaggaaagtagcaaagctgcttgagccaggattgggacaaatcggatcagaactgccatgtgaatcctggacgcatttctgtaatttgggtgggcaaagtagtttgggaagtcatttactcaagagaatgagcagtcagccatgagttttttcaaacattgtcttagggactctgaggggaaagtgtgtggaggatttgagatatttctctggaggatagccagattgctttgattatttgagtctgaacattttttggtcactaatgctcagaagtgacctttttttttttagtagcatttggagattccagttgtgatcgtttgtcacttttgtgagtgatcccttaatctgagaccgtaggatatatgtcccttctctgtttttattttatttttattttttatttttattatacttcaagttctagggtacgtgtgcacaacgtgcgggtttgttatgtatgtatacatgtgccatgttggtgtggctgcacccattaactcgtcatttacatcaggtgtatttcctaatgttatccctcccccctccccccaccccaggacaggccccattgtgtgatgttccccaccctgtgtccaagtgttctcattgtttaattctcacctatgagtgagaacatgcagtgtttggttttctgtccttgtgatagtttgctcagaatgatggtttccagcttcatccatgttcctacaaaggacgtgaactcatccttttttagggctgcatggtattccatggtgtatatgtgccacattttcttaatccaatttatcattgatgggcatttgggttggttccaagtctttgctattgtgaatagtgctgcagtaaacatacgtgtgcatgtgtctttatagcagcatgatttataatcctttggatatatacccagtaatgggatggctgcgtcaaatggtatttctaattctagatccttgaggaatcgccacactgtcttccacaatggttgaactagtttacagtcccaccaacagtgtaaaagtgttcctatttctccacatcctctccagcacctgttgtttcctgactttttaatgatcgccattctaactgttgtgagatggtatctcattgtggttttgatttgcatttctctgatgaccagtgatgatgagcattttttcatgtgtctgttggctgcgtaaatttcttttgagaagtgtctgttcatatcctttgcccactttttggtgggattgtttgattttttcttgtaaatttgtttgagttcattgtagattctggatattagccctttgtcagataggtagattgtaaaaattttctcccattctgtaggttgcctgttcactctgatggtggtttcttttgctgtgcagaagctctttagtttaattagatcccatttgtcaattttggcttttgttgccattgcttttggtgttttagtcatgaagtccttgcccatgcctatgtcctgaatggtattgcctaggttttcttctagggtttttatgcttttaggtctaacatttaaatctttaatccgtcttgaattaatttttgtataaggtgtaaggaagggatccagtttcagctttctgcatatggctagccagttttcccagcaccgtttattagatagggaatcctttccccatttcttgttttttgtcaggtttgtcaaagatcaggtggttgtagatgtgtggtattatttctgagggctctgttctgttccattggtctatatctctgtcttggtaccagtaccatgctgttttggttactatagccttgtagtataatttgaagtcaggtagcgtgatgcccccagctttgttcttttggcttaggattgtcttggcaatgtgggctcttttttggttctatatgaacttcaaagtagttttttccaattctgtgaagaaagtcattggtagcttgatggggatggcattgaatctatagtttaccttgggcagtatggccattttcatgatattgattcttcctatccatgagtcccttctctgtttttaaaggggagatatttttattactaaccttaatatgtaatcatatttgttatccatatatacttgaaatatggtgtagtaaataaacaccatttagagcttctcattttgggatttgaatcctggcttctccatttaccaaatgaatgagctattcaacatctctgagctcctgctcacacatctgtgaactgggagaattaatgtatactcttataaaccactgtaatgagaactgagattctttaaggtgcctatcaaggaacccagcactacatgtttatttcttgctttccttatatcctgctatacagcactcactaacttcctgcttactgtttaatctgcatggagtggttaatgtgcttctgattgattaagtgccagagttgggaactactagagatgagcagtgtgttaaaggggaaacctcatttgctcattatccagggtggaggagtggaatgaactgggtcattgtggtctctcttgtcagaggaaggggagacaattctttgctaaggagtgaaaggactgctgcagtatcacagtgtctgcaggggggatgtggatttcttagaacccgtgggatctctgttgggagggtgggtgacagattcactggctgttttagtggtacatggaaggcaggaacagtaaaaatgtcgtgtttcaaattttataagttttgttacgtatgttggttcaaaagtggcactttttgttctcattttgtctatggaaattgagctgggatgcctttgtgttgtctcttgtggtcccttttcagtctcttcaaacccgctctccagactgctaacacagtgatctatctaaaagagccaatctggccaggtgcggtggctcatgcctgtaatcccagcactttgggaggcygaggcgggcagatgacttgaggtcagaagttcgagaccagcctggccaacatgatgaaaccctgtttctactaaaaatacaaaaattagctgggcgtggtggcgcatgcctgtaatcccagctacttgggaggctgaggcaggagaattgtttgaacccaggaggtggaggttgcaatgaggagagatcgagccactgcacttcagcctggatgacagagtgagactctgtctcaaaaataaaacaaaagagtcaatttgttactccacgcttaaaatcttttgagagcttgtgttttttctcaggattgtctgttctcttgtttggcctgacttctgcgtaactttcaagctccgtctctttccacattccycctccaagtccatgtccagtggcttatagttttcttagcatgtggtgccacccagctaatgaatacctctgtgcttttgttcctttcccttctacccaaagttcctgcttcatctcttctacccccacatttgtaaggctcaatctttaataatgagtttggatattgattcctcctggatgccttttgtgactattcccatgtctcccacactcctgctgtcttccaagacatcatgtctatagctctgttaaaggactttttagattaatacttgattgaatgtctgccccaccacgcttacccagactgtgagatccttaggaatctgtaggattaagcaccatgcctgggcccaagtagtcaagaaactgtccatttttgttaaattgaactttgtcttcctgcttctcagttggggcctgcagatggctttaattgtttatccagattttccctggggggtctggcccttggtctgctttctatcccctgtgaagactgcatgttgtgtgatatgtgaatgttaacctgatcttttcattgatatcagggttaaaggtgagagaggggtctctgaaaacagaagctggggtagaatttaactgcagaatgtgttgggtaggcatagcaacctgatatttagtttcctgtgttcagatattaattgagtgcacgtgtgtatatgtaaaaagctcctttgtgatagtgtggttaaggagaaaagaggaaccacacaagtgagagaggcaattagagccaacctgttccagttcgctggagcaggctgttgatttacctttttacagtgctgctgcaggattctggagtgtagcagttcgcatgtattaccaccatttggggtgagaactatttgatcagctagggaccttaacctttctcttctcaaccagtgaatttcatcggatactatagctttattttttattttttattttttttgagaccgagtttttgctcttcttgcccaggctggagtgccatggcatgatctcggctcactgcaacctccgcctcccgggttcaaacaattctcctacctcagcctcccgagtagctgggatttacaggcacccaccaccaagcctagctaatttttgtatttttagtagagacagggtttcaccatgttggccaggctggtctcgaactcctgacatcatgatccacccgcctcggcttgcaaagtgctgggattacaggcatgagccacgtgcccggcactgtarcatgtttttatggatctggggaaaataccaagcggagacacttcacaatacatggtatttttcacatcactcatattggatatgtttgaaaataaggaagtctgatagtgttcctttaaatctcagccttggcgatagattcatagaagtattttataagaattctctctggctgttgttctcccctccgacttcactttcagcttctggtttggggtcctgtataatccttgcctgttccagccagtttagtagggacctctttagctgcaaatgattgtacttcatagtgcctctggccttttctattctaaatgaataaagagaattctgagaagggaatgagagagagcagcctgtaatatatcacttccttctgacatgtcctgcacttacgtggcatctagaaatttctgccaaaaattcaaggcacaggacacatgataaataccacttatgaagtagatgacattcttgaattgtcaaatgatggtgatggaataactgcttaaaaacctgttttcccaagggtggaaaacagcctttgaggtttagacttccacatgggtgtgttcagccataagacgtgggttttcttagggacttaggtccccaggtaacaccttggtgtgtgggatttttcccatgtataggctggttccttggtttctccgttgttgaagaagagagattttgcactgggtattggatattttattccaggcatgtggtttttgaggaggcatattgttgatgtattttttttttctggctgcattgatttttgtcagattctaactggaaataccacaagcaaagcatgatttatcatgagggatgggtggtgtggccgtgggactctcctagctctggggattggggtggaggcagaagctatgtgagtaaaactagaggaactacagacagggcctggggagactgggggtgtctgaatgtggcctgcagcagttgcttgagttggaatacttttgggcagaggctcatagaartttctttcaattgcttttttttttcttttaagaagctttttcccatacaaattggaattgtttgaaggagtgggccttaattgttgccagccagagtgattttcaaagcagatctatatggatttcacttaggggttactttcagggggtatgtggcttgttctgagacaggaggacgttggttccattttcctggaagttgttgggactcctggatggccctgctctatttgtcttgggccattaggcaagtggaaaagcagctacatagttagccctgttgcatggagtttagtttcataattcatcctctcagggatttttatacagtcacacttacagcctaaagtttgttttctccctttttctttcttttccttcttcagttcagtggtccacaaaaattcttgggagggtaagtaataatttcgggtaaaaggcaggaattgtagatctttttttagccccctgccccgattaaatttctccatattcagcttctccttcatctgcaaaagcatctgcaaatgaggtcgctatcccctaatcagactggcttgtcccctaattagtctgaatatgtggctttgacagctttcacctgctgtttcttagtttctaggggataagataggattgtgtgatttcaaagtgaaaactggcaaaattgaaagatgttttgtggtggctcccaacatccacaaagcttaactcattggtttgcttctcatatacaagcttccaggaacatggttactgttagtggctggcacagtgggtttgaagactttgttggaacttcaggaagtttcccctttggcaaagcttacagggagttggtagtacttgtcctgaaagtctgaccctggtcttatgctatgcacaccttgtttaaaagaatgcagagtactgctattcagctattgcttaagcagtccgtttcatatatgtctgcattagttacatacttacataagattttactatgttttgtgttatatttgaactagaagtcatagtttcatacatgactcttattaagctgataataaattggcaaattttgatatcatccaagactttgaggtaatgctggtcatactcaaaaggtctgtatttgggtttagaaactaatttttctgttagctagcgcctctccattcccaggtgctgttcattactcattatagacatcttctgtccctctgctttgttaaaagtctttagctgcttgtcatgatactgaatagatctttttgcagcagcattttagctctgagctggctgtgttttacagtgttggagatcagttggttamctttggcatttcctaccttcatacgtaagcattaaagtgtgttaagtgcatgtagtagcccttcagagaggcgcttatcagggacttctagtgatttttgtcagctgtataaaaatgctatgattaatagataacctgtatctgtgtgtgcatgcgcaattttcttttatgcttactctgcgtttctttctctaggagtggtgtgaaataagtgttactctgtaggctttgctttttttcaataatgagaagcttattttaagaatcccttatttgactttcttgagtttggtgtaggtatcatttaccccttttggattttagctttactatgggttattttttgcagtgttagaagcaagtagtaaatactttggtatccccgagcttaaagaaacctaaaaattttgactcattcagcattctgttttaagttaggaaattatttaattctagtatcccaagctgtattgtattgattgctctttaagaaatgataacaggtggccgggcgcggtggctcacgcttgtaatcccagcactttgggaggctgaggcgggcggatcacgaggtcaggagatcgagaccacggtgaaaccccgtctctactaaaaatacaaaaaattagctgggcgtggtggcgggtgcctgtagtcccagctactcggagaggctgaggcaggagaatggcgtgaacccaggaggcggagcttgcagtgagccgcgattgcgccactgcactccagcctgggcgacagagtgagactctgtctcaataaaaaaaaaaaaaagaaatgataataggtatcatcctgcccatgccccagccccccaccaaaaaaagttaaataactttggacattagaattaaacacattaaaaaaaaaacctatcacactacacttttcataagcagacgttgtgatgctgaactattgtgtagcgttttccaaaccaggatttacgcccagattccctaccggtaagttaattcctaactctaaattcataaatacatatgtaatgaaatgtctccttttcatttctgcttcctatgtgtccctatcccctttaccaaacaagtaaccactgttactaatttgtctgttatcccccctcctttctttttgacacaaatattagcatactctctgtattttttgctccttgcttttctccatttcctatatcagaggctactttttcaaatgtaaaaaggtctattaaagttttcattagtggtctctctctctctctctctctctgtgtgtgtgtgtgtgtgtgtgtttgtgtgatgcttagtgaaggttttaccactctgagattataaaaaaatagaatggccttgcagacagacaaaccttaggtggtgtaccagcatttccacttcacagctgtgggatcttggttaagtgacttaacttatctaagcctcagctttctttgtaaaatgtgttataggattagtgtaagaattaaaaagcgatactgtatgtaatgtgcttagttcagggcctgacacgtagtaggtattctattatgtaatagccatttttattattattactcagtcctattttcttattcttgtccccaagtgctttttgaattctttcttaaaggcaggaacaatctttttcttttagagggtctcactctgtcacccaggctggagtgcagtggcgaaatcatagctcactgcaaccttgaactcctgggctcaagcagtcctctgcttcagcctcccaagtaggtgagaccataggcatgtgccaccatgcccagctaaggaaaaatctgttaacttttgtagccttgtgcccaggatataatataataagaactgagtagtccgggctcagtggctcacacctgtaatcccagcattttgggaagccgaggcgggcgaatcacgaggtcaggagtttgagatcagcctggccaacaggttgaaaccccatctctactaaaaataaaaaaaatttgctgggcgtagtggcagacacctgtaatcccagctacttgggtggttgaggtaggagaatcgcttgaatttgggaggcggaggttgcagtgagccgagatcatgccactgcactccagcccgggtgacagagtgagactctgtctcaaaaaaacaaacaaaaaaaagaactgataaatgtttgttgaaaaagatatattagcccttatacaatctatttttttaaatcttaataatttgtgttgctttttctatagtcaccctccagatttgaagcatggtgactaaaattgctcgtaatactcaacaattacatttatgttattattatttttaagagatattcttagtcactcaggctggagtgcatcactcaggctggagtgcagtggtgggatcatagctcactgcagccttgaactcctcaagcgattctgccacctcagccttccaagcagctgcacccagcttccgtgttatgttttacagtttataaaatgctttcgtgcaggcccttatttattctcttcaacaaccctgaaagataggtgatgattcttcccatgtttcagctgaaaatatacctctctaagcctcatgactaggaagtggcaaagctgatgcttttacccagatcttgtggctctttatccagtgccttttcatggcccttaagactgaaagggtatgactgatgaggaatggagcaaaaggaatttcattggtttggcatgccgtatatttaatattgaaaacattttacctgttacctgacagctgattcatgtagaactgggatgacagttgtggtatgcatgatagtttgtcgttgttttttggctttttttcatctcaaagttattccatctctaatttagatcaacaacagatcaatcagtggattgataatggtgggtagtataaaatcatcagagctgaaggcatctagaaattatctgtaccagccctctgctttagtcatggaaaatagtcagtatactcatttttatagacagtgtatctcaggctcagagagagaatgtgacaacaaacaataaactcagactttgtctttaaggctcagtagaatctttcatttcttagtctttttatttcttggtgtgatttttttctgacagtttcttgtatggagtattttcttcttccttttacattttcttaatgcatatatattcacatggttaatgattcaaaatatgcaaaatgtagaagagtcaaaaatctctccctctcctagctgcctattttatctttttggaagtaactagtattgttagttatctgggtgtccttctagagacagtgcctacgtaatatttcttttaaaaactccattgacagtatgcgtactattctgcactttgctttgcttttctatttggaaattatttcgtatcagtttatatatgtatatatatttttttctatttattagctttctggacttaagattctggtctactgagagaaccatgtccaaatgtcccttgtaaagatgactgattagtacaggacctcaaataatatgattctgtgttttaatggaatcatgaaatcccaggattggagacctaatctacatctcttgttttttcacgtgaataccctgcagatacctgatgttgctaccttttagagatgtctgagtgaaagataggtatcctcgtctctccatgtgccccagtcagctgcccctggtcttttttgcactggtggggcacattgtgggtcagctatcgtatatgtcattgagttagtaattatactcaggatctgccatgagtcattgcacatggaatctaactgcagtgtgagttttattcatgatgacatcttgtataccagatgtttcccagatgcctaggtttatcctgattgagtgtcactgctgtcaggatgctgttcagtgaactaagttttgtgttgaattgtgagaaaggaaggtttagtttctaataggtgttccatctcagcagccataattgccactggctacccttaacccctctgtctgtggaaagccccaggattgagtgaatgctcttcttccctagggtatggcctctccgtaactgagacttgatgggaagtaagtagatttggctcaacaaatagagaatataaacacacgtgtgtgtgtgtgtgtgtgtgtgtgtgtgtgtgtgtgtgtgtgtactgaacagtaattggattctgattcagatgtggagttaatgatatcaaacttaggcttgactctagcacagttaatctttatagacttccacatttaaagatatgaaataaaatgtgcctttcggagttggcttttgcaatagccctttttctccgtgagaatattatagaagaggtagtattctagctgtttagagaatgagaatgaggccagtggggttgtgtctcactctctaggtgaatgtygacctctactcagttctaatctcaccgtgcagtctttgtggtcccaaggctctgcagtaggtgaattaggcccgcgcagtctctgtggcccgagtcacagaggaaggtgttcctttcccaagtagtgaatggaagccggcagggcaccagwtgctgtgttgtttcccctgttgctttttccttcacacccggtgtaaagtttccaggcatttgtgcaacctgatagcagaaagcgcctgtcctagcagtcgagagatgggttggcaggggctcaggttactccatgtccctgataagagccatcgatctgggctggtggctgctgataggtgggaactatactgcctgcattctacccagcaggaatgatgtgggtctcagtagtgtttcaggactccgagaaggtacccaggcaatttagaggtctggccagcatctctagggcagcagcacacactaagatgtagattttaccttagaagagatgggttttaggaaatggtggcacacaggagcggaagaagtaccagcataggaaaggtgaagtgccaacccgaggagtggaaatggtattttcttattccacctggtaacctaaaactcagttgcgcagtgacttaaatttgcagaggatatgtacatagataattttaatacactgcttggatggaaatagtcacagaatatatgtgaaagtgtagtggcaggtggctctgtggtaatagatactctgtgaatacctctgtctgagcagttatcacactgtattaaaatatttggttaagagggccctttctgtctgggcacagtggctcatgcctgtaatcccagcactttgggaggccaaggcgggtgggtcacttgagcccaggaatttgagactagcctgggcaacatggtgaaaccccgcctttacaaaaaaacaaaaaacaaaaaaaacgaaacttagatgggcatggtggtgtgtgcctgtagtcccagctactcggtaggctgaggtgggaggacctcttgagcccaggaggcagatgctgcagtgagccatgattgcaccactgtactccaggctgggcaacagagcgaaaccctgtctcaaaaaaaaggaaggccctttctggtaccagaaattctgtctctaatcttacttagctgtgtgtcctttaggcaagttacttagcccctctgtgcttcagttttttatttgtaaaatggagataataaatgaggcttgtactaaatgagtcattacagttttttgtgttatctgttgttatggtggttgttatagcacaaagcacgggcgccagagaccatggcaaacacatgatgactggagggctgcagagttcagtatttattgtgttcactgaaagacttctagtattaactatgctgggtaccatacagaagcaaatgcatgagatattaactgtgtgactgtaaaatatatgacgagagtcagttttttttgaagctgtgtagaaagaatattgatgtgagaagtttcagtatcctatggcagtttcagagaaggaatcttccttctttcctttgggaggcccttcagctttcttggtgttttgaagatagattgtatattttactttaaggtaggacaatacttaactatttcagacaggtatgaatctttcctttttttttcttttttctttgagacagtgtctcattctgtggcccaggctggagtgcagtggtgcaatctcactgcaacctccccctcccaggttcaagtgattcttatgcctcagcctcccgagtagctgggattgcagttgtgtgccaccacgcccagttaattttttctgtttttagtagaggtggggtttcactgtgttggccaggctggtcttaaactcctggcctcaagtgatccacctacttcgggctcccaaagtgctgggattacaagcatgagccactgctcttggcccctattttttgttaaacctctaggagaaaccattttagatcagaatcaatccattcatccatcctttcttcctaatctctcttcctttttctctaaaagggaaaaagtgctaacattttaaacactttggttatttatatttaatgtaatcctctcttattgtgtaacagccctcccccttcttttgcttggagacaaaatttgattgaacaaaatttgaatgtttaccacatgttaaacattgctagatgctggggttagttacagagttaatggaatgttcttataaaacttgagttttggggaaggtttatggaacaactataaaattagaataaaaatttgataacacaatggtttgataagggtgtgagtaaagaaataggaactcatattgctgtggtggtgaaaagtcacataacttccatgaagaagtatttatcaatgtctattaaaatgtaaaatgcacgtattctttgactcaacagttccacttccaggaatttatcctacagatgctcttgcatctgcgtataagaatatacattatagcattatttgaagtagcagaaggttgaagaaacaaaaatgctcgttgacaggaaatctgctaaataaaataaggtacattcttgatgagaaaaaaaaaggtacattcatacagtggaatatcatgtagccattaattaggcagctctgtatgaacatagaacactctttaaatatatcaattgtgaaaatcaaagtacagaagagtgtatagtttgctgttatttgtataaagtaaaaaagtatccgtgtgtgcatagactctgccaggaaacacaagactccccagcggttgcctcctcggaggagcattgagagacagaggaataagggtataggtaaagacttaatttttattgtatataaaaaaatcataccaacaaaatttgttaattgtataccttttgttccttttgaattttgtattacatgcatgtattacttgttttaaaaataaaataatgtattaaaattacacagggataggtactgtgtaaacatagggtttatggtccttaaacttgctaattttcatagaaatgagtcaagttgtgtgttggagaaaaagtatgccaattctgcttaccacaaataaaaaatagtacttgtgtggtggcgcatggtcattttgtcattttgattttgtgtatgacattgtttattctatgtaggatattccagtacttatatttacttattatgtatttatattatatatatttatatgtttgtatattagctatgttttcttacattttttatttactgaaagtgctgatatggaggggtagataagagatgattaaaaatggaaagtacattagaaatggtgaatgtgtatacaagatgaatcattcaacaatacaattataaagggtcaagtgcaaatcataaagtggattgagaagaagcaaaatgagtgagaatcactaccataagcctctcccttgttcttaagaaatgtcccctagctagacatgcacccatgggttacttggatttttttcaccttggaattttatgaacaaatggacttaggagcagcctttcattacagaacctaacttggtggtggatagaggagtgtctgtaccaagccaggatgagtagtgcttctatgggagcataatggaggaattgagggattcttatctggctggggtgggatgggcatttggagaacattctgcagaagctgttgctgcgtattgagtggataagcagggcaggtcattctagacaaaagaaacagtatgtacaagggcaaggtatgagaggaactgcaagtgagtcagtgaggttggggtggagggcatgcgagcaagggatttgcccaaagtgtcgttggtagttagttcatccgcacactgctgttctcttgcaatcatgtaggaccattgttcaccaagctggctgggcactggtgattagattctcctaccacttcagaaacatatccttataagggtagatggaggaatatagtctttgttcattaaggaaaaaaagagaaagcaaaaaagaacaaagaaaatctgtatttggttatgttgtacatatgtagttgtactgacttccagcagactatcttattttctttttctcatctgtctgcatccttcaagaaactttccctctatttggaaccacaggttgagtgccgcatggacacaacttgaatcttatgttctgtttgattatatttgaatttacatgaagcactttctaccatgcaggcatgcattttgctcttcatagcatggaatgctgtaacaatgttgttttgtccattagaggctttcaaaaatttttatcaacatttaagtgcttaatttctacagtataccagggctggcagtaggtaggcaggtgatattttattcacataccctatatatttgcacattttgattgctcgttctgttaattaaggagagaatttctcttttgtagctgaaatgttttatgctttgaatccactcaaagacaaattattctggaaagcttgaactaaacctggtcagatgcttctgagttatgagagagggattgaaataaactttttcagctaaaaataattttgctcacaagttaccaaaaatggctgactagaaatgcttttaagatacttgtctaagctaccataagctaaaggtcaagaaaaaagtttagaacacgttatgagaaacgattggctctactttgctaaagcttttgccaaacctcttattctgtaatgaccacatgagacaaaagctggtgaaagtggtatgccttagattcagtggggacctagagattttttcagtggaacacatgtgctgcctatctcttctgacgacgaactagtacctgtggaaggcactagggttaggtgaaaatgggacacttcattctgaagctgttatacaattgcctatgccaattaattatttaaagcttttatcttctgttgcagagcaatttttgccctcagaatatttgtcagtcctcacaaagtgccaagtgatgggtatttagcatgtggcattgccgtcagtgttctgtcattttgtttagacacttctttgcatctcactgaattgcagaattaagaatcgttcacatttatgggcagcacgtttttgcagtatggtcatttatcattggagtttatattttatgcttccttctagactcttagtgtgctttcacgattatccagaggattcctttgcagcagcagtgtatgccactgattggtggtggtagccttgagaaactagggaggcatgttgactttccttaaggttgcttagtattgtagaataaaatcttgaattagagtaaaattcagagagagctgtttttccccgtaaacatcattcttttgaatacagccagtattaagccaggatgcgttttcttcctaaatttaacacgtatttattgagcatctaatgtgtatgaggttatgagaagggaagttgaatgagcttatgttagaggaactcaacctttcctcagagaatgggagtctgcaggcagaggtggtggtgttgacacttcgaggagagtgagaagttttagaagtagctgctgttcctatgtaataaggattcatcaagaagtgggatgaaagggttgctcagtctcagtaagtgccagctgggattgagttggtcctgatggtttaacttttttttttttgagacagagtttcactcttgtcgcccaggctggagtacaatggtgtgatcttggctcactgcaacctccaccacctgggttcaaatgattctcctgcctcagcctcccaagtagctgggattacaggcacttgccaccatgcctggccaatttttatgtttttagtagagatggggtttcactgtgttggccaggctgatctcaaactcctgacctcaggtgatctacccacctcggcctcccaaagtgctggggttataggcgtgaaccacctcgcccagctgtttcttaactatcagacagtacttggaagcccatgagtgtagctgagtgcacgttacctagtgccaagtgtcaataaactgagatgaatgggttcaggtagaataagggcgtgggagaaaacaaaggacagcaggagcttttcctacgagtttgagatcttgacgttagaagagttttgggtagcaatgatgtgtaaggatccaatggatgagtttggtgtaggtagtgccccctggaaataagtaggttgaagaacttggagtctcagttttgaaagtgttgtcaacttgaatgttgaaacgatctaggcctaagcattgaaactctgggcaaattgggagaaagtcatggaggttggggaagtggaaagaatgatgtataagtgggttaactcagtgactctcaactgggggtgattttgtcccctcagttgacattggcaacgtctggagacatttttgagttttataattgtggaggtcttactggcatctaggggttggaagccagagatgttactttaacatcctaaagtgcacaagagagtctcccacaatgaagaattatctggcccaaaatgtcagtaatgctgaggttgagaaccctgcattaactttaaaaraacagttgttgagtaaaggcaacagttgttgaatgtgactgtttctctccccttctactctgctttgtagaactctgcacatccatttattcttccacttagtgaccatttatggagctccatttatgtgccaaggcaccatgctagatagtcattaggagtatcaaattaattagatgtcacctctttcttaaagtttatttttgttttttcccccttagttatccttgttctgattaaagtttatttttaactgtgaattaattaatatgcaagtatattcttaccaaaaagccaaaaactcaaacgtataaggccagtgaccactttgaccaccacctccaatatctgttcttttcctagaggtacccagtactgtcagcttggtatgtgtagctggacatttgaaggttgcttccctacatctaattttttcccccttttttatgccacgctaagaagtttaattttgaaaatttgtcctaggctgcaagtttcttaagatagggaccaggtgtttggtttttctttttgaattattacaatacatggtacacagttgtcactcaataaatgtttgctgaataatgaatgaaatgaatcaataaaagaatgaatgaggagcaaaaagaatgccaacgcctagtaatggccttcaggctttggaaggctgcaaagtatgtttatgggaagaatgagttaatatcaggatgtgaaagaagaaaagggtgaaggaaaattccaacttgtaggaacagagaaggggttaccagcaggcccagttgataagctggtcagaagacaaagttgaagtttgagaaggaacagagatcttcattgtataggggataagagttcaaggagtgtcttttgaagaaaggaaggtcttttgaagaaagtaattgcaagttagcgattggaaaaacttactaaggtaggagctgcttagaactggaagagtccgggctgggcgtggtggctcatgcctataatcccagcactttgggaggccaaggtggggggatcatctgaggtcagaagtttgagaccagcctggcccacatggcgaaacccccatctgtacaaacatacaaaaaaattagctgggtgtagtggcacatgcctgtagtcccagctactcaggaagctgaagcagggggatcacttgaacctgggaggcagaggttgctgtgagctgagatcgtgccattgcacttgagcttgggtgacagagtgagactccgtctcaagaactagaagagtcctgaagttctttctggagtattggtgtgatagaagcattagtagtttcttttatgttctggagaacttctgtgcacataaatgtttatagatatataccccgtttgtataccaaaggaatcttcattatttttcactgaacaaaacaccttagagaacatttcgtttgttttgccaatcaatctaattcttttaaatgaccacatagtatcccacggtaagtttttttgtttgttttttttaaaatcatgatttgtttaaacatgtcctattgctcgacatttaggtcgtttccagtcttttgctatttgaaacaatgctgcttgtatgtatgttgctgtgtgcataagataagcacaagaagacggattctgagaagtggaattgtgtttctaagggtctgcacattttaacttttcataggtattgctgagtatcagagggacatttttctattatgttaccgtactttcatttttcacaagccgaagtgaaaaatggtatcttggctttttaatttgtttgttgttgttgttgttgttttcttttttcttctgtttttgaggcagagtctcactcttgtcatccaggctggagtgcagtggcacaatctcggctcactgcagcctccgcctcccaggttcaagcaattctcctgcctcagcctcccaagtagctgggattataggcgcctgccaccacgcctggctaatttttgtatttttagtagagacggggtttcaccatgttggccaggctggtctcgaactcttgacctcaagtgatccgcccgccttggcctctcaaagtgctgggattacaggcgtgagccaccacgtctggcccggcctgtttttcttttcttaagacaggatcttgccctgtcgtccaggctggaatgcagtggtatggtaataacttactgtaaccttgaattcctggactcaagccatcctcctgcatggacctcctgagtagctaggactaaggcatgcactactatgcctggctaatttttaaattattttttgtagaaacagggtcttgctatgttgcccaggctggtctcaagctcctggccttaagtgatcccccacctcaacttctcaaagtactaggattacaggcatgagcccctgtgcctggcctaatttgtatatttttagtttaagggaatcttttaaaaaaacatttctacaaatcatttatatttcttttgtcataaactcaggttcaaaagaattgtttttttcttattgatatgtaggaactttttataaattaatgaaagtagtgtttgtcattcatgttgcagtttcccattcagcttgtcacttgtcttttggatttgtttgtggtgtatacatgtatgtgtacatgtatatacatatagtgtgtgtgtgtgtgtgtgtgtgtgtgtgtgtgtgtgtgtgtgtgtatgttttggggccagagaaaaacatttgaatgtaattaaatatataaagtgtttattttaaaactcttggatcttctttctgagaaggaccttctttactctgtttaaaaatagctttctgtgctttcctttagtactttaatgggaaaaccttgggtttagttttgatgctatcatttattagttttgtgactttgtgcaaatcatataatctgtcagaacctcagtttcctaaactgaaagggttagatcaagatgatctgtaacagtgtaaagaactttcatttctaaaatttcttctttgcttttgagtaggatttaacttttgtgttatgtggagatagggagttggagacaggttaagggaaagatgtcaagaggcaggcaaaagcagaaagaatcaggactgtgaacaaatgaacaaacaaaaaagagccccgagaggatagaggaaaaacgaaggaaaacagatgggaggtagatactgagaactccggtggaatgcttttttcctatcacaggagataaaaaaacattcccgggtaccttgttcattcaccttcccacccttcgtctctctttttttttctttcttcattccatccctccctgatttccttccatttttttctttttcttagaataaagtcaagtgtaatacaaaggctgttaattagcaccaatcatgaagtgcaaaagttaaagcttcaaagtcttattcatgttgcacatatgtagtatttaaagccaagtgccttgaactccttggatacagtgtgtgttggaattgctattgatctattgtctagcaatccctctgagctctgaaactttatgtttaaacatagtgtgttttagcattgttataagaaatacaacttttgggccaggcacggtggctcatgcttgtaattccagcactttaggaggccgaggttggtggatcacctgagatcaggagtttgagaccagcctggccaacatggcgaaaccctgtctctactgaaaatacaaaaattagccaggtgtagtggcgggtgtccgtaatcctagctattcgggaggctgaggcaggagaatcacttgaacctgggaggcggaggtaacagtgagctgagatcgtgccactgtactccagccagggcaacaagagtgagactccatctcaaaaaaaaaaaaatatatatatatatatatatatataacttttatatttcttgatttggatgttaaatatgtaaagctaatgatgcattcctgtatgttttatatttcatgtctaagacaaaagttccccctgtaaattatgccttcaagaaatctagtttctgtctttggatacatgtcgtctgtgaaacctcgagctaggatttgtaacttcttccctgtctgcctctgtctgctaagcatggacagtagtacctatgcaacagtgtgtgtgcttaaccaaaatcctcttttttcccccatgaacatgggctatctttctgtttatgttttcaatttctttgatcaacgttttgtagcttttagtctacatatctttcatctcctaaccaaaattcttatatgagaagtccctctaaagtataatggtcaattattttcatcacttatttttatgtttttttagagacagagtcttgctctgttgccaggctgtattgcagtggtgttatcacagttcattttaacctccaactcttgggccccagcgatcctcccacttcagcctcctgagtagctatgacaacaggtatgccactatgcctggctagttctaaatttttttttttttttttttttgtagagacagggacttgccatgttacccaggctggtcttgaactctcggcctcaagcagtcctcctgccttggcctcccaaagtgctgggattacaggtcatcacttattttttaagattcattttgtacgttgccattagaccataattattattaattttttcttgttgtcttggttggagaaaaaaaagtaaaaaaatcccatggttactaccatgagcacatttgagttgaatacattctgaccttttagctcatgttcatctcctttcacagacccctttttaccctttcaacctcatggatactccagagctggcctgggacattctcatctgttggcttcctcatgttgcccttgaaaacagacgcctagacttattaaaatcattgttgattatcatggcagtggctgccactgtggctaattggaaaggaagttattgtggtcatcagaaatactgaaggagaaggggatgaaagtacaagtggctgtggcgacttagctatgttactgatagacttggctgttgtgacgaggtgcagaggctccagatgtcatctcataagatttgatcaaatgctttttttcttcctgtcttctggagggtggctcaccttgattgctttctcactttgtgcattttagattgaatcactccatctcactcttgcactcattttatatgaaatataacctaattggccaggcgcggtggctcatgcttgtaatctcagcactttgggaggctaaggcgggtggatcacctgaggtcaggagttcgagaccagtctggtcaacgtggtgaaaccccgtctctaccaaaaatacaaaaattagctggacgtggtggtgcatgcctgtaatcccagctactcgggaggctgaggcaggagaattgcttgaacacgggaggcagaggttgcggtgagctgagatcgcaccattgcatcccaccttgggcgacaagagcgaaactccgtctcaaaaaaaaaacctaattaagaagtatcattggatgttctctatgtgaggtagtgtgtgcaggaaatgtaagatctaggagatggtctgtaagggcttttgattgagttggttagatgatatacaaactcagccaaaattaaataaggtaagttgatggtgtaaaatatggtatagggtcataccttgctattgtattggtgggaaagataaaactatatataatataaaattgtatcagaatttagtataaaattctagatttgctgtacacttggaaaggagaagcataaaggagaaaaagagggagatgcaaaatgttagctaaggcaactgaaaaactttttctgacttttacatctttttaacaaagatgtcattattttatttttttgagacagggtcgcactctgtcacccagtctggagtgtggtggttcggtcacggctcactgcagccttgacttctcaggctcaagcagtcctcccacctaagcctcctaagtggctgggactacaggtgtgccaccatgtctgggtaattttttatttattttttgtagccatgaggcactatagcctaggcactgtgttgcccaggctgattcaaactcctgggctctagcgatcttcctgcctcaacctcccaaagtgctaggattataggtgtgagccactgcatccgacagttattttaatgttaagcctgggaggccaagggaagtgttcctttggccttgggagctgactcagactttcctctatactccctccgcatctcagttccttccactatttacaggatctcctgtggctctctttggcaattagttgcaagaggtcttatatatattgaaatgagatggaatgtaaatacagtatttaaaaatatttgtggaagaaataattgaagttctgtagtgacagggccacactagggagcagagaatgcatagagggattttgaacctttgtaccttactttaggaacagtgttattgatggcaggtgggcagctgagagagttagaggagmttttgttggcttttaaatatatctctagacttctgaaggcagcagttcttctattctcatgtatggtttggctggtaaattttaaggtatgaccgcttctattgtgtgaatgtctgaaagaactgtagaatccaagactgaccactgaggaatatgtgttgatcaaaaccatttgagctgtaagcccagggattttgaagggtggatgtctgggtgtgttaagaccaggtagaggagaatgcttattagtttcctaagtctcatattatcagagcccattaaatcaatattagtttgtatcaaatgccagtaaatccctattcttcccttacctatcaaactctgagaagttctttcttaggaaaggtacctgctcttcattttaccacagtatctggacttgtggtgtcagtcaccattttcttcaggacctcaggattgatgtgtggagatctacatctttttggctgataggaaaggggattagacatcctaaggctggttgccctctagctgtgcaaataaacactcttctgacatttcttccttaatcaacaaagcatttataatattatcgtgtaaggaaccatagagcaacctctctttccttggggctatttctctgctagatctcagcagcctcatatttcctggtgacttttttttctctttttaagagctttattcaagtcaaaggtgtcttgcctttacagttgcctttacagcttttttttttcttttttttttttttgagacagagtcttgctcttgctctgttgcctaggctggagtgtagtggcacaatctcagctcactgcaacctccacctaccaggctcaggtgattctcatgcctcagcctcctgagtagctgggattacaggcacttgccaccatgcctggctgattttaatagagatggggtttcgccatgttggccaggctggtcttgaactcctggcttcaagtgacccaaccaccttggcctctcaaagtgctgggattacagatataagccaccgtgcccagccttacagatattttttttaagataattctttcctcacctgttggattcttgtttatcctgtaccgtgggagacatatgggtgaggggaatggtatcccccatagtagattggataatgatctcaggaggtttttattggtgaatcaattattattttctttgttagaagaagaatctttagtaagaagggagaagaaacttttcatttgggagagaaaataaaaacaagctttgctgaggccagaatgggatcatgtgtaataaactatgaattcatcctctttttcctccttccctcctagttgcagttgatctcacaacagctgtttccagctgtcctctggattttgcccaggccccttgggatggctgcagtgactcacacagctgggcttttttccataatcgtctgaatctagctcctcaagaagcaggaggaggaggaggaaaagggtgacttggttgcactggaagagattttcttgttggtgtattagtccgttctcacactgctgtaaagaactacctgagactgggtaatttatgaagaaaagagatttaattgactcacagttccaaagccttaacaggaggcatgactgggaggcctcaggaaacttacaatcatggcrgaaggggaagcaagcacatcttaaccatggtggagcaggagagagagagagtgtgaagggggaggtgccacatgcttttaaacgatcactcgagaactcactcatcctgagaacatcaagggggatgtctgtccccatgattcagttacctcccaccaggcccctcctctgacacgtggggattacaatttgagatgagattttgtgggggacacagagccaaaccgtatcagttggatcactgtctcccggcaggctctgggtttggtttattcttgaaagctatgatcctaggagataacattgccggcggagaggaggcaaatgtgttaaatggggaaggtttttgtgtttggagaaaggcaaatgttctttcactcagtgtttttccccatttatttccttccaaaccttcttattcggaacaaactgcatctttccatttcaaatggatgtagcctgtgtatgagatgaatgggtgactgaatgctgaggggaatatcacgtaaaaaggtagatgatgttctctatactctgatgattggttttgatgttttgtaggaagtattagtttcttttcagttcttcaaagtagttgttcctctttctaacagtaagcactgtcctttccctctttcttttctttcatgaaggctgtcctttcccagcttgggacctgctcaaatgagatatctcagtaaagacaataaaaaggatcctttagttatctaaaacattctttacttttgcctccctgggctctacactcatgtttctgaaggggtaacaggctgtagaagaaatcctctagacttgctgtgtaatatggtaatacggtagccacatgtggctatagagctgcactctcaggccgggtgcagtggctcatgcctgtaatcccagcactttgagaggctgaggtgggaggatcgcttgggcaacaaagtgagacccgcatctctgttcttatatgaaattataataaaaaataaaaaagctaggcatggtacctcacgcttgtaattccagcactttgggaggccgaagtgggaggatcacttgaacccaagagtttgagaccagcttgggcaacatagagagaccccatttctacaaaaaattaaaaaattaactgggtatggtgacacaggcttgtggtcccagctacttgggaagctgaggtgggaggatcatttgagcctggaaagtcaaggctacagtgagcgatgatcgtgctgctgtactctggcctgagtgacacagtgagaccctatctcaaaaaataaataaataaataaataaataaataaataaaatgaataaataaaaggatgcactcaatgtaaaatactatacactagatttagaagaattagtacaaaaaagaatgtaagatactatgttgagatttttaaaatattgagtatgttttaaaatcaacatgttgaaatgctaatattttaactgtgttggattcaataaaatatattcttaaaattagtttcacctttttttttttaccatttttaatatggctactacaaaattttaaattacataatggcatatatttctggctctcattatattcctattagcttgctcaaactagaaggggaagttactacaatactggtgtgcttctttctggtagtccttgttttcagaactttggagggacctttaatgatttttttgtttgtttttttgtttttcgagacagtctcgttctgtctcccaggctggagtgcagtggcgcaatcttggctccctgcaacctttgcctcctgggttcaggtgattctcctgcctcagcctcctgagtaactgggattacgggtgcctgccacagcacctggctaaattttgtatttttagtagagaaggggttttaccatgttggccaggctggtcttaaactcctgaccttaagtgatctatctgcctcgacctcccataatggcagtttgggattcataacacagtgcactacaacataccctccctattagttatttctcgctgtgtaacaaattagccctacacttactggcttcaaacaacaaacacttattatctcatagtttctgtaggtcagaaatttgagacaacttagctgtgtagttctgtcccaggatctctcatgaggtttcagtcaagcttttgactgggctgcatttatctgaaggcttgactgaggcaggaggatctacttaaatttttgctttatgctgttagaagcaagtctagctcctcttaaggggaggaaaagcaggacctaccttttgaatggagtagtatcaaatactttgtgagcatattttaaaaccattacatccacctttattttctgctrttttcccctgttaacatacctgtgttttaataactgcctctgatgatggtcagagtccagtggctaaagttcattttaccctcagctgctatttcagtattacttggaacaattcgattcattttgatgatgcaaactctgacctgtaatcaaaatggtccttttgaggcrcaaaggtgaatttagctttgcttgggcttttaacacttgtatatgcatctgtttatgtcctttctgtcttatgtgttccttagttgattcttagtagtggaataaagctgtttggacattacatggtaaatatgttaaaaccagtattgtattatgtttttgtatgttatgttttgcttgagattcagagcacttaataaccattctgtatctcatcctacctctgagaagtttgaaagtaaagcaaggtatcctgttttctgcctccaagtagggaaagggaggggagttcatttacatacgaggctgagtggaagatgtgagggaattcagagttgtaaggcagagacatagatgtttccaggagtgggttcatccttactaaccttcatcttgtagctgttttgtttttggcttagcttcgaacttctgaagtttatactgaagcaagaggcaagacgtattggataaatgacccaggagacataatcagtaaaggtaaatttccatctgctttgggtcaaaatggagcttttttataaggaaactaggtatcataatgggaagtggttgggttatgagagggttcaagaatcaagagaataagtattcagttaaaaccatttgatttcattttttttctggtgttttagtaagctttaatcaggtatttcctaaggaatttaaaattatctcttaagtttgagaagtctgccgggctagatgaatggattgttagtttgttgccttggacagagacttaaagaactcttgaatctacattctgttatcttctgtatccttgtcatctttgtcattagttgaatacttaaacatagtttcgaattgttacttgtgtgtgtgtgtatgtgtatgtgtgtgtgtggttatctgttgtctctctaagcagagttaattttcttgaggaccatgccttttatttctttgcgttccctctgctagtaatgatactttgagttgtatatttcagaggatatatcttaagcatattggcaacatccgctggtgtggcaaggtaagagtcaagtggagctcagtggttaagagtttggggtttagagtcctattgactttgctgtttaatagatttattaccttaggcaagtttctcaatttctctgaggctcagttccttcatctgtaaaatgttaataatagtttctacctcacagagttgtgagaactaatgagatattgcaagtaaagcacttagccacaggagtggttacatatattaggtgtgtaaaaaagtaattgtttgatttgttaatttttatttttgattagaggtatccaagttcttgaatcttgaggcctcatttttattagttcatcagtcattatcggaggtgccagaaacctgaatctggtgcccgttcttgtcagcctgagtcggtccacatcataagtaacttcattcagagagttttcttgtttgctttggcaaaatagatattttaggccgtggtttcttccttgcagaatctcagggttcttcctctctccagtgaccagagctgccattgttttcaatgtttggtaggtgacatggtatttggattaccctgttctcctctgctcttctgactgtgactcctaaaagctcacttaaacctggctgatgctgactcctgtccaaaggcccaagtcctcctgcctccctccaattttctgttaaggaattctttggactaattttttttatcttttaaagaaaccttgcaatacccaaacagaccattctttcaactctgcactccttggtcagcatccagaatgtaaatacttgtggccatctgtatattcctctgttgtcaggcctaactgactttatactttttctcttccattccgatcttccggtggctcctcatagactgtcccattttttcctgttgcacagtgagcaaacttccttcatcttcagcctcttaactgcatgttatttttactcctttctcttaactaaatttgttttctttctcaggactttacatcctctatctcccttctagtgggtgggttttttgttttttgtttttgtaatttttaaaatttagagatggggtctctctgtgttgcccaggctggtctcaaactcccaagctcaagtgatccccctgcctcagcctcccaagcagctgggactacaggtgtgcaacaccatgcttggcttagtgggtgtttcggtgttccttgttctcctgtattacagagattagtattctgttgttctctctctcccctctccaatgcttacataaaatcctatacccttgggtgaaattccctgttccttaaaagctcgtgtaatctggctagtctaaccttttcccttatgcagtactgtcatttattgttttgtccctccctcatttaaaaaatgaacaaaaacttgtagctcttggattgtgggctttcttcttaccttaagtattgctattgtcttaagagactccagtgtctgtgtggaagactgatccagcaccttagctagtcttatgtctggttctctaattaatctgtttcattgcctttcttctctttcaccaactattctaaggccacattttggggttagtcaatttagaactgcttaatttctgaaaatttaaagacaagcgtctcattttctcattaagactcttcagttctctcatttaattacccccactgcctcttttctccaatgtcattgagaaagccagtgcattggccctctctgtattctctccctttttgttaactcccctgtctttgctcccttccctgtcttgtttcgactttgtcgtccttctcttaaacagctctttggccaatatcctctctttattttcatttttcattgtatttttcctacctggcaaaactcagtacagctctctgccttcctaatatccaacctttcctagacccttgactcctgcctggtagtatttctgtgtgtgttttttgtttttgtttttgtttttagacagagtctcactctgtcaccaggctggagtgcagtggcacgatctctgctcactgcaacctctgcctcctgagttgaagcgattcttctgcctcagcctcctgagtagctggaattacaggtgtgtgctaccatgcccagctgattttttgtatttttagtagagttggggtttcaccatgttggccaggctggtctcgaactcctgacctccagtgatccatccaccttggcctcccaaactgctgggattgtaggtgtgagccaccgcacatggccagtatttctgtttttaagtgacctcttggggatttgccacagtggctgtttaaacatccctcattgtcctacatttcctttccttttgcttcccttcacttaatcttgcctcttaatttatagaaaccctcagattggagctcctttaccttcgtgccaccaaatttgagtgccacttttcgtcctttctgtagtgagttctacttggatttttcccaagattttaaatctgcccttctatatctttttttcatcaactttaaacaaaataaataaataaaatctagcacatttagttatctttaccctccatctgcttttcactctcctcccttctacaagccaccttcttaaaatagttgtctgtgccctttgagcccattgcagttctggttttctctttaaccacaacattgaaactcttttctccaaaatcaccattaacccccttgcgactacatccaatgaatattcctttgtgtcatctttgtccttggaatgccgctcttcccctggcttctcttgtaccatgctttttagaatttctccctctgtctgccagtgcatttttgttatcccttcctcagcccaccacttaaaaattggtgcttgaaatgattctattctaggtctttttctttttaattcttttaagttatatatatttctccttgggcaagctcatctattgctaaggctttatttatcatctatatgctgacaacttccaaattgctgtctgtagcctagatctctttcctgcacttaggatgtctgtatccacctgctcagtgtgcatctgtgcttggataccccatagttaactgcaaacacaacatctaaaactgattcctccttatctgctctttttaagaagagatggagttttgccatgttggcaaggctggtcttgaactcataacgtcaggtgatctgcccgcctcggtctcccaagatgctgggattacaggcatgagccactatgcccagcccttatctggaatttctgcaaaattctgtccttgtgtaactcagcaaccagtgccaccatttacccagctgctgaagctactgttatagcctcttaaatggtccttctgtctttaatttcgtccctcccatcccacatcattgcgttgcagtaatttttttcagagtgatccttctgaaacaactctgatcatctcactgtcctttagtcccactaaaagactttggtgatctggctcctacctcatctcccaccccttgacccgctcatgcatataccatgcagcttcacttcattccctctataacatgtctccttctaccctttatggcactaacccttacctttgagatctcggtttattggtcttaataaacctttgggaatcttttactgaatttctaagatagggttaggaactctcttgactgctttcatagcaccttgtacttttccctatttaggatttatttcactgtattataagagcctatttcctttgagctcctgccaaactgtaagctcttcgagggtagggactctgttttaatctttattttttctttttaaattcccagtatgtagcacagtacgtgatttatagtaagcttagtatttattgccatttaatggttgtatggattataggattttagaactgaaagaaccttatctgtatggaatatagatcctagatttgcagggtgaatgatcgctgtgcggttcttttgctagagataatcatttcaaacaaagtcatgttcaaaggccaaggtggcccccctttagggttttacctctggctttcactggttaagtagctctagttagtttgtttcaaggcttaattagaccagtgtttcttaatcttggctgcctgttagcatcctctggggagctttaagaaaaatactgttgccccaacctcaccaaataatttacagaataagttttattcttcttccgggaagtttgtcatccattttccaacttgctaaagttgatcaacagtggctttattgttctttgacaaaagaaaaggcatatcagactttgtattatctcatttttagatgcaccagtcagtaagcatttggcagttgggggcccccatctgtgaccattgggagcttgccttatgaacccttagatcctgatctgtgacatagaatgtgagcagaaagttccatctggtgtgattgctgcctcctctcatgggttctctggtttgagtcactgctgttgtatcacacgcttctttatgacaggctgacagattaattccctagaggctgacctgatgtaaataggaaaatttgcttattatcagtagaaggagcaggttatttaattactattcaattttagtgctatttattttttgcttttaggactgaaacatctcctgttcagccatttgaattttgaaaagttgttagttgcttttgataactttgaggaatcagattaatttttaaaatggtttttaaatgtatgagctcatgctaagtgcatttgtttgtggtagtaattgctttctgaaatctgttttctgcaactcagaatagtataatatttagaacttggtcactgtttttagaaggaattctgaaggaattgtaaagaacagcctaaatttgttcttatcccttggtttttctacaaacacaattttagtattgtggcattcagaagttaatgcattcttggtatgttgtttacaagtaatattttacaaatgtaagactgaaatatttgcatcagcgagtattgtggctttgagagatttaaatgctgtatgattacaaatattttattcttgtcactaaaaaacaaaaatggaagataaaacaccaaacctatcataaagatacatgaaaacagtttggactgtttacctttctttttcttccctaggtcatttatgtaacagtcttaaaaaaaaaaaaaagagatctttatacaaaactctattttccagtgaagtaagagtttatggtgactgagtaatgcttggtatagatctggatctgttttcagaattggctggtgtctaaaaatcatgaggaacttaggtgaagcagttgatgaatagtccataagtccacagtcatcattgctagcttgaagatagttaatgttgataactttcttaaacactggggtgaaagggtaaggattgggaatacgtctatacatttagctattctggctgatacttctttcttttgccttttccattatctcatttactttgggcttgttaatccagtggaggccttcttaaagggggtgggcataaataaaatatgcatgttctttttcctttgctaaggacagtatgaaaacattgtctgctttcaagtttggtcttttatgatgaactggctctcagaaaaataacttgacttctttttgaggtgcacgtttttcatttcttccttctcccacctccacagcaggcacagtgagctttccattcagacagtgagcttgtgttgccttttagcccagggagctcagcccacaaaccatgggtctcrgtttgtgcttgacaggactttgttaagtgaatcagggagtctgaattattcattctccttcctcatcctgctgttcatatcaaattcctgctgtgtctttggggcatcttgccagtcttcagcataattgatttccttgctttgtgctatgtggggtgtctgtgtctgtgtgtgcacatgggttgtgcctctatttaagcatacctgattgcctataatagtggtatttattaagctcgtgtgggcagaagcacaacagttcagcccaagattactaaaaatatagcggactggctgcttttataatctgagggagaggttagaattggtcttttcattatccaggctgcattttgcattttctttctgagcaacaagggtttgctgcctgaggaattatgaggaagactctatctatctatctatctatctatctatctatctatctatctatctatccatctatctatctatctatctagagatggagtctttcctgctttgttgcccaggctggccttgaacttctgggctccagtgatcctcccaccttctgtgatctgattggaacacttgtgaaggagactgtccttttctctttctattctttgaccccgttgtctcctctttaactgtttttctttgagaagatatttcatttagagccatagactgttagaattagggaggacttaaagattatctagtcaagaggttgcaaactataggcctttggtgtggctcccacacatgggattttgtttggataacacagtattttaaaggcctttggatttaacatttaaacattgggaaagctcacatgaaacccagatttgtggcttcacttggcagcacggggcccacattcctacatctgacaatctgcaggagctaaatagtggctgttctcttttggaatgacccgtttgcttcagtattgcacagtctctacctgtgcacttcactctttacctctggtgagtgttacaatcccggtctaatccagtctacccattttacagaagagaggaagagatttgctgaaaacctagtaggtagttggaacaacttagggtttgtgtctcttgacttttagttgattacgattatttctactagtattttacttttgcctttcttactctttttttgttgttcattcaaaatattcattgtgtctgtagcaagagtcaattctgagagtgtgaaaaggaatgtgataaagtctcctttcttgatttggtcttgagggaccaaatgagtctactttggaacagccaccatccaccattactgtgtcacattatgttgtcatcttttcttcgcatcatctggaattttaaaaatttgtctccttgtttactggctgtcttcccaagtacttgagtgtaagcactgtgaagccagtgactgtgtctcatttaatgttgtatctccattgcctgtcacttagtgaattctcggtatttgttgaatgaatgactaaaggaggcatttgaactcagctttgaaagatgaataggaattttctatgcagactgggtaagggtgttccagacatagatactggggtgagcagagtcatggagacatgaaaatacatagtatattcttgtgcttctttcgggctgggtttgttcatgtgccacaaaaagctatttttgatacagaaagaccatctggatttgaaggactctagatctttggttaaaaaaaaattgagaaactaaatgtgtttctgagccaacttcagtatagctttttcccctctgtaagtcttttagccagatgctgggcattcattatcattaatgatttatagacctttaccaacatatttaccacagttttattatataacagatgtgaaacaagggtatggttccaatgtgccttcagtctagcaacacactctgccttgtgcaaagcagtctaatattttgcaagtccagaacaactggcagtatgtagttatttttagagtatataatggactaagtggtgagtttctgagggcatagggcagaggttctcaatattagccaactgtgcgttagaatcacctgggaagcttttaaacatttcagtgcttaggccataccctacccagaccaattaaatcaggaactctgggggcaggacccaggaatcaggtttgtttttttaaacatcttcagatgatgctagtatgcagtaaggttgagaaccattggcctagggggacacaaacaagggaaggagacagatttttgaagcttgttgtaagttgttgaggtataaggagggatccccaagaggtcagtcattaagaagattaggtaattgaagagaattattaaaaaaattatctgagtggaagaggagagctattttagggaatcagtttagaaatgtatgatttttagagcagttgaacatacagagattggaaatcttacagatggtgtcagagataaacagagtgtgcctggtcgttgaggaggaagagagcttggattccaaattattcatcgactctagctttctagtcacatgtaatgagaaaacattgtacttgaagtaaaatggtcatgggtcatagttctagattcccactaattagttgtgttcatttagttcagttaaccaaccatttatcaagtgccgaacactgttggacactggagacaaattagatacaggtcttgccatccaggatttgatgatctaggaaatttttttgtgtagccgtagttaagcagttattaacatctctgggtcattctccatttgcaaaatgtggtgatatgatgttatttctgagattgcttttagctctaacatcttaccacagtgattcaaagtaaaatctaataagaatcagcatctcctaaaagtaattattatagttttcttcaatagaaaaaaaaatccaggtaaaaaaatggccaaggggtctaaactgagacaatcttagaaacttactatatccctttcctgtcttacttttctatcaggttctgtttgattttgacaactatagttaataaggaaggttcaagagcagatgcccctggtagggggcgggtagtagctggtggattagagctaaagtagagctggtaaaagcctcctggttgcagagctgagggcagattgggcaggtgcactactaaggtatggttttgagatctactatttccagcaccttgttgaaaagttgatagctacattcatcacccaggtgaagtctaccataatgaggaaaaaattgcttatcttgccagcagccctcaggataaacttaggagaactggggagatttgtttttctgatgattcttggattttgtagtgcagtcattgtttgctttgctgccttgtaggggaggaagggaagaggctaaggggagagggtgggtgaaacagctgtcaaagaaagaggagtcctgaaaagctatttgtgtttgggagctggagctcaatggtagggctgtggtagttttgtaggccacactctcttgttgctgttttgcttttgggacataacactaataaataggattagtggttttttttttttttaaacgatacccttagcttgttagagttaaaacagcttttgttctaaaacactctatcagagactattaaagaatgatttttcttatataactgttgcactcaacatgttccattgtagggactgtagcatggtttctattcagatatcctggaccctcagacctcaaattaccgtccaaccatttccttttctcctacccacttccctgttcattctgcagttcttgtaatcaccccagcaaatgtttatttagcgcccgtatgccctgtaccatgctggctgttgaggatgtggagggaggcagagagagagagacagtccatgacctcaggggctcccagtgtagtagggagactggtaccaacaagacctataatgtggtaagtgcattaagagaattgagtaaatggggagatggggggaggagggtctaaactagctgggaccggtggaagtcagggaaaggracctgggggatgtaacaggagctatccttctgtgttttaaacagtagaaagaatagagaaatactggtttaatgggtagaacacagggtgggggaattaggactcttccttttcggtcttttgtgttcaaaagtatagcagctttctttgcttcttgctcctagcatcagattatctattcccctggaattatgtgggttggagaagaatggaaaggaatttgcccacctgcatggagagagagggaggcagtagggatgtgggtgtttaaaagcccttggcatgattggctgtaagtacagatggctatttgtgttaccattattgtagctgttatgcctacattccctttggtgtgcctctctacagggataattgtggggtcctgacttataagtcttcctgctgctggataaaatagatgctgatgtgttgtgcgttacagggtatacagtgaattctgtgtgggctgtcttcttactgctgccttgatcttttggggcctcaaacataaggggaaaatgactaattttgtgtgtgcaaattcacattggtgaaaaccagtaaaaccataaaaatggttatattcaattttcctaagggattgacctccaaatgaagctaaaattaactttggtgaatgcttatatttttaaatttttaattctaattttttttttttttttgaaatggagtcttgctctgtcacccaggctgaagtgcagtggcatgatcttggcttactgcaatctcagactcctaggttcaagggattcttatgcctcagcctcctgagtagctgtgaccacaggcgggcaccaccacacctggctaatttttgtatttttagtagagataaggatttaccatgttggccaggctggtctcgaactcctggcctcaagtgatctgcccacctttcctcccaaagtgctgggattactggtgtgagccaccacgcctggctgaatgtttggatttttgaaagcattaaataccaagggctgagtatctagggaaaaggtgatttgtctgtgaaatccaaggaactggctacattctgtgtataactctgagggaaatagaacagaaagaggatgggctttacagttgctctgcatattttttgttgtgggaccttgctcaatctacctaacttttctcaagcctcagttttttcattagtaaaatgaagataataattactaccataacgttgttttggtgattaaaaatttattattccactactaaaagcctttcaaaggcttctttcttagtatttatgtcccaacagaatggaatcacttgctatctttttctcctctgtgcttttttaccatttttcttgtatctctttttacctctctactcagaaaattctccataaagtaaaacacataacataaatacataagcgtgcaaagtcaggttgctccttagatctcagccaaatggtattttgttttcaaggaagcctttcctgagcccgatcccattccagtctggaagatgtcctttcttttaatttgtctgtcccacctgctaaactgtaagttctctgagggcagagattgtcatatttactattgggtcttcctcttttttgtcttgtaaatggtgtatggtctgtatgcaagctgcttgcaaaactcagggcaataccaagagacatagcaccccccacccccgccccaattgatttataaccagaagaaaaccgcttaattttcacctaattgatggtaaagcctggttactttggggataaatttggctttgaaagtaaacctgatgctttgtgctttggtagatatttaacttctgttctctttcatacacaagagttactcctttgctttgagtagaaaaccattagaaaaccagggtagaacttttggcaattatccagtttagtaattgggccaaatagttctaatctcaccacaaccactacttcttagaaaatgatctctttaaacaaaacatggaacatctctgaggatgaaaacctaagggaaggaatagttggagatccccaaatatactcatatagattccccccattctttttcctatttatgggtgttcaagccttggagagatgtgtgtgtgttgatcacataggatcttttacctacatgacctaagtatattccgttgtggcctttggtctattttttttatacatctcaaatgttatcttttaataggtcataatgaatttgtggtggagtaaaggcccaacattccctgtacaagtaaaggcaaaccatagcgccagtaaccctttactagtttataagtaaaggctatctctgttagcctgaattccttgagggcagggatggtctgattgattttccatcctcaatgataagtaaagatattggcacatacttcgttacgtgatggttacctatttgtcgaatgaggtagcatggtgtagtagattaaaggctccagagtttgacagactgagttagtatggcactgacacttgttgaaccacgttttaacctttctgagctttaggatcagctttcgttgtgagaatcaaagacattgtactcttaaattcctgttagtggctattattttttctccattgattctttattttgaaataatttcacattacagaaaagttaccagagcagctaacaacccacaaaacaccccaaactcctggattttcttcactcggattccccagttgttaatatttcactgcatctgcttcattgctcactctgtgtgtttgtgtgtggggtttgtgtacatacataccctttttcattgtgccttttctgagctttttttgagagcaagctgcagatgtgatattccttcactcccaaacacttcaatgtgtattccccgaaataggactttcctatataactggcagagatctccaaatcaggaaatcaatattagtacaacgcgaccatccatccacagacttcgttaacattttgccagctgtcccagcaatgtctttttcctttttggtccggtatcttgtctaggaatatgcgttgcatttagttgcatgtcgcctcagacctcttcagcctggaacagtttctcagtctttacctttctttcatgtccttgacattttgaagagtctagatctgggtccatctgtttcttcatgacagcagtaatatcattttcggcaggaataccactgcaatgatgctatgctcttctcattgcatcatatctggaggcaaatgctgtcccccgcatcccactgtcagtaatattgttaaccttgaacagctggttaagctgatgtctgccaggtttctccacatcagattcatcatttttccttttgtaattgattattgtcttgtggaaaggtattctgaaattatactactatcctgttcctcaacagatatatacctaacctccttagcgctattgactactctttcctgaaccaaccagttttattctgtcaaatgctagtcctctatttctgtgtctgcctgtatttgttagatgtcattctgttacaaagactttccctttttcatttgtttatttctatcaaatggactcatggattactattttattcagtgggctgtagtccatttctataattatactcctcaagcttgagggagcttgaaagtttagccagtgggacctgctttatgctggtttctttgtccttttgacctgtccccatcattcatgggacatttccttattttctgccacaagaaggttttccaagtttattttgtacttttcctaccaaagccttggaatcagccatttccaagaagctctggttcttttaaatggaggatagtaattagaaaccaacatctgggtggtgggtatgcatattgctactagagtgtccttgcctctaggctgtctcagcaaacagctagaaattgtgtgtatgtgtacatacatatgtacataaacacatatataccacatatacatctatatttccatatctctttgtgctatatacgtatatatacatgcatgatgtttgtgtgtgtgttacatattttaaattataaaacaatgcattttatattataaaatcatgaattcacactgataactccattaaatgcagccaacctctttccatatttgtaaatatattctccagtagggaaaaacttggctccccttatccccaatatgtttacttatttgctcagtgtagccagttttccaaccgcgatggctgactccaccacctctgtaccctactcctcatgttctggaatcctcagtcaatgggctcctttggcccattcttccttgtggcttcctaatctccctagagtttcccagctttacctgtagtcttccagtgccccctgacccccaaccactcttatctttggcctctgggcctgctgtcctgtgcatccttgattcctcagctgctcacctacctgtgtccttggctgctgtgctaactcctctgtgacggaagggggacagggctttttttttttttgagggggattttatacgtatacacatatgtatatgtgtgtgtgtgcatgtatatatatatatatatatatatatatatatatatatatagttcattcaggtataatttacatgcagtaaaattcattcttttaaggctacatttctatgaattttgacaaatgtaatatagacatgtaaccactaccacaatcaagatataaaatgcgtccattaccgtagaaagtttcttcaggctctttcacagttagttctctcttcgcatccgcagccactggcatcactgatcagatttctgttcctatgattttgccatttctaaaatgttatataaatggaatcatgtattatgtagctttttgagtatggcttctttcacttagtgtaattcttttgagattcgtctgtactgttttaggtattagtaatgcattccttttttgctgttgagtagcttcatttctcttgggtaaatacctaaggttgggaatgctgcagggtcatataagtgtatatgaagtgtttaagtgtatgagaaactgccaaactgtttcccaaagtggctgtaccactttggattcctgtcagcaatgaatatatctacattctttccactatttggtattgtccgttgtttttttaaaaaatgagagtccttctgataggtatataatggatatctcttcgtggcttcaatttgtattttcctaaatattaatgatgtttagcatctttcatttgcatatttgtcagtcatatctctttgatgatgggtctgtttaaatgttttgcacatttttttaaaatgagtggttcatttgcttttctttttcttttttttttttttttgagacggagtctcggtctgtcgcccaggctggagtgcagtgacgcgatcttggctccctgcaacctccgcctcctgggttcaagagattctcctgcctcagcctcccaagtagctgggattacaggcacacgccactgtggccagctaattttttgtatttttagtagaggcraggtttcgccatgttggccaggctggccttgaactcctgacctcaggtgttccacccgccttggcctcccaaagtgctgggattatagatgtgagccactgttcctggccgggtggttcgttttcttactgagttcattttgaaattctttatatatgtagcaaatcctttttccgatacacatttgtaaatattttcattcattctgttattacttttatattataaatgtggcttgtttcatatataaaaatgttggattgaattcttgggggctttcctttttagcccttgtgctgtgaatacacaagggaaatatttgtgaaaggatggatctagatgttgagggaggtggagatcttggaggatcaagtgtaattatctctcctcagtgactggaggtacttgttgagaacaggaaggaaggactgagggaagaattaagaggggggggtggtggtggtggtggtcagagtttttggttggaggatttggtatagcaaattcaggggtgggataatggctactagaattgtgtaaaatagaaagataaggagtcagggggatttaacatgaaaagtgttgaacctagctgaaatcaaacagggagctgaaaacaacgttagtaaccatgttgttcagccttttcatttgataggtaggagatagccttaagagaggggatgcgatttattgaagattatatgcgtcatgaagtggcagagttaggacttaaattcagatctttaaggacagtagtgaaggaggggctcagcccatgtaggaaaatacatttgggggtgggagcaggaggtggaggaaaaactagaattctaatggcatatgtttttgttattctttatatccttcacataatttataaatattcttcttgtatctcctcagtattaagtaaaataacagtaacaagtctggaatgacagcagaattagtgattgagctggtaatagtttgaccagaaatcaaattggaatatatgttgggtcaaacagaaaacactagtgatcaagtgggaactcatttttggcacaacatgaaaatttgattttttttttttctgttcctgacatcaaaagggaaaagatactaaagacaataaaagatcatagatctgaattttgcttgttacaattagctttgaaaatactgactcccaaggttaggatttactgggattagaattgcctttgaattgaaagagaatgataaaaggaaatacctagaaaacctgatagtaatagttatttcattggattcctaatctaaatcaggcactgtgttaggcttcttggcattacattttcttaatctttccttaactttgcagaatatttttggtgacattatgttcctattttatcaatgcagaaattaggattcagaaaaattaaatgatatgcttaaggtcatatgactagtaagtgagctgtgttaatccctaggattgtgtggtgaacaaagctttttctcctttccttttaccagtgctaattaaagtgtcatttgtagactgatactagtttgctgtttattaccaattcatacaagataggtgcagaaattgattgtatgcacttagaacttctatagcaatttgacagaatacttttatgagtgttaagtctaacaataaaaaactggggcttgtattttatatttcttgttttttaaaatttcgtttttctaataattcattttactacactttacaaaagtatgattccctgatggattggaaagttaacagaaaaggttgctcctcacagtttgagaagccccgtctactacgttgcctctgtgctttcgagagactgatcaggatgaaatttactttagtatttctgctgagttttgaatggctggggagagaaggtcagagaaaagggaagaggcagtagggaaaagatgaggctgcaggggaggaatctttgggaggactttgcccttaagtggtagcagtaagatgagggcaataagatgaggggggatgccctgcctcctttggttgaaagtagtgttaggattgtggcgtctttctgtagagctctagcctgtttttgttgttgttgttgtttttgtttttgatacggagtctcgctctgtcacccaggttggagtgcagtggtgcgatctcggctcaccacaacctctgcctcctgggttcaagtgattctcccgcctcagcctcctgagtagctgggattacagatgtgtgccaccacacctggctaatttttgtatttttagtagagacaggatttcaccacattggtcaggctggtattcaactcctgacctcgtgatctgcccgcctcggcctcccaaacaaagtgctgggataacaggcgtgagccactgtgcctggcctagcctgttttttaattacacccagtggcaattctggtgttaatagacgagaacgaatgtaggaaaaagaatttacagaaataaagcaactggatgtaggagttcagaaaatctaaaaactccttttctctccttagaaatacagacacactccccttgaagtgttttccctttaaggaaaaggcggcaattctttggcagggccaagagttttgattggctccttctactgctgtttgccacgaagaatcctgaccagtccagttttgtttagagctggtttgggagtcagccgagctgccaagttctctgtgcctaatttgaagtgtattaatgtttcaggagtgggccagatctcttataggcacctcctacagttcagctttccacgttccaggaggaaatgtgaccctgctgtttcgggaaccccacctcatgtagtcttaatttctctccgaatgtgtttgaagtcttgccagcgtagagaggggaagtttaacacactaagagaatacatttttagggagcctgcccacaaggtggtcggtcccctatgccgtggccaaggaaaaggaacccactcatccttcaggttacttaatatatgagattaaggcctcagcccatataggagtaattttctcttcttctggatgtgaaatggtaaaacaggccctttaagaactagaccatttttagttgagaggaaaacattgatcacattggctccagataagagcagatactgtgtgtacttcctggcaaaaactttgtatgtggttcacagcaattcctgccattctggttgtgtctgaggggctgacaacagacagttctaatctaatctcaaaccttttacttgctggactggttcttaatcccagaaaccagcctgaggtcaagaattggttcctaattgccataggtataaaggtggcgctcctattgagggagttttcagtgttcctgctctggttgtcaccagtgtggcttgggagatggtttatgttggtctgtcccccctctatggatataaactaattgttaaacagttactgactcctgtaagtttagacagtttatagcgccagcctttaaatttcattgtgaaatataatcttcagatttattagaacagtttaacggaagaaaataagagaaagagctctaaaaaggtgtagactgtcaaagaaggctcatggaggaagcatcagttagaggactctcacagtactttataattacctcatcattatcaagtattggactaacattgtctttgaacatctctctctgttgcctgtagattataaacttcttgaggatagggcagtttctgttctttttttgtatttgactctggccttcttgatcgatttggtaaatatttattgagatcaattaaaataagatgctttaaaactgagcacaaaggacaagttacatttcagtagcttagtagtgaatttaattctgcaggtcttggtgctgtacttctttggtgagtttgctgggcccagatggctaggcttgtactttccttagacattttaatggcctgtcttggttgtgatgtctctaagcactaggaggacagggaatatggctcatagaagagggtgccaactgagagcctctgtccattctctccacccccacacaactcctttctgtacagtctttggtaggtaataacatttctttaaagtgatgattcctaggtgaaaccggaggccagttttgtgtgtactcttatgttttattaggtgtgtgggatttgaggaagttgtggtgctggaaagaatctgccttgccccatattactggtgaaaaaatagagacctaggaaggataaataatttattccaagccatatggctacttagtggccatcaagactattgtccaggtctccttagtgctagacatttaccacagtaccgggtaagtcccattttttttttttttgaggaagcattagtaaaaatcaattttacagaaacgaatataagcggtttgacttaggattgtgaatggaaacatatttttccttttgaatgctaggagaactatgccagagtttctttttttcctactttttgcatgatttagaagatagaacacatgaaaacagttccctaaaggaggtgcttcatttaaatgcttaaaaaaagcaggccacttcaaatttctaaaaatagcatttaaaaaaccccaaaatgatctaaaaagggattttagttgcatgaagactatactgtttggggggtttctgggctctagggaggatgctagctctctgaatgctttatgttcttatatgactcatcttgttagtggtgaccccagaagggcagtgggagaaatatgttccgaagggtgatttggaaggaagggatgatctggaaggaagggatgagaaggttgcaggcaggaaaactgagctaagtggttttagagagtgttttttttttttttttttttttttttagggagaaaaagaaaaaaggaaaggctgctaggagcttggtcctaactgattccagatgggcctgctacagtacaaaggttttcagtgtgtttgggatggggctgaccaagaaggccccctcagcacttcctgtgcagctctgcaattgtatgcacctaatcagaaacagcccttactgctggagctcaagagcaaccgtctcatgttgtctttgtgcctcattctgtgaactgctccctttgcctgccctgtttacctccctctcctagtctcttttcctttctaatcttttctatatttgttttcagggaatgttaaaaggaggggagatatgtatatataaacataaacatatgtatatgtttcttgtgggttgggagcagagaagagagggaggaaggaatggccaaattaaacgcagatggtgaatatttaggaaaggaatttttttctggacctgggaggcatttgctagaaatggggattgggaacatgagaatgtgaatgagacttggaaaaacaagccactctttatttttcatttttttgaatcctgcacacttgtctgaatggttcaaaatataacattgcatggggatggtttatttacattgtaaactgagtatcactggccctgtgtagctgtgtgccaaagggtgagtgtgacagtgactttaaacttaaaggaagtaggaaggtgttttgcacccacatcccatgtagtattgttgccaggggagcatacctggtgtgctctgacgtgggcttgaatttggccgttttcccacctactgcagtatatcaggcactctgcacagcttaaaagaggatttttttggtgacactcagctgcaggcactatgaattgttcttttgtgccctcctgattccaccagggatatattttatatatatacttgattttctattttgcttctattttggttgcctggttagactgagggtatgcctggtattgactgttagttttttgggtctagctgatgattacagaaactctgccatcccaggggtccatttaggtctttgcaattttattctaatccactcagctgttgtactgatgttgttgcgtaaatgtgagcttattaggatagactatgtaaaaatatactgtgttggcataaaggccttagcagcattgctttgttttgacctcttcatactttgtgtcccttttgtcctctcgtaagcaccatgatcacatttcttcttcttgtttttttagatagggtctcactctgttgtgttgcccaggctggagtacagtggtgcaatcatggctcactgcagtcccgagctcctgggctcaagcaatcctcctacctcagtctccaaagtagctgggactacaggtacatgccagcatgcctggttaattgaagagtgtgtgtgttttttttttttttgagatgggtctcactgtattgcccaggctggtcttgagctcctgaccttgagcagtcctcctgcctcagcctcccaaagtgctgagatttcaggcataagtcactatgcccagccacattttttcttgagctaaatgtacaatatatcctctgatgaaaaattttagtgctgtttctaggtagcgaggatgtctgggagatagagtttggatgctgaaatatttgatttttttgggatatttttgatgctataggaataatgtgtcagggtatttggaattgggatagcataagacaagttacatggtcacccttcttgagtgagtcttagcaatatagcattgcaaccgacggagaattatgttctcaattcaccagtaggatctttctcactgtgattttttaaaatcccccatttgactaggtgtaaagaagagaaggtagctaagatgttgtttgtttttcgagtggctcttatttgccaggtaccagactcatgttatctcctacaatttatcagaactctaggataaatggcctcaagtccatttgcgggtgagaaaactgcacatgcacagtgtcacacagctagctttgtttcagagacagcctcaacccattgtgttctgggcctaaaggtgatacatattcttccacattctgagttatatataaattccaaacccttctcagaaagaaactcctttctaagggtaatgtggtagttaaaaagatttttaaaaaatcactttaaacttatttttattgtcatccttgtcccattttaagcatactaacttcctgcctctgatatataaagagccgatgctggagagaggaaggaggcaaaccattttgtcatgtttatggagagacctcaaggctctaaaagctgcttttatttttttgagacaaagtttccctctgttgcccaggctggagtgcagtggtgcgatctcggctcactgcaacctcgacytcctgagttcaagtgattcttgtgcctcagcctcccaagtagttgagactacagaggcgcaagtcaccatgcctgacgaatttttgtgtttttagtagagacagggttttaccatgttgccaggctggtctcaaactcctgacctcaagtgatccacctgccttggcctcccaaagtgctgggattacaggcgtgagccactgtgcccggccataaaagctgcttttttttttaattaatggaaatttttattgggggtaattgtagattcttatgcagttgtacaaaagctacttttgaaatggcagaaaggcagaagttctgatctagaggcaggcaggtacctctttttatcttctagggcagtgtgcaaggagagtgtatgaggggctcttgagaccccacttcactttactgctctctgctgtctttgggatgtgcacttgtcaagtactcttaagtgctgtgtgcaagaggcacccatttgcagtactgaattcaggccgtaccttgaaatcttgttgatttgcttgagcagagacagtgttcagaatgtagggatagattgccggtggagacagtagtagaccttggaggaaaatcgtaggaattgatggggtgaagcaacaagatatcttcagttgggatcactgtgaagactccctacaatgtctttatttatttacttgttataatgtctttttctccaattcgactgagcttcatgagaggaaggactatgtctgttttccacacctgtattcatggtgcctagcactatgggaccatagtaggtgtacattttatgaaagtttgttgaatgaatgaatgccatgggaaattatggttcctgttgaagaatttaatcctcaggtcaaacctttgtctgttgttttgcatcagaggagtgactttgaacattttcctgataaaagagttttaattccataagcttcttttcttcttgtttactaccttagctcaagatcttctcttaagctctactgacagagtcttgctttatttcagaaaatgtgcttaagacctggaagcccagtctgtgaagcatctggtttaccttgacctgtaaaattatcagactgcttcttttccctcccgttctgtgtgtttaagagaggcgcataattctattttgaggcttatgatagaataggagaataaagcaaactcgatgactctgtttactttaaaaacttgttgctcatctaaattggttgaatgactatcccttcccttaactaaccctttcaacttttcatcctggattgaccttccctaaatttatctttcataaaaagaggccatagatatatttgatctctaacccactgggactcttttttaagtttggcttttggctttttttttggtaacctttttctctaagatcaggaagaaagggataagaaattgtggacaagaaaattggaaaacacttaagaaaaagtttcgggttgtgtgggtgtgtgaaagcatatgtgtatacatatacatgtttttcctttcctgccccactgttctctagctagaatgacctagattttttttattctgggaaaaattgtattatttctggattctgctgtttcttttaagtagttggactggaagatgctggacttataacttacatttttaagttctttcttgtactcttaagaaaagtggtaaatggtacggattttagatgtgtgtactggaaacagtagcactaataaggaaatgcctttgtcctcctgttctttgttgaaatcagcttggatagctgaggatggtggagggttatttattatttttgggctccaatgtcaaaattctcagttttatttaaacactcaacacaattgatatttgagtgtcatgcaattattagctaaggttagtattcacttaggttaggaaacatctcttaccattttcatctcttgtagcacctaacacagccctgggtgcatacgaggcacttgataaaagcttgatgagtttaatttaatgtaatcttgcttaattcatagattgagttgtttgacctattaggtggaagaaaacatcattgtccttttttttttttggtagggtattttttttttttaattttttattttgagacaaggtctcgctctgttgcccaggctagagtgcggtggcacagcctcctgaagtgctaggattataggaaaattcacattttaaatgctactttatgaaagtttctaaaagaaaacaaagaagaatgttttcatgatattctttacttgaactggatataaatgctgactataaaggaaaaaatgatgatttgactacatcaaacttaggaattatctgttcattaaaagacgccattaagaaagtaaagctagatgtggtggtgcacacctgtattcttagctacttgggagggaggctgaggcaggaggattgctttagaccaggagttaaagatcagcctgggcaacaacatagtaagacctcatctctacaattttttttttttttaaagttgactgcgcataatgccatgtgcctattgttccaactactccagagtctgaggaaggaggattgcttgagcttaggagttcaaggctgcagtgagctatgattgcaccactacactccagcctgggcaacagagcaagaccctgtcttttggagggggaaaaattatatgtatataaaagaaagtaaaaaggcaaactacaaagtaggagaaagtatttgtagtatagggatctggctagtctctagaatatctaaataacaactacaaacccatatataaaagaagttcttttaatgaatcttttgaacaacccagtagcaaaatgggcaaaatatttgagtagttacttcacaaaagatgatctccaaatgttccaaaaaatggtcaggatcgttaatcatcaggctaaagcaaataaccacgatgagatattatcacactacctccagaatgactaaaatgaaaaaggcagacattaccaagcattagtgaggacgttcagcatctggaaccctcatgtactggtggtaggaatgtaaattggtacaactttggaaaactggcagttggtagtatctaccaaagctcaacgtaagtgtaccctataaccagtcattccactcctaggcatacccaaccgaaatgtatacatgtgtgcactgaaagacatgtgcaaggatttttaggaatagcctcaagctggaaatggcacagaggcctttcaacattactgaaatatttttcagtaaattatgatatatttataagatggaatacactcaacagatggatcagttttacagatataatgtggagtgaaagaagccaacacaaaagaatgcataatgtgcaattccattaatacaaacttcaaaacaggcagagtgaatttatggtgttaaataaagtcattgtgggctggtgggagtgactttgcaaaggcacaggatgggcttctgtagtgctggtaatgtcctatttcttggcctaggtgttagttacatggcagggggcggggggatggtcactttgtgaaaattcattgagttatgcacttaggttttttgcctatttctgtatatgtaatcgctttggtagaaagtttactttcttctacttgcgttctgtgattgctacagctgatagmtagctttcccttcatacacatactgatccttttcctgtcgagcttgtaggatgtgagtgtgcacatacatttttgtgtttatgtgttggggtgttatgtggggatgaaggtgctttttaaagttaatgtaaatttgcttgtcagatattcaacatgctgtttcaaacagccacaggaaagtagaattgatgaataagcttcattgaccactttttaaactaattctccaagaataagaaggacattttcattctacctaataaggcagcagatttggattttgctctgcagacaaaagaacctcttcattgagggtctcagccactaacagcttcattttcagaaggatgtacctcattttggccattattcttatcatggagactatgaggagaacaaatctccataatattaatttttttccccccttttactctgtggaaatctaactcaaagtaaggcattttaggaaaacctaatttgggttaggtagaaaatctaaaagatgttgccttgccttctcttagctggtcatatctctcaattctgaacctggccttagtaaaattcttcaaagttcaagtttgttatgttgtcttatgaccatccctttgtaaatctttgttctccctccatggaatgctcttaccttcctcatttacttaaatgaactcctgctcattctccatggcatcttctaaaagtagcctttccttctgtgtgctgtcaccatacctatatacaccttggctatattgaataccacgcatagctctatttatttgttctttggggccagccttttgagattatcgactggtgtgtggtaagtattcagtaagtattggaagaaagaatggatgattgaaaatattatttgaaagacaataactattttctaaagaataaaatctgattataatatttgacatcagtagatacattttttttccagaaaaggtgattgtttgccttaatttccgagtaaaaaaggatatatgtttacaacagggtgtatgttgtggctgtaggagakaatgatgctaactggttcacatgggtagcagacacgtgaccttggcctctttagcatggtcctctaatcagctgatttaattttagtggaatccctgaagaaatgctctggttctatatgtggaatgtagaaatcataaatctaatgtatagatcctgactgcattagggtttgtggattaaaaccaacaaatagactgtgtaggtattatgacattataactgggccagtgtaggcattatgacagtgataatttttttcatctcaaatattatgaaattaattccagaatgttatctgaagttttgtcatttcatttcagcatgtaatttctcaagccaattttaatttaaaaagatctgagtagaatcattgccgtttgtccagaagtttagaataataggattagaataataaattaataagtattgagtgcctacttagagtttaatactgttagtaatacataaaaagtatgactttgaccttgatgtcaagtgtcctatattttatcgatggcataagagaacacagatgtaaaatgatttctagatgtttttttccaaccctcactatctgaaaataggaagctaagtggaaaaatgcacaggctttggaatccaaacagatctgggttagaatcctggctttttaaaaaaaatgaaataatgagtatataaccatggtcaccttgacatcactggaactctgtttctgtgtttgcaaagtggagtaagaatgtatactaggcagggcatagtggctcacacctgtaatcccagcactttggaaggccgaggtgtggaaatcgactgaggtcaggagttcgagaccagcctggccaatatggtgtaaccccatctgtactaaaaatacaaaaattacccaggcccggtggcgcttgcctgtaatcccagctactcaggaggctgaggcaggagaattgcttgaatccgggaggcagaggttgcagtgagctgagatggcacgaccgcactccagcctgggcgacagagtgagactccattgcaaaaacaacaacaacaacaacaaaaagaatatatactagtgttggtgtttttatttttttgaaatagcgatgacacatataaaactcttggaacgtaataagtgctcttaatgtacgtttgagtcaaagagtagataaatggagctttgttttgcaactttccacttagtctaggccattgctgatagatttcttcataataagtcaagtttagtaattgagttgatgggcactctcagaaactgctttagtctccctcttgtagaataaggtgactgtgcttattatacttaataattattagtgcttttaatactaattaattattagtgcttatcatacttaatacttagccagtggaaccatggtgtccataggaatgctttcacacaaggaatggcttgttaaggtcaacaaggagcgaaataagaaaacaaatatctcagagatgggctaatcatattgtcccccaccccgcactgcaatgtgggtttcagttgttagcatgtgcttcatcctttgctgttttccacaacagttataaagctttttctagatgcctgtgtgttaactagaggcatcttgactcttttgacttctctaattgttctaaattgtttaagttttctgtggggtagatgactgttattatactaaattattcttctttcctgtctttttttttttttttttttttttttttgctggagagttggtgccctggagttgagtctctgctttgcaaactgaaaatacaattttcctgtgtgtgccttatttttttcattccttttctccctttcctactacaaggctctgacctgcttggagcccttattacttggtcacaattgatactttgtccttcagagtcacataggacatagccactgcgttgattcagtgctcagctatcaaatatggctctgagaaggaattacttctctagaatgcaaagtgggcatctgagccagagaatgaagccctggtccatatttagtcattatttagggagagtgaggagtaacaatttcaaaattagagtttggattaagcaaagaaaatactagtcacaaattggctggtgtatgaggtgagtagagctggatttttaccagaagtagaaacctttgtaggaactgcctgtggttcaagaagttatgtatattttatggtatatctatgattatgaaaggataattttctaaaagtttatgttcttcctctggggattgttaacatctgttaatatccacaggaattttactaataataatgccaacttactcttgattcagtccctttgacacagggacccaaactaatttacattaattttgtcagtaattcttataatatccctgtgtgggagctgctttttagatgaggtatgtgagaatttgttaagtttacatagtgggtcagtcccttggatggaaagttggacccaggatttgtgcttccaggcttagtgtgtttgatcactgaagtgtgcagtctttttacctaattctcctccccatttattcttcctatgatggaggaaatcatatcaaggaaatagcaggagaattccatcttctaagaggttaaagacttttctgccttgaggcgtggagttcccaatccttggcttaggatggaaggaaacagcggaacactgtgatgttcagctgaaatgacccaactgtttttttgcatagttttttgttctctttttaaaaattctcctgttgggaggaggtgaatgtgagaattttctctctgccaatcttatatgtgaggcaggtggcttggttgtttttaatgctcagcagatatcactacttgcttttgggttggggaccagagaggaggaggtgaagcagccacttttgggtggggttgagaggagggtacaatgttggaaggaggacatttctctgtgttttcttagtcataggactctgaatcccaagtagctaaatttagctcaggttcctgttgaaagcatcgtctttttggggcgggtggtgtggggagaacggaaaacctttttgtgtatcctgctccatgaagccaatagggaagcaggaggaggtgaggttaccatggagatggtagctgtgtgcaaggggagagcagcagggtttagaattccaggaaggaagagagagtgatgtcatcagattccatggaccagcccaggaacccctgtgaggttggtggggagttgggtgtgtggggggtggtggagtgggagtttgtgcaggggaattgtggcttcagtaaggtgtggggagtccagttcaagcagagaggtcggtcgtgtggaattgtgctgagctgcattaatgcctgatttaaaaaaaaatctggaaaccattctgaatttgcagagtattttctttgttgaaagaagacatttatttaacaaaggagctcatctagatgtagcaatgtaatatctttttatagttgtatccctgaagtatttgtgtgtgcctttatcccttgtatgtgagggtatttgtgtgcatattttagtatatagttgcctttgtacaataccttttatggtgctgcatgcagttaaatgcttcattaatgcctgctgatggtattttttttatatggatgggtgtatataaataaaacacacttaaaaataatctgaaaagaatatcaaagcagttgctttttcagcagaaaggaaaactgcatgcttcaagacagttgttctgaacatatgcatgtttgtgctgatagtgaagggcaaatgtgtttcttttggtatgactaagaggctgctttttttttttaaacaaatataacagaacctgtgcatccaaatgaatattgcccttcaaaatagtcaccttggttggtgatacaaccattgcgcaaaacctgaggaactctcattcggaatcggctttagagatgagtgatgaggaaaacgttttcaatacctaacactgaatttttttatttaaaaaaatacctacctaggtttttgaaagacactaggtttcttcgaattggctcttcgtgattttgtggtgttgtcaaaaagtcaaatctgtgctcaaatggtgagcttttaccccatttgaagatacttaaagtcatgggtttaggctctgaaggcattttcattttcagatcaagggctctttaaatgtttagtttagcagtggccgtgttttgaatgatggtagcatctgaggaataagaacatagccttcccagggcgacatcttctgaggtgacccatttggatttatttgttcaagtgtgtctgttaaaatcagtgacattaccattgggtaatgtgggaagcagctttagatggtgtgtctgagggcacagactctttgaaatcgggttggttcaagtctgaacccctgttctgcagttcactcactgaccttggacaagttagtctcttggtgcgttggcttcctcatgtgtaaaatgggaatgatagtgctgtgagtaccaacctcacagtgtggtttgaggactaagtaagctaatatataaagctcttagacatttggtgtgttctcagtcagtgcttgctgtgattattgtcggtaataattatatatttctttgaattacagaattctgaggtagaatgtgcctggagatagtatagctcagtagtccctgttctgtacagttggcgtattgtatctgtggggtccacatctgtgcattcaaccaaccacggattgaaaataattcagaaaaaaaataacaatgcaacaataaaaataatacaaataaaaatactaartaactacgtagcatttacactgtattaggtattataagtgatctggagatgatttaaaatctctgggaggatatacataggttatatgtaaatactgtgctattatacatcagggacttgagcatctgtggattttggtgtctgagaggggtcctcaaaacagtcccccatggacatcaagggatgactgtattgaagtcaacctggacctcattccagacactactgaatcaaggagggaaatctgtagtttttagattattcccaggtgattcaaatgatcggtcaagattgggaactattgagtataatctgtttacagtatggccccagcactagaagcttcatttcctggtagatgcagaaatctcagacgccactgtagacctactgaatcagaatctacattttaacaagatacctagtgacctgtctgcatgctaacatttgagaagcactgcttttcttctaccaatgggaataattgggtgataaccgcaggttaaagatgaattatctctccatttttcccattgctggaagggaaacagtgtggctaaaccagtgtatagataatcatacacttaccttccctatttcttggcctaggggtaaatgcttttctggactaaactgctgcgtaacatgtaacagaaagaacagttatamttatggctctggctctactgtttactagctatttggcctggatccagtcacttaatctctctgagtctgactctcctcacctgataatggaaataatacccagaaataatgtatatcaattatctagcgcattgcagtgcctgcatatgtcactggcttttccttttcccttgccttcaacctttcattgataaatctgtagtgtagttctagtcccttagaaagggccaccagtggagtctcagtaccatctcatctctgtgggctcttcttgcccttctcccagctatcttgagtatttaattgtacttgcagaaaactaagctttacacaatatatatatatatatagttttctctatctgtttctgcaaaatgccttttacttaatggagactattatctaagagggctagaagatgaagaactaaaggatttgagtaattgagttgatacaggaatcaaagtataacgagatatgacaggcagctcttttatgaattcttaatagttgaccatttgtttaaaaaaatgtaattcctggtttttaaaacttggcatcaagaaaaaaaatcctcggtaggtttgaagttgtttgaagtcttttagattggttccaagcaagaattaacgtggtaattatcagaagatcactgaattggtaagtaatgagcattatcttctttctgaccagggaattaatacaataaaaggaagttcagggacttgctctgaggacactagtagtaggtggcagagagtctaggtcagagagttggcagttgtagccagtagggcattggaagcaacagcagcaggaggaaatagaaaagtccagttttacccagatcttaatggacttagggataggcaggattgtgaactcaaagcatataataaaaattgttacaataatagtttttctctatggggtaggtatactttcaggtgctttgtataccttgtgcctaaacttaacatccttgcaaggtgtagacatgatcacatatattttatagaccagaaaataaaattgaggcccagaaaggtgagtaacttgtcctaagttgttcctctaataaacaccagagctggtttaacatcatgttcaatagcaatgtgagtgaagagactgttataaaactcaattgaaataatgtctatcaattaaaataaaatttattattttgtctataatgactttttttggggtagaattgttaatttaaatttagactgtgatagtcaactcagcctgtcttaaagggacttttttgaatgttgcagaatgatcctttgaaatgtatttcttttatactctgaggctaattaagaggtatcttttgtttttttaaatgccaaagcttgtgaagtcttcagtttagtgaaacaccagtttaaattgaaatatcacaacacaaactgatttgttggtggttatcaattggcatatttagtcataatgagtattcacataattgtgtctgttagtctgttattccattcagatccagatgtagataattatcaatgattgcacagagtgaatcatgtatttagacagatttctaagttacggttggaagaactacaaatgagaggacttgggttccaggcctgtttttgtgaccttggacatgtcacttgaaactcaagggaatgaacctgagtttccattatcaatcaaaagagaataatgttrtctatctaacagaattgttatgagtaggaggatgtgcttgacaccaatttctgcttcttagactagctctgtaaccttgagaaagacatttaaaaccttgtggtacattggttttcttatctgtaaggtcagtctgtgctatgtgaatatggttgcaaggtaaggagggtgcaagtaaagtagctgaattagaattagatgatccctatgggtcccctcataatctgtggtcctgtactagtcagaactgcctgtgtgttggtatgtggtgaagtgttacatacaactaagatactgtttcttcttattattattgttaacagggccaccccattaaggaacaggcactgtgtaagatattgcatgtattacctcaatccttgtaacaatcctatgaggtaggtagtattctcatttaaagatggaagaatttgaggctgagagatgaattagctttccacagccatagagctagttggttaccagagacgtagatcagtgtgattctaataactgtactttcccccatacctcactacacatgctactgtgacaggccaaaactaggacatgggcttattatgccacaaactgcctgtaccaaagaatgtaatgacgactgagtagttatgttcttcaccaccaaacacttaacagttaaagaaggggagaaagacagtttcacttcagtgttcctgctgaagtagtaaaaattattactattactaattctccatcctcggttatgaatcttttaaataatctctttggcaaaatgggtaatacaaataaagcacttctgctgcatactaagtatgacagttatctaaaggaaaactgcttctgtgattgagttgccagctgaacttttttcatgggatgccatttttatttgaaagaacaactgatagactatggtattcggacgttttattaaaaatgaatgaggtggccaggcgcagtggctcacacctgtaatcccagcactttgggaggctgaggcgggggatcatgaggtcaggagatcgagaccatcctggccaacatggtgaaaccccgtctctactaaaaatacaaaaattagccrggtgtgctggcatgtgcctgtagtcccagctacctgggaggctgaggtgggaaaattgcttgaacccaggaggtggaggttgctgtgagctgagattgtaccattgcactccaggctgggcaacagagcaggaccctgtcttaattaaaaaaaaaaaaatgaagcaagcctgtcattttaaggaaaactgatatttgtggccagtgataaaatttgaactttcaagcaaaaactagagttttggaaaacttgtatcctggcctatgagcttgacagctctgaaccttaaaagacttttcagatgagattggtggtgatattagtgaatgtgaattttttgatgttatataatgagatgtgtcaacagttggaagatctttataacttagtgaacttgtattttataaatgaacaacacataatgttacaaaatcatgcataggcaaaaaaaatctattccaagtacaagatcaatgaatttttatattaacagtatgaaaaaattcattgataaggtttcacatgccacattgcaactaacctttggtacagtattaaagaagaatatctagagataggcgaaaaggctattaaaataccttgcctcttccagatacatatccatggaatgccaaatttctttcttatacttcagaataatattgaaacagattgaatgcagaagcaggtatgagaatccagccatcctccattccatctccaatccccaggccacagtctggtactggcttgtggcctgttaggaaccaggccacacggcaggaggtgagcagcaagcactactgcctgagcaccacatcctatcagatcagtggcggcattagattctcataagagtgcataccctactgtgaactgcgcgtgcgagggatctaggttgcctgttccatcgaatgcctgatgacttgaggtggaacagtttcatcttgaaactatccccaccctaccccaccccccatggaaaaattatctcccatgaaaccagtccctgtgccaaaaagattggggaccactgttctattaagttggatgttaaaaatatttgtagaaatgtaaaataatgatactcttctcactggtttagtttacaaactaaaccattttcataaaatattttttaggctaatataatggttggtttattattgatacttttaaaggaattaacatatttttaaaagtactcagttttagtttctcataggaaaatcgcagtagttataaccacagaagcaaaagctctttggagtctttggtaattttttaaagtgttaaggtattctgaaatcaaaaaagtttgagaattgcagctctagttctctaatctttcatttcagtagtggttgaaacctcttaaattggttctttaagtcatgaatggatcttgacccacaaattgaaagagcgtgggctagagttagaggattacattgtgaagggaggtgggattttgctgaattttgcttgagttgatgtttgagaacgtgccaaggtgtgaagtaaattgagtaaagtttctatctggaaattagctatttgtggtcatcctccaaaccccattcaagtcttacctactgtgagtctcctctttgtaatttctttatgcctttctcacttgattatcaaccatgtacactggttctctctgggccatacatttacattttattacatggttcatattgtatttgtttacatgcctctttcccttactagactgtgagttcttttgagaaaagaatccctagcttattttcctttgcattcctaccaagttgcagacacataaacgtccctcagtaaatgtttgctgaaggagtaaatgagaagaaaaagagaataaccaagtggggcaaggcttgggatatttggaacctaatcatgtaagcaatggagggccattactatggaagtggtatgagtggtgttttaggtagttaaccctggccctggtaagaaagctgggcaggggtggatggaggctagctcttagctggaccagccaagagactattagagtaatttaagcttgaagtgatccaggcctggattaagatgagtgctttcgccatagataataaggcatacatcctgaatcctgaggagtatttgcaaaaacagaaacaataccatccatactgcttgacagttgttgtgtacttatgctgaattctgtgttaagagctttatgtatattgtttcgtttaatcttcacagcttccctgaggtaggtgttgttattatctccatttttttctagttaagtacaaataatacatgttcatttgttgaacagttagaaaatacagataagaaacctcctccccccacaaagacatatatcactcataaatccaaatttaacaccaagacatatgaccactataaacattttgggatatatccttccagacataaaaaaacatatatattgtgtgttatatatgcctgaatatgaggaaaccatgaatataaggccttaatgctgtttttccattgaaaggaagggctaacctattaagcgtttagggaaataggcaaatatctacttaaaatatttatttatgtaatttagaaacattttatctttttgggaaaaaatgtgtatatgctctactgcatcagtatctgtattgttgcttagaaccactttgaatcttcagttttccagagtatatattgagatacagcacttttttgtgtctatatttattgtagtcactgatgattttatctcaagctgtaagtacttattcaaataacaacaggaagtttcttcatttgtactgtggtgtatactgcattgcttttaaaaaaaatgttaatggaggttaaattcatataacataaaattaaacttttaaaaaagtgaacaatttggtggcatttaatacgttcacagtgctgtacaaccactatctccatgtagcttacatttttacatcaccctcaatggatacatcacccgtatccattaagcaatcatcctgtctttccccttccctgctggcaaccaccaatctgctttctcttttgatgaatttacctgttctggagattttatataaatggagtcatataatatatgrccttttatgtctggcttctttcacttagtactgtgtgttttcattgtttatccatgttgtagcatatatcagtacttctttcctttttataactgaatgatattcctttgtgtgtatatagcacaatttgtttatctgtttatcccttaatggacgtttgggtttccatcctttggcttttttttttttttttttttttttgagatggagtcccactctgtcgcccaggctggagcgcagtggtgtgatctctgctcactgcaagctctgcctcccaagttcatgccattctcctgcctcagcctcccaagcagctggaactacaggcacccgccaccaggcccagctaattttttgtatttttagtagagatgggatttcaccgtgttagccaggatggtctcaatctcctgacctcgtgatccgcccgccacagcctcccaaaattctgggattacaggtgtgagccactgcacccagcccatcctttggctattgtgagtagtgttgccatgaacatctgtgtacaagtattggttttgagtacctgttttccagttctttgggtatatacctaggagtggaattgctgggtcatatggtagctctatatttaactttttgaagaactgccaatctcttttccacagcagctgctccattttacattcccaccagcaaagtacaagtatttgtcaatttatttttaatgaagaacacaataagacagggaaagtaaagaggaagtatgtgtagcctttgagtctattagagctctgtatctcagattttgctgatggacttattaaatatttatttagcatcacttcagcactaaatgaaatttagctcagggaaatgaatctaatctgtttcaagtagtgaacagactaagaagtgatgatcagaggaatgaaggaatggaaatttaaatagactaaagttccttgagggcaaaggccttattcatctttgtgtcctcagcatttaacaaagtacttggtgtattataggtttttttggggggtctccaagactaccctaggtccagtgaattatctaggacttatggaactcagatgtagtcatacttatagctatgctttatactagtaaaaggctataaagcaatgtcagcaaagaaaaaaggtgcatgcggtgaagtccagaggaaacctgactcaagcttccaaaagtcctttccaagtggagtcacaggacttgcttgattcctccagcagtaagttgtaacagtgttgtctaccagggaagcttgttacagacttagtgctgagattttttggctggggatggtgaagggggctgttcacataagcaccctaaccctagcacaaatcaaaattccagactcccgaaaggaaagcaggcattaacagataagagccactctgatcagttctggggatagaacccttgtgaaatcttcagttctcagatactagctaaggccaaccttagcagtcagacctgctacgttaattctttttcacatagatgttcagtttctttaaaaaatatgttcttaggtctgtgaagaaaaataaacaccatagtagaaagccagcagggactttaatgtaagacagacctggatttgtaatatgggggaaaaattgtatagtttttctgagcctcagtttccttactataaagtgatatatcacagggttttagtgagaattaaaagtgataatgtttataaaacactaggcataatgtctgtcttatatatagtaagtagctgtcagcattttttttcagctcacttgtatcagtccaggtccagccaggagagagagactacacagtactttggacagggcatttaatataaagaattatttacctccaggcgcagtggcttatgcctgtaatcccagcactttgggaggccaaggcaggcggatcacctgtggttgggagttcaaaaccagcctgaccaacatagagaaaccccgtctctactaaaaatacagaattagccgggtgtggtggcacatgcctgtaatcccagctactcaggaggctgaggcaggagaatcgcttgaacccggaaggtggaggttgcagtgagccaagatcacgccactgcactccagcctgggcaacgagcaaaactccgtctcaaaaaaaaaaaaaaaaaaaaaaagggccgggtgcggtaatcccagcactttgggaggccaaggcaggcggaacacgaggtcaggagattgagaccatcctggctaacacggtgaaaccccgtctctactaaaaatacaaaaaatttagctgggcgtggtggcacgcgcctgtaatcccagctacctgggaggctgaggcaggagaatggcatgaacccgggaggtggaacttgcagtgagctgtgattgtaccactgcactccagcctgggcaacagagtgagactctatctccaaaaaaaaaaaaaaaaagaattctttaccataagaggagactgaaataatgagaaattgactcctaggaagaaaactctaaataacagcagatatagatctgctgtatctataataagaaatataataatatgattgatgtgtgacaaaatagaattagtataatagcagctaagcagctaccccgggaccgagatatcatacccaaagagccgtctccctcaataccaccaaacacttcctggccgagagactgaaatctgaggggctttggtggagaaggcatgactttgactctcagaatggcagagaagtaagtccctatggacttataccagcagaacttgctggaaatctgtccttttgaagttgccaaaaactaccctctaggatacttgggaaagctcttcacaaggagttgtctcaccagaggcactttgctgccatatgacaacatgaaaaggtttactgagggaagctactagctgctggctgctgtccattgtaggagctaggatggagggaaactgcttatcctgtaagaacctgctaggcaagcacaatgggacctggaagcgaaatgctttcctcctacagtgtatctcctgtgtcctctatgggtaaagcttgacatcatgcatgctttgcaaaggaaaagtatttaaagggcccaggttcattttcacacagccggcaaaaaaggtaaatttggagctgataatcaattaattgataaccagtatatagatggaatggatgtttaattctaaatcctcagaaaacaggaagaagatggcaaatggagagagatctaaggaacctcaaaaataagtaagacacatgcaaaaaaaaaaaaaaaaaatgaagttggaccttacatcaataccaaaattaactcaaaatggatcaaagacctaaacataagagctaaaactataaaactcttagaagaaaacttagagtaaatcctcgtgaccttggaattggcagtggattcttagacatgacaccaaaatcacaggcaacaaaagaaaaaacagataaattagactttatcaaaattaaaaacttttatgcatcaaaggacgctattaacagagtgaaaaggcaaccaactaatggaagaaagtatttgcaaaaatatatctgataagggattaatatccaaaatatataaagaacttttacaactcaacaacaaaaaagcaaatggcccaattataaaatgggcaggggacttgaatacacatttctccaaagaaggtatacaaatggtcaataagcacatgaaaagatgaaaaggacatgaaaagatgctcaacatcactaagttgtaaaggaaatataaatcaaaacaatgagataacacttcacactcattaggatgaaaatacacacacaataacaagtgtaagtaagaatacggagagattgaaactcttgtgctttgccggtggaaatttaaaatggttcagtgctgtggaaaacagtatggcagtcccttaaaaagttaaatattgtcactgtgcaaacaccaaagaattaccagtgatccagcagttctgcttctgaatatttacccaaaagcattgaaagcagggacttgaatagatatctgtacacccatattcatagcagctttattcacaatagttaaaaggtggaggcaacccaagtgtccattgacagatgaatggatrgacaaaatgtgatttttacgtaccacatattgtaggctacaatacagtgatatgcacataaaattgtgttttatataattttaacacaatawtattatttggacttagaaggaaattctgacacgtgctacaatatggatgaaccacaaagatatggtaagtgagataagtgcagtgagctgagattatgtcacggcgcaaataaatattgtttgactattcacgtgaggtacttaaagtagtcacattgrtggagacaaagtagaatgctggttggcagtggacggagggagacaggaatggggagttagtgtttattgggtgcagcatttcagttggggaagatcagaaagttctggagatggatggaggtggttgcacaacaatataaatatacttaatgctatagaagtgtatactgaaaaatggctaaaatggtaactttatgtatatttaaccacagttttaaaaaaagatgaaaggaaactgcaaagaatatttatagtatgatcttgaacctcagtactagaaaagatagattaacggggaactttatttttaaaattttaattaaaaaaaatttttttttgagacagtctcactctgttgcccaggctagaatgctgtggtacaatctcagctcactgcagcttccacctcctggactcaagccatcctcccatttcagcctgtcaggtagctgggaccacaggtgtgcaccaccacacctggctaatttttattatttcttatagacccagggtctccttatgttggcccaggctggtctcgacctcttcccaccctggcttcccaaagtgctgagattacaggagtgagtcactgtgcctggccagaattttatttattatttatgtacttcaaaatataattttgtcatgattgaattttattttatttttttaaaatgcaagaacaaagtggatttgtaaagaaaattgaaagaactgagggtgttagccaaacaggaattgatgacagcagagtggactatctggctgtatgaagcatacgttgtcatacctgggctgtgtgatacggccttttgttccgaggctgcacatctgtacagcatgtgactatactgaatactttaggcagttgtaacacaatgtatctaaacatggaaacatgtatctaatgtatctaatttatctaaacatgtacagcaaaaatacagtataaaagataaaaatgatacacaggtatagggcacttgtgaatgcagcctggagaattggaagttgctgtggatgagtcagtgagtgagtgtgagtggatgtgaaggcttcgggcattactgtacactactgttgactttatcaacactgtacacttaggctacgctaaatttttacaaaattatttttctttaacaacaaatttgccttagcttactgtaacttttttactttataaactttaaaatttttttaactttttgattcttttgtaataacacttagcttaaaatataaacacattgtatagctgtacaaaaatattttatttgtattcttattctataaggtttttttaagatttttaatttttttttttttttttttttttttttttactttttaaacttttttttgttgaaagctaagacacaaacacacacattagcttaggcctccacggggacaaaatcatcagtatgctttccacctccacatccttcccactggaaggtggtaatggccagtaacacacatggagctgtcattttctatgataacaatgccgtgtgctggaagacctcaggaaggacctccctgaggtaacttttttttttacataagtagaaggagcacactctaatgaaaaaaagtatgatatagtaaatacatgaaccagtaaaataaccatttattatcatcaagcactgtgaactgtacattgttgtatgcgctagacttttatatgactggcagcacagtaggcttgtttacaccagcatcacacaaacacataagtaatgttttgtgccatgacagttatgatgtcactgtgataggagtttttcagcttcattataatcttttttttttgtggcagggaagagttttgctctgtcgcccaggctggagtgcagtggcacgatctcagctcactgcagcctctgcttcctgggttcaagcgattcttgtgccctcagcctcccaagtagttgggattacaggtgctcaccaccacacccggctaattttgtatttttagtagagatggggtttcgccatgttggccaggctggtctcgaactcctgacctcaggtgatcctccctcctcggcctcccagagtgctgggattacagatgtgagccactgtgcttgaccagcttcgttataatctcatgggactaccattgtttatgcaatcagttgttgaccaaagtattgtcatgtggccttgactgtgtatgtcacaaaaggcagagtttctttggtcactttagaggtattctcattcattctgttcttgaatactagaaacagtttataatatcactaggttttgaacaccttacagtgaggcagaatggccatttagcacatattcctaaatagctgatgtagaggaagctaaggaaattaaaggttggttatttggaaatgtgctactttgtaggatttattcccatagactatataattttgcaataaatagacgtgggggttgggaaggaattctttttgagcttctcctatatgttaaatattgtgccagataagcgtcacctgattatctcattggatgtcacaactttatgtggtagatattatctattacacagttgagaaaatttagagtcagagatattaaggattttgactagtcacatagttagaaagtgacccagccagaatttgaatctgtatcttcaactcccaaggttccgtccarcctttctattgcatgatgaaaggagttacatatatctgtaatataactagtagagtctgaagtgaatagtttatatgatttgagagtcaggagttgtaaattctgggttctctttcatacctacctagtttgagtgactgtgggcaaggcacttctctaagtctcagcttcctcacctgtaaagaaaaggggtttgattggttatttcttagacacctgcgaccactattgaagaaattttggtgtgtttcaaagataatcttcaagaacccagtaaatcctgtatcagattttaccatgaaacatactgcttataccagctgatttttaatttaaaaaaaaggggggagcggtaaatgtggagggagtagtgaatgtaacaaataactgtcattgattgtcttgatagggaggtagaatgagtttttttgcagcgaaagcttagtttactagttaacagttggacctcatgttgggaccatgttgttagatactatcagattcgtatcacttataagtcttcatcttatctctaggtattttgaactcttatggtttggaagcagaatgacgccctgtggtcacttagcaatttctcttcttgaggccaggcacagtggcttattcccgtaatcccagcactttgggaggccgaggcaggacttgaggccaggagtttgagaccagtctgtgcaacagagtgagaccttgtccctacaaaagataaaacaaaattagccgggtgtagtggcacatgcctgtagtcccagctactcaggaggctgggataggaggatcgcttgggtctgcgaggtcgaggctgcaatgagccatgttcatgccactgcactccagtccagcctgggcgacagtgtgagaccctcaaaaaaaaggtatatatttttttctcaagccagagagatttgttgctgggattagtttttgcatgtaatagcatatgggattttacatcttctgttcctgtggcattccttttatgtcccaattcaaaaataggctcaatacttgaaaaacaattaacttgctgcgaataacatagtgaaacatcctgagcaacttgatttgcttttttttagtcagtgtggtctgtttccttctgttattagatacatgcaaggtgatgtgaaattcattttcgactggggagtaagtcaatgaaaaatctgagctcgtacccattacccaagttatttgtagaagacagcttcattttgtatcttcctttgctttatctcgctttcttctctccaaactgcagagtggtaagaattctttttgttccattttcattattcttcccctttcattttgttagacacagaagaaaggcagtgggatggttttgtggatttgtttttttgttgtcgttgttgtttttcttgagactggctaatttttgtattttttggtatagatggggtttcactgtgttggccaggctagtctcgaatccctgacctcaaatgatcctcccacctcaccctcccaaagtgccgggattacagccgtgagccgccgcggctggccagatttgtttttttcattgcttggtttaactttgttgtgtatttccagttttctgcactctgctcatagccaactctcagcaatgatagaagccaggaagaaatactttgattggcagcatgatgtctttcttaagcttctcgggcaacttcactttggttattgttttattggtcaatgcttaggatttatggctagtatattatatcacaagtataactgtatggaaagcagagctttggagcttcagtattgttaagttttctttgtacctctcttaactgtatttttaaaatgctacaaaaaatagtaccttttttctcctctatgtgctatattctgggtaatttcaccagtattttcttgtaattttgccagtattctttctgggaaaatatattgactaatcattcagaaatgatattgataatttccagaaaagcatttagaaaaacggctttaaaaatcactgtcttttcagcatgtatcaattcaacatagtactggaggtcttgtcctaataggtttgaagttatcactcacctccatccccccacacacttttaaaaagatcttctgaagtcctgtagttatttttaatagattttagttatggtatcagtcgcactgtcttgtaattattatgactctcagctcctcaagggcaagaataccagcactatgtttctcaaagcagttgttcaatccactcttactgaataagtgaaggattcttctgcttaaagagattttacagatgtaggtacatataggagcatctaagcagccaaagaagaatataaaagtcagatgctatttttcttgctgtgtatcacttctgtctgtatccactgtacattcacagtccattggcagttgggttttttttgagacggagtctcgctctgtcgcccaggctggagtgcagtggcgcgatctcggctcactgcaagctctgcctcccgggttcatgccattctcctgcctcagcctcccgagtagctgggactacaggtgtccaccaccatgcccagctaattttttgtattttgtatttttagtagagatgggatttcactgtgttagccacgatggtctcaatctcctgatctcgtgatccacccacctcagcctcgcaaagtgctgggattacaggcgtgagccaccgcgcctggccagcagttggggtttttttgatagttacttaaggatttttctgttgcattgtcacatgtccactaaccagaagcttctaaacggttttaattgctgacctcttagttaataaagattcttacggttggtattttatttcttatgtatttctttttatttttgagcagtctctgtgccaagacagagtccgtttctttcattcttaataggccaataatgcttgcttatagacatatcgctactaaaaccttttctttttggacttctaacacatctgatttccatcttgtctgttccagtagcttttcttgtaatttcatctctgctttaaatgccagttattgtttttatgctgattaaaaactcagacttgcatatcattagataatcataatcatctctgaccagacgaggcaaatctttcccactattcgactggcacaaaatagttgcggtttttaccattactttaattttgcaccagcctaatagttgtcatgaagtagtagaagtattgggtatagaatcaagacctaagtctggaggcatctcagccactgtcattagttatttgattatgagcaaatcacttaaagtgtctgaaattcagttttgtcatctgtaaaatgacatttataaaacttgttttatgcattgtgaggactaagtgagatatatagttggttttataagttataaagcagtaagaaacactgacaacagctttattctaagtcatatgtgaattttacacaatgtaaaatttgggtaaaacatgtcctttcaaccttccacaaatcttattcttctccctagaggtaaccactattagaagtttgttatatatccttctttatattttcgatgcatttagttacctttttttttttttttaagagatgggatgtcgctgtgctgcccaggctatctcaaactccagggcttgagtgatcctcctgcctgagccttctgtgtagctagccatttctgcttgagtgttctgttctgctgtcatttaatatgacctgaggtcatttataaagattttaccttattttaaaaaccttgcaggtgggatgttgaaattttgcaataattgataacactattaccttattattaatggaaactgaggttttttttcctagtttttcactaaggcaaacaacactgttttgaaaatcttcgcacatgcttytttgtctagatagagatgtgaagttacaggaaggtatatgcattcaatattttgatagtactgccaaattactttccataacagcatcccaatatacttatattcctactattaggtgtgagagtatctattgactcatctttttgcctattcatggtgttttcatttttgctaatctcatatgtaaaacatggtatctcaaatctaaaagaatgttcgtaggcagcatggtgtgagcacaaaaaccattaagtggaaacaattcaattatccattaacaggaaaataggacagataagtaatttatttgacatgtttatagtttataagagaatactaaatggcaatcatagtaaaatacagttatgtgccctagtggaggtgaatcttacatagtattgagcaaaaatgccaaattactgaagaatacctgcaataggatccatgcctgtaaaattcaaaatcacgcaaaattaatgcatttgtaagagacagatatatacagggagggcttgagagttccaaatagccttatctgagaggtaggaaataaagaagagtgctaaggcaggtggaggagtaaatccatttcctctgacacatctctgtgcaacctgttatgaccaacttttctattgaagtttttgacaatactggcttatacgaatgtgatcttttccttatatttttttcattgttgaactccaggattttatggaatatggttcatatgtgggatgtcctctgggagtgatgaatttctgttaatatgcttttggggtttttgattactttcttaatcagataatccccttctcagacaatcatgaaatgtttattgtaagggaataatatggaatcattagtagggatgagaacctggaaaaatggaaagaacaggggtttgtagtccagcagacacaggttggcagtttgaatttcccattcaatatctatgtgttattgggccagttacttaccttctttcagttagtttccccagtgataggaaatatatttttgtatactgctatattatctcattctttttgcctctatctcttcctcttttccaccatcctggaactgtactgattaggtgcttaataactggggggttatcatcatcattgttaaaatttgtagagaatggtgtgtggaagtaaatttatagaatccagaacaaacaaaaggcacttgtgcatttcggaaagagccttgttcttttgttaaaatctaaactgcatgtctcccctataaaaatcagtatgaaaaatagccaacattgcctataactattattatttttaaataacagatttaatgagatataattcacagaccataaatctcgcatttatgaagtgcttttagtgtttcagtggtttttaatataataatggatgtgtgcatccatcactaaaatctaactccagaacattgtcatctccctccagataaacctggtagccgttagcagtcactgctcatttcttcccgctagtccctggaaccactaatttatattctgcctctatgaataatctgcctattcttgatatttcatacaaatcaaattatataatttgtggccttttgtgtctgttttcaagcatggtgttttcagtattcatctgtgttgtatctgtactttatttttaaaattactgaataatattccactatggatgtaccatacttcatttatccattcatcaatcgacggacattttggtttttttctgctgtttggttattatgaaataatgctgctatgaacattcatgtatattattttgtgtggacatatgttttcagttttcttagttacatacccaggtgtggaattgctgggtcatataactctatgtttaatagaaggactatccaactgtttccagagcagctataccattttacattcccacccgcagtgtagaagaattctgatttctccatgtctttgacaatacttattgttgtctggcattttgtttataaccattctgatgagtgtgagttttatctcaatgtggttttgatttgcataatgacttatgatgttgagcatctcttcatgtacttactggccatttgcacatmtcttttgcagaactgtctgaattcctacacattttctggttatttagctccatttatttattacacattcttttgggtgtctacatgtgttagatactgtgctagatctcagggaaaccatgatgaacaagacacagggtctctgcagtaagcttaagttgtcttcagacttccatgcttttgactatcaaatatctgaatatagtcaacctaccaattagtggaaagtttactctattgttatattcaaaagtcctatcaatgaaaatttcttttacgctgttctgctagtaggaatgaaagtacagtgaatggaagaagaggatgaatatctaagtagcaatgttgagcactttgaaaattacaaaagcaatgtatgttctcatttactccttcgtgtgcacrtgcatcttccctcatttaaaagttcccttgaaagcaagggccttatttttaattcatctttttttactccatcagtcgactaacagtgcttggaaaatattaatattagtatatattaactgaatgattgaatgggtcaagtaagctggaaatgagtgttcatgttatatgaccttatactaaattagggtttgcatggcttttattagctatcatccttgccctcaaggatcttgacttagtggtttaaagtgaaaatgagacagatactcaacatgatatacctttaaaaaataaggttaattagaatcataagtaacataaaaagtaagctgcacaagtaagctaagtaaatattaaatattaggaggagtcacttgagtccataggatgatatagagtagtagaggaagtcttgaacagaggtcagatttcatccagatttcaaagaactgaggggataaaacaaaaaataaataaataaaaaagtaaaaactgaggggaaacaggctgatagagacgaagacctaaaacttttctgggttaagaggcagttctcagcagggttggtacttgtcccctttccatccaggggacatttggaaataaaccaacaagtttttggttatcctagtgtttaggggtgctaacggcttagtgtgagttggggctggggatgctgaagtcccacagtgtatgatgaagttaggaattaactctgaccccagtcgcagtagcaccctgcctaagatatactggaaaggaaacagatttagctgcataaggaagaaatagtttttatgaatagtgctcctaagcaaatactgttttttgtttttgccagtgtagaggcttaacgaggagatatatacacttaggtagggtggaatacagttaatgraacattttaggaaccagggcaggaatttatatttgatcagtttggatgattttgattatgcctaacattttctttcatctcatggtttgatatttttcttgtctttctcatagaacgagcctctgactccaggttatcatggattcccagcgcgggacagccaggttggtatctgctgtttgtaactcagatgatgtatgtgtgtggtgtgtttcatcaaagggttgctatgatagagagcatttcctgaaattacttactttgaaaggaaatgtggcttgtttcagcagtgaatttacttttacagatgtaaattaagcatatttttaaattctataagtattatgttattaaaattgtggatattagaagagaaaataatcactcaagcacagtcatgattggttttgtattttcttctccaggctacataataattttttgacctggttttcttgatgccttataattctgaatgctggacttgtctctttattacctgccagttagcccctgcctgcacagagtttttgagtccttgtaatgatctgtagcaagaaaattccattctcctccctgggggaattcagccttatggttttaatcagggaaagcttgcctgagaaagcaaagtttctgccacctttctttgttagatgggaggatgactggaaaagcccaggccctattatgggtcagagcagaattgcttcctacgagacaccctcagtatggtttaggcaagtgtgtaaaatgccttccctatctttttgttgtttgaatacttgagcccatgacgttgaaacagagttaggatagaagaacaggtaaggcttcctcttagagaaatggtgtggcttaaatcacctcgcctctgaaagaaatttgtatctttgatgtttggggatattgacgttcttcaggagatttgaaagggtagctcctagaaatatcttggaatgccattattccttacagggttgtcaaaaaaagctaccattgttatacttgtccaggagatatgagttacagtgctaaacgaaagagttcatagtgtcctttccagaagttcattgaatctcatcagagctcctgaagtggatcttaaaaactaggatggtcggctgggtgcggtggctcatgcctgtaatcccagtactttgggaggccaaggtgggtggatcatgaggtcaggagtttgagaccagcctggccaacatagtgaaaccccggctctactaaaaatacaaaaattagctgggtgtgatggtatgcagttgtagtcctggctactcgggaggctgaggcaggagaattgcttgaactggggaggtagaggttgcagtgagctgagactacaccattgcattccagcctgagtgatagagcgagactttgtctcaaaaacaaaayataaaacaaacaaaaacaacaactacaaaaaaacaaaaactaggatggttgataatcaatagtcacctatttgcaggcctttcagatttgagagtatttgtccaattcttgcacttttggtgctgagttgatatcagagtggccccagataaggcatcgggagaagaagtgttgttagctctgtgttcatcccctactgagttcatcactgttgatattgaagatggaagcttttggtaaaagatagggccatttaccctaaatctaaagagaatgtaaagatttatttgtttttcattctggtttgtgtctgtcctagagcttctctaagctgggaaacttatgcctttgatagtacttttatatcttagtcatatatcasaaaaacattctcatacctggagatccaccccacggagtttctgattgggtaagtgtaagattgggcttacccattcaaatgtttaaaaatcccaaaggtgattctgctgtgtagtgcggttgagaactacagtcctatgggctgctttaaaagcagtgacagtttctgtttcatcctgtacttttcacttaggacatgtaataaaggggtcgtggttagtctcttaatctagtcttgcaaactaatgcagttactttattatttataaaatgttgcttattgtggatttaggaaggtaaagctaattgatgtaaagtatggaaatagacttactgagtttagaagactgaaagggtactgtattcttcttgtggggattatagatcaataaggagctaagcaaaaggagttaataggaatttattaaagcctaaaaaagtagtctctttgattgtacctactttttctttcttttgcagtaggggcccacttctgtaacctgcacattcattactcatgctgtctctgctgcaggcctgttacagaccctttgccatggtttaaagctgctgatttactttgaggcacattctgatggtgacaggtttattttagtttattttcttgggctttaatttgtactctggttggatctttgaattagagatcttagagtgtgcaaataggcaaatattgaatagctgcttgttgtatttgatgaatacagaatccaaatgagtactgctaattaatgcgcctaaccttgtgaactctcactttgcgttttgagatttgggaggcatttatcagcgtgaaacactggtcgctgaacagtctgagctggcggaaatggaacttgtgatctttacgtctcctcagcatggttttggctcagcaaatcgaggaactggggaatggggtgaaggtgaattttaattgtgcttttgtttgctttcccttttttttttttttttttttgttgttgttggtttggtttggtttttgagacagggtcttgctctgtcacccatactggagtgcagtggcatgaacatggctcactgcagccttgacccctggggtgcaagtgattctcccacctcagcctcctgagtagctgggaccacaggtgtgtgccaccacacccggcctgtttgctttccttattctttcactgttccttcctaaatagatgagaaccatctgcagacaagattcttatcagtggctgaatggtgatttaaaaagagataactcttttgattgttttggaccactttcattgtattttctcatcttattctcccaaacaccccttttgaagtagatgaggcaaatattccctctggaaagatgaggaaattgaagcacacagaggtaaagtgacttatccaaggcaacaattcaagtaagtagctaaataagagctgaaatttccccttctgtctgagggtccttttctctgtactggagaattattgattgaccataggaaaatgtggtcacgtgtgaatgtgcccattcactcatttacattattttatttaccatgtgggggcttcgtagacttcttcaagctcaaccacagatgtagaagtctgtgactcctgattaaagattattactactaagtttgttagcaccaagtgtaccaccagcatttcacttttttagtgattcttttgtcatgttatatacagtcccaatagcacattggagttaaacacctgaaggaaaggagcagggaaaaccacccgccacctcttgcatgtttatgcaaggtcacctcagccttctttcttgatctattaagaagctttatgggatgacaatccattgcttttataaagcactctgagcatttcactatactttctaatgtggtttctctatggaagtggaggagacaaacattgttccagttttacataagtgaaaactagttcagaaaagtgagaaattttatctaaggccatgcaggaccaagtgcagtggcttacatctataatcccagcactttgggaggccaaggcaggaggattgtttgagctcaggagttggagaccagcctgggcaacatagcaagaccttgtctctactaaaaataaaaaaaatcagccgggtgtagtggtgtgtgcctgtagtcccagctactcgggaggctgaggtgggaggattgctggaacctgggagattgaggctgtggtgagctatgattgtgccactgcgctccagcctgggtgacagaacaagaccctgtctcaaaaataaatgaataaataaacccaggcaggattttagattgatgatacaatgtagtggtttrgattcctagttgactgtttgtgatttgtgcatgtgcttaggcgtgttcccaggccttgattaaggctagaatgttttatggatttgcagtatttttaaagtgggagaatacttatgtgcatcagctctagggtttttatataagaagagcttaagagcagcaatctgattagaagagggccttgttctgcacagcagccttactgtttttgcgaagattatttatatgggatggctcttaggggtttcctagaaagtgatgggggtcctaaggctcctaaggctggcccctcgctcgcttttggtgcaacaactttatgtctgttataaataaggtgaccatataaactttagcattcaagttggggcacttttgagaataaaaagtgatgccaataattagtttcaaacagtcccaggtaaactgggatgtatggccatccttctctaattgaagaaatacagtcagtgttttcttaaccaaagtgatcagaactagtaggccgtgggttaatctaaacaattggttgaagtggggaaatattttaaacttttattttaatatagagcatttttaatttaaacaaatatatgcttactctttagtttcctgatatgaggtcaagatccttatatatagatgtgattgaaatactacttgaattttttgcataaactgtgctcccagagcatcatctgtgagttctaatttgtttttttttttaaagaggaacacggtcttgatgacattcagagcaatttgggtgaaactgtctatctagatttgtatggttttcccttcttgcccggtcttttacagttatcctgcccacatctaatttgagcctaagttttcagtgtcttgacttatttttcacaaagcattcacattagttattttcaaggaaattttctaatttatttcattgatgtgtgtatatatatatatatatatatatatatawcatttaattatataattataagaacttacgacttctataaactggcaggtgaataaacacaagtgatttttggtaagcatacaactcagctactgggagaagaaagggcttgggggcaaataggagagagttgtttactagttttaggtggtttaagactgttaaaagcgtccctttattagacttgggaactggagaacattagttaatttaacaagttaattgattaaaagaggcttatactttaatcaaccacagggaagacttacttttgtttcatcaattttgtatctccttagtggttacttgactaaattttgttctattgttttagagtcaactcggtttgggggatgggtagggaagaggattagaacagatacacacaaactagagataatttgttttgcttcattggggtggcctaaccaagtaagggatgttcagcagtgggatacttgcaaaactaagtgttgaaagcttkcattatttcatcattaaaaattatttaagctgtagtgtactattttgtttattaattgatgaatacaaatgtatatatttgtggtacacaaaaaacccaactaatatctgctaactgctttacagtttacaaaaccctcctgtgtatatccacttttgatcttcacaatagttcagctaggtggcttgggctttattatcccaattttatagataaaagaataccaaagcacagagactgtcaaatgaatctcccagtcttagttatataggtagtaagtaaagaattggacttgaaccccgattttcagcctccatgtcttgtatttcccttttgtatttgtctgtcagtgtctctctgaatataagtgttcttttgctggtgtgacaagataagatattctggartctttggagaatgtgggagcatgaagtcttcatatgacttgaaagttcttgagtaacttatttctgtcaagttttctatcttgtttgttaaaataacttatgatctaaattttatcttttcatattttaaatacaaagaaaaatgtcatgttgtcaatttttttgagactctgttgcccaggctggaatgaagtggcgcaatcttggctcactgcaacatttgcctcccgggttcaagtgattcttctgcctcagcctcctgagtagctgggattacagacatgcgacactaagcctggctaatttttgtatttttagtagagacagtgttttgccatgttggccaggctgatctcaaacttctgacctcaggtgatctgctcacctcagcctcccaaagtgctggaattacagatgtgaaccaccacgcggggcccattctttgatgtttaaaatgcttgtcaatgacttctcaaaactatatttttttcttcaattttctaaaattctgttgaaagacacaatgtcccattgattagcagaaacaagtgggaacatcaaaggagatgcttaagttgacaaatataacatagacaattatagatttaaattcagagtggcagccttacttttaataagagggtaaatttaaaatgacctaagggtttcttttcttaacaagtattttctttcctcaagattttttttttcttttttctaaccagttttttcatgggtagaaaatgaactttattttagtcaaatttttgcaatgaactttcaaggctttttttttattgggagctgtggacaacagcaaatatatcttctgtagtgctcatttggcttgattgaagaaatgatgactacttttcttccctcggggatagttggtggaatggaggacatggtaagtgtgttcaggttctagcttagtgcttttgagcttaaaaaaagactgaccccaaggaggcagttgcttttatgtcatgacccagtatacacacatacatatatgttgactataacttagaattagtcttaccaaatgctgcctatcttaaccatgttctaagtactgtgatattttctgtccccttcaaaaaattgtcgattgtgactaacgattgaccaaaattgatttctgctggatttttcctggacccactaatggattgcaacctgtttgaaaaacattgttctaatacttacattccttaaaaatgcaaccttaaagaaacctcatgcctttatttttttgagatggagtctcactttgtcacctaggctggagtgcagtggcatgatctctgctcattgcaacctccacctcccaggctcaagtggtcctcctacctcagcctcctgagtagctgggaccgcaggtgtgcacctccatgcccagctagtttttgtatttttggtagagatggggtttcaccatgttgcccaggttggtcttgaactcctgagttcatgcgttccacccgcctcaacctcccaaagtgctgggattacagccgtaagcttccatgccgggacacaagaaaccccataccttttagcagtcactcccctactttccatctctccacccaagctctaaggccccccagctggagactgaattaaaatggttcagaagtaaaacgttaccccttctgtatctcgcaatctataataattttctttctgatcctctttttttttttttttttaactaaacatgcttttgctttgctcttaaattacaggaagtgtgaaattgctttttttcccccctgttaggttgtctagaaccccactttcagcctttgtgcaaagctttttcaaactgttgcttctgtccaacatctgacctcaggtcacccatcaatagtttaggtccttctgtggtgttgtccttacaccctctagtggatgaaggtctggtatatgctgtagtgtctagtgttcttgtagcacttttctcaatccatgtaatcagctttactattacattttagatcatttcattcttcaaacagttaaaaatcttttcactccaggaaagactgttttatttcttctgctgctcactgccatgctaagtaatatgcttattctgctgtttcatgatttgtccaaattttggcactattctttggcttcctactgttgaagatgagaaattagcaattttattttattttatttttattttttgagacaaggtcttgttgtgttgcccaggcaggagtgcaggtgtgtcatcttggcttactgcaacctccgcctcctgggtacaagtgattcttgtgcctcatcctcccctgtagctggcattacaggcgcacaccaccaaacccgactactttttatatttttagtagagatggggttcctctgtgttggccaggctgatctcgaactcctgacctcaagtgatccgcctgcttcagcctcccaaagtgctgggattacaggtatgagccactgcgcctgcccagaaattagcagttttatagacctctttccttctaataaagccattttttgggtcaaatcaatatttattgatttgtgaatatataataattattatgactatttattttatatccaaacaaaatattattactttgcctgtcttacatatttgtttcccttggagttactatgtagagaaaataaatataaatatgtatttggctgttgctttttaaaaagctctatggccagcgcagtggctcacgcctgtaatcccagcactttgggagactgcggcgggggaatcacctgaggtctggagctcgaaaccagcctggccaacatggggaaaccctatctctactaaaaatacaaaaattagtggggcatggtggcgggtgcctgtaatcccagctacttgggagctgaggcacgagaatcgcttgaacccaggaggcggaggttgcagtgagctgagattatgccactgcactcgagcctgggcgacagagtgagactccgtctcaaaaaaaaaaaaaaaaaaaaaagttctattaagatgtcatttctatacctaaaatttactcaatgtaagtgacttgttcagtgatatttagtaaacgtatagagttgtgtcacagtccagctttagtacatttccctcattccccaaattctttcaaattcttttgcagtcattccctgctccctctccagtcctccctctctcccccagccaaccactgctctgctttctgactttataaaattgcctcttttgtgctggacacggtagctcatgcctgtataccagtactttgggaggccgaggcaggaggatcctttgagcccaggagttcaagaccagcgtgggcaacacagcgagaccatgtctcaaaaaaaacaaaaaaaatggtcgcttttggacattttatataaatggaattatatgatatatgtagtctttggcatgagatttcttacaattagtataatgtttttgaggttcatccaggttgtagtatgtatcactgtgtcattttttatttttttttgctaaataatatttcattatagtgatgtatcaccttttgtttatttgtttaccagttggtagatatttgtattgtttccaacttggctattatgaatagtgctgatatgaagaattacctgcaaatctgtgtgttgacatactttaatttctcttgggtagatttctaggagtggaattactgaggcaatggtaaactcatgtataatttcttctttttaagagaaataagccagtgtggtggctcatgcctgtaatcccagcactttgggaggctgaggtgggtggatcacttgaggtcaggagtttgagaccagcctggttaacccagttaaaccccatctctactagaaatacaaaaataaaataaataaaataaaataataataatcataataaaagagaaatgaggtcgccaatgctggagtgtggtggtgcaatcatagttcaatttagctttgaactcctgcctcaagtgatcctcctgtctcagcctccctgagtagctggtattaccagcttgagacaacgtggcctcatgcataacttttaaagaaaccacagactgttttccaaagtggcttggttttatctaactttttgttataatgagtgtatggtaatagctcattgtggtttaatttgcatttccctaataattaagtaggtaccttttcatgtgcttatcagccacttatgtttgctttggtgagatgtctattcaggtcttttgcccactttttatttggtttttcttcttattgagttgtaagaagtctttatatattctgggtacaagttctttgtcagatttacaatttgcaaatatttgttctcagttatgaggttttgtaatatgtatcttcgtccttctccaataaaagaaaacagaattgttttcatccatatttgctaagtttgcataaattctgaataactattttatgaaagcaactatgaaaacaggcatttgcctctctgctgaggcctggtggttccttcaaagaagatttgcaggtttgtagtggcttcgtgcttggctacagccttctcccgatgcttggtggcaagcatgtttgggcaggaaagctcttcatgtgatgaagagaaattgtgctgctttctgcatgtcctaaggtatatggcagagtgaggatcagctaggttcattggcttttatttttttaaactgtagcttctatataaagctgttttgtggcaatttctctgcagacagacagacagacacccctgcccccccaacagacacagacacacacacatatgcacacaccctccttggctttaggtttaaatatcaatcctgctgttgcaggctaaatgactttaggcaagtttttgttctctgagcctcaatttcttcatctgtgaaataggaataattcctattatgaaaggttgttacagtattagagataacatatgtaaatttcttggcatgtaaatagggctagtaagtcatttttctcatttattttatggaaaagaggccataaggaagctttacaagggaatgattagttctcacattctgatttaagtctattttctcattttccttttgattcttattcactatttgaaatgaattatctgtagatttgaaatttctagctcaggaatctagctgttggacatctccaagaaaaagaggtctttgtgaaggaaatgaaatctgtgtaagtttatttacctgactcttgggtcttggcagcatgcgtataagagggagtcatttttgggactttataacttgagcagaattttgtaaaaactgagccagacattcaaggctcgctacaatttgcttcccatttttccagctctgtttctcattactaccctagtaacatatttcttctgcttttttttttttttttttttttgagacggagtttcactcttgttgccccggctggagtgcaatggtgcgatcttggctcaccgcaacctccacctcccaggttcaagcaattctcctgcctcagcctcctgagtagctgggattacaggcatgtgccaccacacccagctaattttgtatttttagtagagacaggatttctccattttggtcaggctggtctcgaactcccaacctcaggtgatccacctgacttggcctcccaaagggctgggattataggcgtgagccactgtgcccggcctttcttctgctttatatatgtctcttcactgtccttcaaatatctatcttgggcatttatttcttcctaatgcctttcgtttgaaatgtttctcctttaccagcagaatcctaagtatccattaagatccttgttcacaacttaatctcccttatgaaatttttccttattgcctctgattgtttcaaatcgtttaacatgtctgtatgaacatttccataaagtttggatccaagagagtttgggaaatactgcgaggactaggaggaaatcacttaacttctctcaagactcagctttctgtgaatgtgaggataccataggatgtttgaaaggattaaagtcttaaaaatgtcctaggtcaagagtgacttattgcctgatgttgtgaaaataggttgcactaaactctgcctttggctttccaggtaacccagaaagtctcttctcatcttctcatctctgggcccaagtttcttctttttgctttaaggactctttggtggtaatgggtttggtttttgtgggtcctgggagtgtcatactttgagcgttctctcacctcctaaatccttcagggctactgtggatctgtggatagatgaatgatgccagaagtattaaaaatatggctggcttttattctcatcgctcttctgtacctggtttgtcacatcttgccttttatgccgcagtttgacttttccccctagctttgcctctttttgcttagtttagggttgctgggattgttgagctgtgattgttagtccactcatgacccagttgcttaaatattttgttaatggatggatcataatttcactgattgacttttcaatagattgacctgttattttgtatataggcaattgatttgtattgtaatgagaggtttaatgtgaccatcaaaaagaattatctgactaaagatagggccatttacaaaggaaaattatagaatttccattagcaattttcaaaatcgagaaattcatctgactagacttggttagggcagctaagtagttagtagggatattcttgctgtagcggttagtactaccaagcaatcgatggtcttttataatcaattctggctaccattttgtgagttacatttaagaagcttgacatatttattcagtgctttgttcttcaacagacagtcactggcagatgatttagaatgaaaccaactaattaagtataaggtaagacaaaaggcctcatagttggtggacaatatagttacgggtttcagttacagattaaatattttaattttcttaatagcattagctgcatactattatactgatctcatctagggttgattagagagacaggggaatacaacaggtaacttaagatcttgtgttagaaactttggtaccaccagaaaatactctcagcaagtactatgtaatcatgcatttaaacagctctgatctcactggagtctcattactctgcttagcttttatctgctgaatattctttagtgtgatatcctaagccttctgtgatatggcctcagtctttttccttctgttttgtgtaaggtactctgttcaagccacactgtggggtggggtagcgtagctttggaattaaatgtgggtttgaattctaattcctttacttacactatttcccatgtcccatgtttaaatacaggtcgtcctttaaatctcacttcaaatgctaccttctccttgaggttttggctagtgcatttatttgcgagctgactcagtgtcccagggcacatgctttctactttgctttttgtgttttttttggagacaggatctctctctgtccctcaggctggagtgcagtggcggagcctcgaactcctgggctcaagtaagtgatcctcccacctcagcctcccaagtagctggaactacaggcatgcatgtgctaccacgcctagctaattttttaatgttttatttttagtaaagacagcgtcttgctatgttgcccaggctggttttgaattcctgagctcaagcaatcctcttgcctcaggctcccaaagtgttgggattacaggtgtgagccactgcacccggccttctactttttttttaaatttttttattttttatttttattttttgagataaagtcttgctctgttgcccaggctggattgtagcggctggatctcggctcactgcaacctctgcctcctgagttcaagtgattctcctgtctcagcctcccgagtagctgagattacaagtatgcgccaccacgtctggctaacttttatatatatatatatttattttagtagagatggggtttcaccatgttggccagttcgagttggtcttgaactcctgacctcaagtgatccgcccacctcggcttcccagagtgctgggattacaggcgtgagccaccatgcccagcccagcctcctactttgtaatagtactttatcactgcctattgcattatggtgaaaaggtttgaccaacacacagaattctgtaagaacaagagttctctcatgcttcttagttttcttgaatactttgcacaaagtatgtgcccaatatgaatttggtaaagtgtggtaacgggataaattaaataaactcaacttcagcttgttgaaatacagagactactccatttggattttctcttatggacaaagtgggggaaaaagcaaaactgtggtcagactttcactaggtttttattgcctttgccttgccagagcgatatgaaaaattaatacttaagaagctagatatctgatgttcagcaagagagtgcctcttacaagtttaatgggtttggtcaagtggatattaaatgtaaatctgtcattttatggagccatagaaggctcttaagacactcaataaatatacttattgaattagtagaacttttcccatgtatctcctattactacattaggatctttgttcccttagtgtgtctttagcctgtgctctcacaagctttgtggtgtcgtgtggatcacaggatcgtttaagataaagatacttttagctctttaattctggtattctattattggtacagggaacccatacattatcttaatttcagagtaacacacgtctcggcatgggacagggggtgtcctaatgaaaagagggctaacaggtggaatactgactatgtgcaggcactgtataaagcaagtagtttttaaatcccatttgcaggtgaggaaaccaaggctcaaagggattaagtcattgtccaaggctatgtagttgttaatgagtgaatctgggttttaaaataaatgtgttaaattccagggttgatatttgcactgggcatttatttacttttatttgaatttttttttttttgcattttacttgcatgcttaatttttctttgctcagcagcaaacattatgttccccacttgcttcccacttgcttccctatttactaaggggtgatagttatgtgttatgtatctatagtcctgtatagtttacaggtattgctgtaatacctgtaatgggtattgctttcatacccattctcatttgatctttggtaagaccccagtgagtctttattatttgggtgggggggaagggttttaatctccattggcagatgaggaaatcaagatttgcagtttcctgagagatttgccaagggtggtaataagtggcataaaattggctttttaaaaaaaaccaattccttggccacaatttattaaaaaggcaaatggaatggtcctcctagaaaagatttggaagttagccagatgtggtggtgtgcacctgtagtctcagctactctagaggctgaggcaagaggatggcctgaacctaggagttcgaggcttcagtgagctgactgtgccagtgcactccagcctgggcgacaaaagaccctatctctaaaacaatatggaagtgtaagaagttggggaaataaaaggaaaaagaaaaaagaaaaaaaagatatgaaaggcctggagccctttcccccataaggctctgctgactggaagacagtttgaaaaccagtgaggaatgatcaaagaactctggtgtcagacagacctgagttcaaattccagtttggactgatacttaacttcccttaggcttacttcctcatttgtaagatgggatgcttttataggattgctgataagtattagccaaaaaacatgccagaaatctatcacagtaccttcagcttctgtggatgcaaggggagtgtgttaggcagtgtaggctgacccctcaccacgtgcaggactcacactaaatgttgggggaagtcattgctaagacagagccataggacttcaaacccagcacttcatacctgactgaaggttcaggtgtcacatttatcaatagtttaaaacaggagggggcaaactttctgtaaagcatctgagagcatctgggccatatggtctctgttagagctactcaggaactctggcacggtagcagggaagcaggcttagattatagtaaacaaaagattgtggctctattctagtaaaactttatttgtgggtaccgaaattttaatttcatataatttttatatgtcatgaaatgtcatttttcttttgattttttctttcaatcattacaagatgtaaaagctatcttagctggtagtctgtgtgtgggttctacaaaaacaagtagcccatagaccaaagtcctgatttagacatgtctagttttttttttttttgaaatggagtctagctctgtcacccagtctggagtgcagtggcgcaatcttggctgactgcaacctctgcctcccaggttcaagcaattcttctgcctcagccttctgactagctggaaaattagccaccatgcccggctaatttttgtatttttagtagagatggggtttcactatgttggtcaggctggcctcgaactcctgacctcgtgatctgcccgcgatggcctcccaaagtgctgggattacaggcatgagccaccatgcccggccttatcagtattcttaataccaacagagtttcacattgtatttgacactatttacaaactcagtttattccctctgtgtgaatactagccatttctaaaatgaaatgcaattgtgatttaaatttcacatatcattatgctaaatgctgttcactttttgttccatggtcctgaaacaattaacctgtttggagataagctgcagatacaagcacacagagaaggggacttaggaaagctggaggaaggaaaggtctgtcttgcctacatatgggcttaggaaaattttctaactggaaaccttgcctcaagtctgagtcacactagtgggactcttggccctagggtgggaggagaaaagggagggaaggaagtggctatgtcagtttttgtcaacagagggcacccagagcaaagcaagtgttctgtgacacaacagaatctgcccctctgccccagatgaatttaccagacaggcacagaacttcttgcagtggattctcttgtccatctcttcatttgtctgatctgtgtctgcattctcatgttttctcccatgctggaaccagaatattctaaatgcagtgttaataattgttatttgctgactgctttaagtggaagaccaattccctcaatgtgctggggtgaattatcccatgttgtaaggttggccttttgggtggatgtgcagtattagcttctaatttaattcagtatccagtgagcatgtattcctgaaatacttttgatgtgaaagagcacttcatacctgtataacatgttgtaagaagactttgtaagtcttattgcctagagcagtatcctcaaagtgtggcttcaaatccagccgcatcagcatcacctgggaacttacctttattcatggtctctgcctcttccccagacttactgaatcagaaactctgaggatggggtccagtaatctgttttaacatgctttggtaattcttatacacactcaacttgagaaccactgtcatagggtaaaggagtggaagagttaagggcactggtatttatggaagactatgtgccaagtacttggctaggagtttcctcttcattttccacatgagaacagcaagccttaaaagcattaagtgatttgccaaagtcgtacatagaataagtggtagaatagggatttgaaccctggtttttctgactcctgagccatactatagtggctggtaagaaaatgctaagaggcgttgcaatctttaaattaattcttttttaaaagtccttaaaatatttttttaaaacaaaagtaatttgcattcattgaagaaaatttagaatatacagcagatcaaaagaatagaataaaatctgccttaatatatttaactttatcttaacgttttgttgttgattatcttgtttcagcgtaactctgtttgcatatatacacattttaaaattccttaccagatgtcaatcatattgtgtaaacttttgtaaaatgcctccagctcaggcctactttattataaacatcgtttcatgccattagctatgtctgctgcatcatttcrtggctgccaagtagtcccttgtaaggttgtaagcttttttatcataattcttgctaaagtccgtcttgttttgatttcatgatatgcttttaggaagaataggatactgagtgctttggtactrtgggtaaacaatttgtccagagtggcttaaagtataaaattaaggcagtaagcagattttggttgagaaggggacatggaactggaaaggcaatactaaacatgtttgaggttaaagtgagcccagaaataagaaaacaaattgaagtaaaaaagccaaagtatcaggaatagactgggatctgtgagttagatgggttagaacaaataggaatactgatggtgaacaatttgatggcaccaacagcctgcttttattgttggctttttgacatagaggctgagctgccgaatgacagcatgagaaaaactgggcataagacttccataaatagcagttattatttattgaggaccttcatgaccaggcatcatattaatcatttaatttttataataaccacatgcaattagatacattagttttccccattttacagcagtggaaactgacagtgacatttaaagtaacttggccaaatgctttgattggaaccaaattagttaaaactcccaaacctgtgcttttatgctgtcgtttatcctcattctttttttcatggtgtggcaggtgtttagccactattctgtgtatatgtattgttttactatgtgagctgggacagaaggagactaggtgtgtaagaaaggacactaaagtccactagagtggaggtggacttgaagaacaaaacaaaactaatagcccagtcgttttcgtaggaaaggtgtaaacctgagctagatagtgcagtgagcagaggatgggaatagcaaagtgaatcattgataggaaggagcaggcaggcatttggaaacaagggatggctagaagaatcaaagttccctcattaaaatttccttcccaaaggaggtgatatactctccaagggcactttaaaacagctttattgagatataattcacatactgtacagttcacccatttaaagtgtgtggcttttagcatgtttacaatcattcagccatcaccatcaccacagtcagttttaggacatttttagtattccacaagaaactccattccccgtagttatcacttctttttcttttttttttttttgagacagtctcactctgttgcccaggctggagtgcagtagcatgatctcggctcactgcaacctccgcctcccaggttcaagctatccccctgcctcagccacctaagtagctaggactacaggcgcatgccacctgcctaattttcgtatttttagttgaggtggcatttcgccatgttggccaggctggccttgaactcctgacctcaagtgatccacgcgcctcagcctctgaatctgctggaattacaggcgtgagccactgctcctggccaatcatcacttcttaattcctctatgcccactacttccccagccctatgcaacaagtggtctccacttttctacagattttgcctattctgtatacagtttatataaatagactcaatagaatatgtggtcccttgtgtctggcttctttcacttagcataatgttttcacttagcacaatccatgttatagcagtacttcattttttaattgctaaataatacttcattatgtggatataccacatcttatttaatattttttttttatggtgggaaaacatgtttttatgttgggaaaagaaaggtgaagagactgagacaataaataggattattttccttaatttaaaatgggaggaataggtgactactatgaaaaccaaggctatcaggctttcttgaggaattgcagctaaaggcctaggtgacaggacagttggcatctgctgcttcatgaattgtttgtagcagagtggcagctcttttgacccgaacacgtgcagtattcagggagctcattgtgtaaatcttgtgtgttggccagcaccattgccccctacaatacctcatggggaactggagaggcctttgctgatctaatctggatacatttccctcagttactgcagctctgggtccccagagagtcctctctaaagagctgccagtttgttgagtgctggcatttgtaagattatttcttactatatgattcgtccagtgaagatgacacccatttatgaggtcctgatctattaagcagaaatagcaaccatcattcctgtgtttttggaatgaatgctgactctagggcccctgtatgctttctcagctgtagagtttggagggctcctttagcaagcaaacaatgtgcccttctgggtgccaggtgactttactgttgttctgttgattcctgttaattactttcttgatttaatctccaaggaatagagataccttcataaaatgagtggtatggctcaggatgtaagtctttttaatttgtacaccagaaatgttgtggatggctttctactttgccagaactttcagtttagtttagagagtgaattgtaatcatttgtcttgataccctggccctttggcatgtcagccctaacactgaaacaagaactctgggtagaggacatcagcttggccctcagttcctgagccattgaatgtcagcgctacatttaatcatatcacccccgttttacatttggggaaactgagttccagagaagttagatgacttaccaaatccatagtcttattttcttatagctcttgctagtggcaaagctgagtctgtgatattgagccttcattctcagtggagtgcttttttcccagtgcagagctgtttcctgaagaacatgtactgtcatgaccaaggagtggccaagccctgctgtactccatcagcagtgcaggctttaaggtgtatttgagagtttgacagattgcgattgtgatgatgaaaatttataggaaagagcaagagcactggtttgtgagtttgcacgccactgacttacagaacccagccccttctggcctccccttctcccagcctcccgtgcagtgcactgtgtccagtgagtatcttcatgactacgtgattataattccttgagagccccatgtctatttgctaaaaaataaatatgtgctgctacactaacctaacaagcagtcatcttgtagttcctgcctgaaaatgtttgatcatggttgtcaactctatgcctgctataatttttgcctagcataatgtgaagagaaaagataaaaatccttctctcactgtgcattttcactgtcccctcccctcattcttagtgtatagaattccagaatgggccttgctttctgacattttcctgccccatgaccctaacagatctattcaacatgaccctgacggctgagatagatctaaacccagccccttcacagtggaacacttaagctgggtagtagttccatactgagacccctttcagtactttctcttcctccccttcttttttgttgtgtcttcccctaccaacatgagctcctttttagggagaagttgtatccttcactcttttcccccatcacctaggagttgctcaatatagtcattaaataaattttggcattctcatgctgtttaccattcatgatgggatgggtaagatgcaggaatgctaataaggttgtcagatggccgtgttattcctttatagaagttgttttatggtccttaataataatttatagtaccaggtactatttactgaatgcttgctatgcatcaggtattgtgctaatgcacatatgcacataccatccacttttcattactctttttttttttttttaaatttttcagatagagtctctctgtgtctcccaggctggagtgcagtggcgtgatctcggcttgctgcaaaacctcctgcctcagcttccccagtagctgggattacaggcatgagccaccattcccagctaatttttgtatttttagtagagacggtttcatcatgatggccaggctggtctcgagcttctgatctcaggtgacccgcccgcgtcagcctcttaaagtgttgggattacaggcatgagctaccacggccggcccactcctcattactattaacaaccactctcctggctgggcacggtgacttgtgcctgtaaccccagccctttgggaggccgaggcaggcagatcacatgaggctaggcgttcaagaccagcatggacaacatggcgaaaccctgtctctactaaaaatacaaatattagccgggtttggtggcccatgcctgcaatcccaactacttgggaggctgaggcacgaggattgcttgaatccgggaggcagaggttgtagtgagccaagatcatgccactacactccagcctgagcaacagagtgagaccctgtcacaaacaaacaaacaaacatgcaaacacccattctctctataaggtggacagtagaagccatattttaccaatgaagaaactgggctttagagaagagcaagtcacagagctggaaagtggtagaacaggcatttaaatctaggttagcttgataccgaagcctatgtttttagtaaccatactgaacctccttgagtagttaatttgctgagcattactgtgaaagagagctaagtcacttatgttccctaggatttataaatgagacatctgtgttagcacagggcattagtaacatgatttagattaaatctggctttgggattaaagaatagagacaaagaggaggcatacggagcctctgccacttaacttcctggagctgatttgcttgtgctcagtattgaggaatctttcctctttgagtgagtgtagagtggttttgggtcatttgtagtctacacagtttctgagagatgatctgtccagcaattccagattgtttagggtgggcctgggagagggtatggcttactcctcgtttctggtgccgtattaaggtgaactagagctgattcatgtactggttgagactgtaaaaggacttccaggtttagtcattctgcaggaggctttctctttggtttaactgtagctcttcatccctcaccctggtttacataattgggactttaaaatttcattgtggctgtaagaacaaagggaatgcacttttcagcagctccttactgaccagtcgtgtggagtccctgtagtgtactcagggagagcggctgcctctctgattctctgcataaaacaaaagtattttgtacatagctttgaaatgggagagagaaacttctgaagaaaaaaagagttgtttggggtaataagattttgaggaggcagacacttcctgcattctcccctggggaaagaatctagctacaattgaagggcattgcctcaactaatttagttaagtggccccgtcctggattaataacttgggcagacttcccaatggatttggcagggtattgggtttctctctccccaaaccctcccttctctctgccctgcacatgtgtgctaacataattacagaaagttacaaggggatggggctgctcttaaaggaggtggctcagaggagagaatgtgattgtgtagtcctgtcatatttccgaaatggcagagttcgagtaaaatggtagggtggaagcaagcaggctggtttctctctgtaatggcaaagggggaggagggttggtggcagtgtcgatttcaagcacctagagcacacgagcactgggtactaattttgtgctagagaaatattaaactgtctttttgcatttgtttgtccagattgcattactaaggatctggtcattacagaacaacctttttgattaaggtcagaagttaacagtttttcaagtttggtggtcaagtgttcagaaatatttcacagatttagttgaaaacctgagcagatgcttttgctgttgtttacccccggggatcgggtgacattcttctcccttttcctcttccccacccctttgggaaccaaccaatcacgtagaggaatggatttcagtgcctaaggagtcagccaactccggagctgtagctgagactgaatgtttaactcttaggtatctgaatcacagggaatggcagacattgcagttagcttgttttcttgttggcatctactctcagagcccatccctaagggattgttcctaatgaggcgaggtacattgcattgaacttgaaggaactggcttttagccccaattctgccagtaactagtattgcaaccttggaaaagttattttctctttttagacttgcttctctttatgcacaatgagaggaaaaggagaaaatgggcatgtatggtatatcactatatattccagtggcgttttatcgctagccttgaggtttaggggaaaagcatttaacctgtattgagtgcctattctgaagcagtttgtttttatttgttaccttattaaattcttatgactctgcagggcaaatgctgttaacccaattttacagatgagaaaagtgtaggctagagaggctgtccagcttgcccaaggtcacttaaggaaggcccatctggctctaatgcccagactcttccattccactaggctggctaaaaaggccctagaagtcctgccagcattttcactctgatattctttaactccttcacagcttttaatcctgccctgtaggaggaccaaacattactgtctcctctttcacagccccgctactagagcaagtaaatgacttagggattcctccatcacctgaaagcagcaaaagaagatggtacagcattcaattttctccttcctccataaagaaattcccgtcctttatagccagctctgcccaccccttcctcattccccttttcttagacaggcagatattttcttttctctttccctttggcttgtgattatcaggtaaatatccctggtttgagggaggagcagaattttgattaggttaaaaaattatctttacccatagcctttctatgacatagatactacaatattgggtttatccccacctggaatttctatgatatctatatctataaacctatatagatttatagatatcatagaaattccaggtaggagtaaaccatatatatatcggtatatctctatccatctatatatatatatacacacacacacatacatatacacacatattataatgatataattatatatgtatacacacacacacacacacacacacacacaatagaaataacaggatatatatatcctgttaggcgctcccttaaagagctttatttttttgcttgtaaattatcctagccatctgatttaatagatacaccttacccaagagaacactttctgtttctcttcctgcagatcttactttttttactttttaaaaatagagacagagtctcactatgttgcccaggctgatcttgaactcgtgggctcaagcaatcttcctttcctcctctgcctctcaaagtgctgggattataggcaccagccactgcaactggccacggtttacttttaaattcacagagaaaatagctttttaaaggtgagttcttattaatattttgttacttccaattaaaaaaaaattacagtagaagccctaaaatgtcagatttgccaataaatcattttctgtcatttgttgtgggctaagaaaaatgacaatagacaaaaccattaacaattgaaatttattaagaaaggcactggcctaggtgttttatgtacattatttctaattttcatcttaattctgcatttgttgattacaaaacaggttaagaggggttaaagtacttgctcaaggtcactgctaatgaatggtgatttggcaatttgattgtaggtctgtttcactttcaaacctcagttctttcttcaatgccatgctgcctctgggatatgatcttgagagttttatttgatcattcatgctcatgcctcagctcagatcaccccggaaaacccatatatcttcttttaaaaagggaaatacattttatatgataagtttaacaactgaaaaaaaattaaaagaagtatttcctggtgtttgccaacttttacaatcaggtgacttttactggtgtttattttgaattatttttgttaaagtttggatccatcccttgttttaagtgaaaatgctaaatagctactcatcctcaggtactggagagcttaggggatttcactgtgaattgggtggacaggaagaggtaggccttaaaggttaagtaatatataggtagatggaaaaggtggaagaattttcttgcggtgaggaaatgttattgcttgctccatcacttggtacatcctgtgttcacaccatctgtttgagctcctgagaatgttgatgggaatctaatgaaagatgggttggtattaatgaatgctcatgttcttctcccttcctctcttgaggagttgcttgtgatttagctctgccacactttatgttgggctttcccagtggtgtgctctgagagattcatataagagaagtatacgtagtatgctgtttctgccatccagatcacctcaacaaatagttccataatgtttattatgtgcctgttatatgccagtcagttggcatgaccaactgatgatgctgagataagatgtgtcattgcccactaggcctttacgttgagtacaatttgcagtctcattcaggatacaagacctacaaacatggaattaacaaaaaagaagtatgtatttaagattaaaaaaaaatgagtgaaccaagaccagcaaatgttgttgaggtttagagatgaaaggggttaggatttgctggagcagtaaaaacagggttcattaaaaattttatccagagtatggagtggggaagggctggggtgagatgggatatgggtcatgccactgctagtgaaaggaaattgaaaatggctcattggattagaataaggtacttataccttctaaaattgttgatggagtcataggcagagattgggaaggggagattccaccaattagcattttaagtgaggagtgtaacgataccagcagctaatgtaaacaacaccaataataacaacttaatccctgagatcacaatttttaggaaaaatttcttacatttatttatattttggctcccttgattagctttcctctgattagagaatgtggtatcctgtatattaaaatacctttactcttgttggatttttaaaagatgcaaaactttaagataaatcagaggtcgattaagacaccagtaggccttgttgccatttccatttcccatatgcattgattactgtgtagcagtattcctgatgattgttgaatatttatgaggttctctcccaaaaaagcccaccaagtgaagaactatctttcattttttaagttcctgaaaattacctaaaactcttctgtaggagatggcttttacaaagaagattctttccttctcccttcccccaacccatagtagcttaacttaagtacctgggggagataaagataaatgtgggaaacttcaggatgaaagggacattattagagaccagagaagtcccgggaggtcatatcaggcttaaagtggaaactatgttacaacctaagcaaggagcaactgataggtctataaatagggttttatctcctcctagaaaatttttgtcatggttatagctttccatgtgggggactattatatttactaaaaataaaccgtttcagaaataattaaaataagtcccactgaactcatttatgttattaaaagtaaagtcatagcctgaaaataagtttatagagtttggcatgtactaattttaaggaacattttgatgctgcagccattgcttatatatgggatagaatggtaaagcccaaatggatttgtatggattaaaatagattaccttctcagaaaataatgttatttcagtttttttccgctagttcagaagaccctcaacctcctttgcatgcattcagacacataagttggcattacaaatgaatcatctagggaagtgggagtacttctaattctccaggaatctcacacagtaaagctgcttggatatggctattcagaacagaaaggtatagaaatggacaatggtatcccttccattggtattccttctgggcaacaaaaacccttaagctgtctgagtctgtttctcacacttctgttatcctgattgtagccctttaaattgtggagcaaattcttggcatctgtctgcctgtcagctacctatctctgacacccctggatagcttgttttcttcctatgagtatatgtgaaatttgtaaaaaagcatctattaatttaagtatcctgttagaagcctgcgaaaattcaaattgggcaaacaataaaattgcttaaaccgtgtttctcaaagttaatttgaccatagagtacttttcaaaatataatgaattgaataacacagcatcagtatgactcacgtacaatgtgtgtgtggattaaagtcaccagaagtagtgttaaaaagatgaattaatggcttcaggaagtgacttcattggctttttttcaaactttaaacattttggagaagttaaatcattttaagtataaaagttaaagagattcagttatattttgtttaaagagcaaaaaatcatgactttgttgaaattaagtaaatatttatgattgtcaatcatcaaaatagattacatttgtattgtctatgcctttgggtacaggttaaaaattatcttctttttctgcctaaaaaagaaagtaaggcccggcacagtggctcacgcctataatcccagcactttgggaggccgaggtgggtggatcacctaaggtcaggagttggagaccaacctggccaacatggcgaaacctgtctctactaaaaatacaaaaacattaaccgggcatggtggcttgtgcctgtaatcccagctacccaggaggctgaggcaggagaatcgcttgaatccgggaagcggaggttgcagtgagccgagattgtgccacttcgctccaacagggggactcacatgttacccttatttctcgaagacattgctcggagacattgcacttttcatgatagattgttgcatactaagtagaaactatatttgtatttagtatttttcttttgaatgaagaaaaatattgctagcgttacttttaaaattgttgtattaccttttgacaacttgtaaaatgctaaaacagggttacatatttcaggtgtatctgacttcctaattactttaagccttttactgctgttgttctttttctccccttacaacctctcaactcccttctttccacccatactttaaagaaggaaactgaaattcctgatgtaatgtatattttttcatatatatatgtttaagagactgggttttgctatgtggcttaggctggtctcaaattcckggccccaagcgatcctctcaccttggcctcttgagcagctgcaacaagaagcatgagccactgcaccaaacctgataacaatgattttctgaaagatagcgagatgtgctgggcgcagtggctcactcctgtaattccagcacttcgggaggccgaggtgggcagatcacgaggtcaggagatcgagaccatcctgactaacacagtgaaaccctgtctatactaaaaatacaaaaaattagccaggcgtggtggcgggcgcctgtagtcccagctacttgggaggctgaggcaggagaatggtgtgaacctgggaggtggaggttgcagtgagctgagatcatgccactgcactccagcctgggtgacagagcgagactccatctcaaaaaaaaaaaaaaaatagatgagaaattggatgaaagaggcttggcaagttcactgaattccttgagccccaaacctaagtttctgcctatttaataggtttcatctagtattttttattttgtgactcatatttaccaattggctattgtggtggtaattgtaatgataacaatagtatatattgctctgtttacataatagcctaacatacagatgttgaaccatccacaacttagaatggttctgcttaacagttttctgactttacaatggtacaaaagcaatacacattcagtagaaaccaatgttcattcagtagaaaccatctgagtacccattttttcacttttattataatattcagtaaattacatgagatattcaacactttattataaaataggcattgtgttaaatgattttacccaactgtaacctaatgtaagtgttctgagcatgtttaagataggctaggctaagctatgatgtttggtaggttaggtgtgttaaatgcatttttgacttactatattttcaacttatgatgagtttatagggacaaaatcccattgtaagttgaagaacatttgttctctatttgggtttgacaacatccctgtaatgtaggcattattaactccattttgcaggtgaagaaactgagtgtatccatatttgactgtttctcattatacgaattcaagaatggttaagttaaaattttatttctatcattttggtgtggaatagttatggatagtagatcagagtgatacaccagttgacttcttggcctaaacatttgaaatagacatttcaagattctttgacagtctctgttttggtcatcaaatgtgcacactgttgatgtgcataaagctttctgttgtttcaagtgaaattgaattttgggtagagcacagtggctcacacctgtaattccagcactttgggaggtcgaggcaggtagatctcttaaggtcagaagttcgagatcagtctggccgatgtgacaaaaacccgtctccactaaaaatacaaaaattagctgggcatggtggtgggtacctgtaatcccagctacttgggaggctgagcacaagaatctcttgaatccgggaggtgaaggttgcagtgagctggagtcacgccactgcattccagcctgcgcgacggagcgacactctgtttcaaaaaaaaaaatcgagttttgatttgtaagttaaagtaaataatttattattgaaaacatttaggattaagttcagctgcatataacaatctcctcttccccacacagaatcttaacaagagagagattcatttgtctttcatgaaaaagaagtctgaaattaggcagtccaggctaatatggcgctgtctggttaccaaggatctaagatccttactgctgtttacttctctgactgtaggatgggcctagatgattcagccatcatttccccctttccacaaagcagtttgagaggaagaaaagaggggtgtcccctcccctacctaagaaaacttccaggaagttccatgtaacatttctgcttatatctcattagtcggaattagtcttagggccatatgtagctgtagtggaggatggaagatgtagtccttttctggggaagcgtgtacagtaatatgctaaaatgaaaactggggttttgttactaaggaagaagagaagagaggatattgggaagccactaacattctcagctccagggcctatcagagtgacccagccttatctcccacatgatacagaagaccattctgcggcttccctgggagattttcaaccagtctttgccatgttttccaacaagatgatttttttcttgaaatgtatatacttttatgcaaagattttttaaaagctaaataatacaagattatggtaaggatcactgcagtttccattttaagatcaagtttgagtttttttccaaaattgattagtttgttggaaatggaaattcaaatggtatagaaagttttttggttttttgtttgtttgtttgtttgtttgggacagagtcttgctctgttggccaggctgggatgcagtggcgtgatcttggctcactgcagcctccacttcctgggttcaagcaattcttgtgactcagccacccaagtagctggactaacaggtgtgtgccaccacgcccggctaatttttgtatttttagtagagatggggtttcactctgttggccaggctggcctcctgacctgaagagatctgcctgcctcagccccagaaagtgctgggattacagacatgagccactgtgccaggccatagaatgaggttttaagtaagaataaagtatgtgtgaaatatttaaatatctgaccattggtaaaggaaaaagtgtgattttttttcttttgttttttgaagcctgggtaagtcattagattatacatttcttagggatagagaactcacttttataaaatgtatgattattgtattttgaataaataacatttacataagttaatattttaaaagtagaaaatggtcatatcgtgaaaagttgctctcccattcctgtcttgagttcccagtgtctttcccctacaggcactgggtgttttttacttcttgtgtataattcctcctttgatcttttcctcccatttaaaaaaccactggttttaaaaccattgctaaacctttcttttttccacttaatgacatatgcggtatgcatggcttaatgataaggatactttttgagaaatgtgtcattaggtgacttcattgtgaaaacatcatagaatgtacttacacaaacctagatatatacctgactatatattatatatggtacagcctaatgcctttaggctgcaaaccagtacagcatgttactytactgattactgtaggcaattgtaacacaatggcaaatattttcatatttaaacatatctaagcatggacaaggcacagtaaaaacatggcattatcatcttacgggaccaccatgacatatgtgttccatcattgactgaaacattgctatgcagtgcatgactctattagagtatttcataatggtattttaagagcttcctcatccccctcccccaaggctatactgttcagtgtttcactgtatggataagccataattcattaaacaggagagtcatgtcttacttacatatctatacctgctctgtaaacgcattcattcatattcaagggactgaactcttgaatttgtgcagaatatttctcttcttcatggctgagtatcctaaccagctgagaggattttcccttctttaaagaccaaggtatttaagattcagtcatttcagaaataaatccttctaaattgtgttgtataactataaaatttatttcttcttaacagtaaaatagtgggcatttttaaatggttttaacacaggtatcagcatcagtattgtttaggaatataaaagagtaatatttcaggagcttttgctggttttgccttactaagtggcaccattttgacatatatcatctatctattttacctgctttttagattttttttctcttcatctttcttgtttcctatgttggctgcctctaacataatattcctttttcctctggtacttattccccactgcttcccagttccttttcttaatttgctttgtaaatttttggtggacaattagccagataaccaggacagaaatattcctaaaataaaaataaatagattcagagagaaggtctgatggagttttcctgccgatgaaaattttggaatgaatgttttggaattctggatacctagagggcctttttgcttcctggttattaccgtgttctaggacagctctgtctaatagacctttctgtgatgatagaaatgttttatgtctgccctatccattatgatagccactatcctcacgtggctcttgagcacttgacatgtggctagtattaagtaactgaaattttaattttaattaagttaaattcacataaccacatatgacagctggctgcgtgttagacgacgtagttctagactctagttaactaacttatatacagcaagcttgattagaggagagcttgaactgggatgctattattgtgctgagaagaataaatttatagttttggaagggagacaatttggaatgtagattatcagattagcttaaagtaaatgattaaattggaactgccttttcatattgacgttatgattatttcacagtgtagcattttaaagccattgttaccagcatttatttgtggtttgtatctgtggcaaagctgtgagtccttttggtaactagggtgaaattagtagcactctaactttatttataggacttggttagacagttgcctgagtgccagaaactcctgcaaataactttgaccttccctaacaaaaagtcaaaggataaagcgtttcatagtagaagatttcagttgtatctgacatacacaaaacattactttctaatggagaaatctgtaaccaaaaaaagcataaataattaaagattttggtaactgctaggaagaacataaacagggcacagtaacagagagtacgggcttgtggggaaagacctccaactagatagaggagtctggagagttttatttgaggaagtgatatttaagctgagttctaaaagataagaaggagcctggcttgcaaagaatgaaggtggaacgaggagggatttcagaaagagggaattaaggggtatgggggagaggaattgacacaaaatcagtgtctttagaatagtgattgagaggagatatggtatgaagtgaggttggagaagtgggcacatagcaggtcatataggaccttaaagaccatcataaggagtttggaaagaaaaatgtaatgtgatgccgtggaagtaggagagtgataagatctggtgtttgttttacagagtttctctggctgctgtgtgatggtgttttggaagggagcaacaatggaaatggggaaactagtgtgatattcaggaaagagatgatggtggcttgggttaaggtggtttaaggcagtggaggtcaagtgaagtcacacacacagaagttgctgtaggttggatgtgagggatgaggggtgaaggaagggtttctggctttcataattgtcaggtagtaccaggggacttcaagggtggtgatggtggagaattaaggacccaattttgggcatgttgagtttgacatgcttgtgtgacagctaagtagtcatattggagcatggggagaggtctctgctaggggtgtaacttggtagttattaacatgttgatggtatttgaagtgatgggaatggatgagacaacttagagaagatgactcaggattgaaccccaaggaacacttgccttttagaggtctgtcgagggagaagccataaaaagatactgaaacagtaaccagtgatgcatgaaaaaacaaaaaaaatggcattgtagtatctcagaagccagaagaagagaatgttttaagaagattgtcagctttgttgaatcctgctaagaggtcagataaatgtggaagtagtagaccttgataagttgatttaatggagtggagggcttggaaactttgttttgagtagattgaagaaaatgagaagtgaagaaattgagacagatatagacaacaactttttcaagataatttaccctgaagtggtgagcagggaaatagcaggtagctggagggagatgaggggtcaaaggagaactttaaaaaaattagggttcatttaatcatttacttattatagaacattagatttagtggtaagaagatactgtctgaatgcttctcatttaaaatgacatagaaaattagctaagaggttgtgtgtagtggctcatggctgtaatccctgcattttgggaggctggggcaggaagattgcttgaacccaggaattcaagactagtctgggcaacatagtgagacccgccccttctctaaattttttttttttttttttaattagctgggcgtggtggcatgtgcatgtagttccagccacttgggaggctgaggtgggagaatagtttgagcccgggaggtcaaggctgcagtgagccatgatcgcaccactgcactccagcctgggcgacagagtgagatcctgtctcaaaacaaacagacaaaaagtaaaataagaaaattagctgagagtaggtagtgaagagtgaatgagggaggtttgaggagaagcaagaaatagtcattttggggagtaggaaagctttcaagggcagctttggtggattgcttggcatcgttgagtgtccatttgaggtttgtgatcatgaatatatagtgaagtcagtcagcttggttatgtgatttttcttcagcaacattcagctgattgggcataggcactagaaaaggcagacaattggatttaaccaggattggagttgtgtcaggtggcagtgatggagaggacaaatgattgagggtatttgcaagggagagattgtaattatggaacacggcatcaaaattggacaaagagggtgcagaaccggagtgggtagataatggaaaagtggttgggatgggaggacttcatgacgtcaaaaattgtagggaggggataccagagaaagctagttagaagtaagggaagttctttgagagtataattgaaacgtaataaggaaagatgggtcttttaagatgatgcagcttttcttctcttttttttttgagacagagtctcactctgtcgcccaggctggagtgcagtggtgcattctcagctgactgcaacctctgcctctagggttcaagcgattctcctgcctcagcctcctgagtagctgagactacagatgcaccaccacacctggctaatttttgtattttcagcagagatggggtttcaccatgttggccaggctggtcttgaactcctgaactcaagtgatccgcctgcctcagcctcccaaattgctgggattataggtgtgagtcaccgcgcccagccaagataatgcagtcttctgttttaggggtggtagctctgggtttcctaataactgggagtaagagctctaacaaatcacttaattgcctttcccaagaggctagctttgagatggaccgctttctccatgtatatatacatctagagcttagtttagacatcatagaaggtaaccaccattcacagaagtttctgggtctattctctgaatgacatcagtagtagcagtgttttggccagtgcacaagtacagtatgtgtacaccaactcccaaaccctatctctgtcgtttgttgttgttttttacttttttcttgagatgagagttttactatgttgcccaggctggtctcaaactcctgagctcaagcaaaccctcctgcctcagcctcctgagaagctaggattacaggctcacatcaccacacctggcttcatttgttatttaaagtcttggtaatgggcagaggtagagtgcagggttatttatatccagggtaagtttttcagtgattttttttccagtcttgattcagttttgtcagtgaataggtatgatttagtggaaatgatcttggagtcttaaaaacgaacgttgaacttttggctctttattcactagctgtgagaccatgagtatattatgtaaccactttgggcctcaatttcctttgatctgtgaaaaagataacagggcctgtcttacagagatattgtgaagatgcaatgagataatgcatgcaaagttgtggcacataatatgctctgagtaaatagtagcggttggtggtgttacattgaaaccagcaagtgggagaggaatgttcactgttttgtcttccagggtggtttacatcccctaactggaaagtggcagccatatctacgccttctcccatgagtcgctactgctgcatgtggccagtgcctctgtctagaccagcttctcagatttcggtgtgcctgagagttacctggggcttttgttatcatatgattttgattttgtaagtctagggtggggcctgagattcttcaaatctaaggagtttccagttgatgctcattctgctgttgctggtccatgtgtcacatttgagtagcagaattctgttagagattgccctgtgggaatccctgctattttaagctgagaggaagtgagggaaaaagagcctcattctttcgacttttttttttttttttaagtcagcttcatagacaatactcatacatctcatttctctacctcagtgttgttttggtgagtctgtattgtctctaccagtccaggaagtgataggaatataaactatgtatagagggttgcctcagatttcttctgaagaatttttagtgcctgatttctcaggtacatttttgagaaattgtgctggctcccccggtatacctacttccccccgctatcctcttacaaccacagagaaactcgtataaaacaagtagcctgccagcctggccaacatggtgaaaccttgtctctactaaaaatacaaaaatagctgggtgtggtggcaggcgcctgtaatcccagccacttgggaggttgagacaggagaatcacttgaacccgggaggcggaggttgcagtgagccgagatcatgccactgcactccaacctgggccacagagtgagactccatctcaaaaacaaacaaaacaagtagcctcttgaattattggagtcagaggcagagcatctaaaatgtggctccaraccctttctgcccaccagactcacattgcaaaatccagcatttttgagatgtaggaattcaggaagcaaggttagaattattggcaatacccatattgctgtcccagattatctgatttttctttctcagaagcaagcatgccagaaacttcttctgtgggccctcctcagaagactttctttagtgctcaaatggacacattctctcctctgaactaacagatagggtgataagctatcagtcacaaagtctgataacatgctctcctgatagaatgaagtatgtgtgcatcttaatctctgtgtataagactgtgattctttttagagtctctttatagtgtggagtttttacacctttttgtctcttaatgtgaattgtatatagctataaagcatagctttccttatttgactttgataattggaaataaatttttttcttctcctaccactttgttcccccttttttctttctttctttttttttttttgttttgttttaaaggtagaaaaatgtgaacatgcaggarcatgaataaaaaagataacttagcttccctgtgggtttttggtttttgtatgttttcataaaggtaacatacagaagagttttatttctgaccagactgaccacctaattttaaagattatgatcagaaaagaaatagatgcatttataataggaatttacaagcccttcctgtggttccaaagaagtttatggtggttccacccatgggagtttcagaggtagtttgcagagtttttgtgacatatttaaacttttctttattttgagggtttcttttcttggtatttttctcctgctttgctgcagggtatgtcttttatattttattttattttattttttatgtttgttatgttatgttatgttatgttatgttatgttatgttatgttatgttatgttdtttttgagacagaattttgctcttgttgctcaggctggagtgcaatggctagacctcggctcaccgcaacctctgcctcctgggttcaagcaattctcctgcctcagcctcctgagtagctgggattacaggcatgcgccaccatgcccagctaatttttgtatttttagtagagacaaggtttctcatgttggtcaggctggtcttgacctcaggtgatctgcccgcctcggcctcccaaagtgctgggatgacaggcatgagccaccacgcccaaccttttatctttatcctatcctaaacttgattaaaagataacactataaaattacagtatgaagatccagaatttcattgtatttattttattgatacttggttaagaatgaatgactgccagtggtcatggtggctcatgcttgtaatcccacactttgggaggcccaggcaggtggatcgcttgaggtcaggagttcaagaccaacctgggcaacatagtgaaaccccgtttctaccaaaaatacaaaaaaattagccaggcgtggtggcgtgtgcctgtggtcccagctactctggaggctgaggtgagaggatcgcttgagcctgggaggcagaggttgcgatgagtcgagatcacgccacygcactgcagcctgggctacagagtgagaccctgtctcagaaaaaaaaaaaaaaaaaaaaaaggattgtgggagaagatggcggccgctgcacaatcccgggttgtctgggccctgccaatgtcacattctgccattactgcaatagccacatccgtgtgtcacagcccactccattgccagcttcatcatgccctcatacctcatgggaaaggtgaatgttcctcaagtcagtgggattgtggccactgggtttggagcaacaggattcctgggccgatgtgttgtcaaccaccttggacgcgtggggtcacaggtgatcataccctatcggtgtgatacatgtgacatcatgcaccttcgtcccatgggagacctgggctagcttctgtttctggaatgggacgcgagagataaagattctatctgacgagtagtggaacacagcaatgtggtcataaatcttgttggacgagactgggaaaccaaaaactttgattttgaggatgtttttgtgaagattccccaagcaattgctcaggtgtccaaggaagctgaagttggaaaattcattcatgttgcacatctgaatgtgaatattaaaagctcttctagatatttgagaaagaaggctgttggagagaaagcagtgagagacacatttccagaagccattatcgtaaagctgttggacatctttggaagagaggatagattccttaattattttgcaaatatgtgttggtttggtgctataccccttgtttccttgggctggaaggcagttaaacaaccagtatacgtcgtagatgtatccaaaggaattgttaatgcagttaaggatcctgatgccaatgggaaaacctttgctttcgttgggccaaatcgatatctcctctttgacctggtgaagtacatctttgctgtggctcacagcaaaggggtacttcctcccgtaccccttgccaccttttgcctatcagtgggtagcaagagactttgaaataagcccatttgagtcctggacaacaagggataaagtggagcgtattcacatcacagacatgaccttgtctcacctgccyrgcttagaagaccttggtattcaggcaacaccactggaactcaaggccattgaggtgctgcggcttcatcacacttactgctggctgtctgctgaaattgaggatgtgaagctggccaagaccgtcaacatttagtgcctcccgagcaactcttggttttggtgtcttttgggtcagcccgtgtggtttgagcacccagccaggtggtctctttagagaatcctgtacacagtgaataagatcccaccattaaaacatttgaggttaaaaagaaaaaaaaagaatgagtgtcgagtaataaaagactcttcaaagaatttgaaaaaatgaatctcttatcagtgtaattttaatatagttatttacagtatggtatggggagtgttggtgacttaagatttagggcatgagcccatgtaactagagaggaaagttgtgtataaaaactgattatggacatgtaaaagagtctaagtaacactttatggaaagtcaagatttatttttctttttttcttttatttagaaaacaggctatctcagtttcaggcttggaagttctttctcctcttttgtactagaaatgtagtaatcttgccttcagaagaagcagagaggttctatgtagagaaaaagaaaaggtttgggtgaggccaagaagaatacctgccccacctctccaagtttaaatgagctgggagtttaaggtgggaggagagaaaacgttcgtctgcggaaagcatgcgttcagtgtgaaagaaaaggaaaagtgattctatttctaccctaagaggaagaaaccccactatggcaggtaactaagcccagagcacgcacagtgggaatattaggtagggagagtgaaagtacctgcatggggcctaccttgaatgtgagacttgtagaccttacttggagattttataagcaggaaggagctgtttcagcatgtctgagggggagccaaaaccctgaggcagctggaaggtggtttttgtttgctttttattttgttttgtgttttctttaatgagtgggaaggagtggaatattcctcaaaacctgttaccgtttgagaatgttttgtgcacctactgtgtgctaggtactatgcaaaagactccatggccaaaaatggatgagccaagacgagatgttaggtctccactgaggaagatgtgcagaggagaagtggtttgctataggaatacttggagaagtagcccacagaggtggtcaatgccatgttacaaacaccagtccccacagagaaaggagagctcactcacagctggggtttgcttttggatttgaacatggagaaaggggtcggggaagcaaggaacacgtatgggcattgacattggcattagaatatgggggataattacgtgattttctgaataaaaaccattaggacaggtgatttgataatacttgttcaccactgggcataatgaatgaaaactcgcctggcatataggaagtacttaataaatgtttgaactgaattaaaattagaaaacatggtcaccaggaacatggcagacagtttacgtagttatatcattacaacacctctgaaaggagtattaaacctattttttggtagaggaaacagaagcctggacaggttggaaactttccccaggccataatgatagtacttgtagatctagaattgaaacccaagccgtgcaccttagcccgtctgcgtggtgagtaaagtgtctgtaccatgctacgagctcatgatccacttgactccttcagaagccaggctatgttgatgtgaactagggcagtagtaataaaaaagatgaaaagcctattcagttttatatcttaagttttcctgtgttttgaaatcttgcaagattaagaattattagtggtgaaatgacgtaaagaatagtggtgtcaagcacacattgtgagaaaggaatgtgggctctgagcaggttctgtgtgtgtgcttggcttctgcaaggggctccacaattggggcagagggaaagcttggctcacttgccttgatcttagagggcagagatttttgattgcttcattcatgtttaaagaactcatcttaaactaatgtatatctagcactagaaactggtgctggtggtttattactgaccccacccatccctgtcttttgcaataatctttgtgagtggtgattgtgtttctagaagtagaattgcagagagagattccctgaaggcaaatacagagagagtgtgctgtacactctagttcagatactcagagctgggaactcccagagagagagagagaaagagagagagagagagggagggacggagggagggtgagagggaggagagagaacaacagaacagtcagctggagcggaggggggaggagaccagtcttttcttttttttttttttaggattttttaactcaagtgattttggggggtttctccccacctcaaactcttgccccccagttttggcatcttctttcctgtggttcactgaagtgcctttttgcagtccaggatccactgaccgctgagtttgagcagcccgatctgacatgatgtacctctgggtgagtacagagtgctgtgggtgagggtttgcacttgcacatataaggagtggaaagctgcgaggttctgctgttgcacaaatggcctccccacagagcacagactgccacatccccttctgttccaaggtgttaggtttttaaaacctagcggtgattgtgacattgttttttttcctccccctatgttgtttatcttgtcagacttaggcgcaagggctgaactccctgcgcagtaccatcccctgggcttggtaggtttggagaaggcaagtggggcaggtgaagttgtgagctggttgcttcaggaactgcagtcttcctggtggctcaggatcgacttgtgttttgttttgggggtactgaccttgttaagccatgtctttagatattgagagccaataggcggcatgattattaattaggaataagctttcataagcttttatctaataatttttactatccttcacaatagtcttgtgaaataggtcactcactactgttattaaaattgtgtgaggaaagtaattaagccacaaagagtgacttgcccktagttagaaatcaagtctatagcagttagaatagtaattaataatgagacattataaagcattttatatttgccaggaatgtagtaccttctattactgtaatttaccgtcaatagtagcattgtagtttgggatggagagaaactttctgggactggagaagtttgtaaattatgaaatgtgataacttttagagaaatgtcaggggaaataatagagaaactgctcccccaagccgcctgcaatttttagttgttaagacaagaacatcttacagtccgttgcaaagatggcagtatgtctcttgagcaaacagctgttgtgtgttgctaagggagcctactagatgtgatgctcttggctactaaccagctttttgaaagtttccctttgccctttgcccttcagcccagatgtctggaattgcaggaacctacttggctaacacaggctaaatttataaattatcagaaagcaaatgttaactgcgtttgcagagatggagcttgttcacagaagatgtatatgtatgtgtgtatgttcggaggggctgcttttcgtgcttctcccttcatgtttaaatatgaccttgaaatattattttctcttctctattgattttttttgtagtatttgtaagagctcagaacttttctgacacactaatgtgcattaagtagttttcgcctccctgtaaactagtcatctgtgcaggctctttgcagccttgtgggtgggattgatcagccctgttgacctgaaggatgggctgttctgtcttttgatttgtttggaagaggagttatgaaaggaagcaagttgaattaatctcattttcactcacttatgtttgatgaaagcagacagtgacagtctccttagttatttcctttgtgcttatgttacagttacttgtgtatttatctcaatttttttttttacttattaaccctggaacagagcttccctaccaatgctacatgccagattgagatagaaatatgccaagattactataccccacaacccttggagcagccagctggggcttgggagtcccctggtcactttgatcatgtgcaccctaatttgtttaccactttgtgctataaaaatatttcctatgtatgccatgacacctgaaggcttgggtagcactgcctagagggcaaaaagcaggtcagctctatctcttttattatttgtgtcatctagcccaatgcctttgtttacttcattgaggacgtgcagaaggagctatagcgaataatgcccagatacatagaaggaagccttggtggtcacgcattcagtgggaggcacagaggagctgctgtggactaggaataggagatgagagttttagtgtaggtttagccagtaccaagccatgtgactttcggcagtcatataactattctgagactcagtttccacatgcgtaagataattgaactgaacctcttctgattctgaaattccatgaagtgaattttatgtaacagtagatatgcctgaaaaatgcccagttctgcaaggatgtttaggtctaggtgatcagagaaaactgtcaaacatactgtatcacctcccttgcatgcttggtttggtaccagtaatgggtcaaaggcactctttctgagtattctagaaaaattactggactatgttcagttgtcagtacctctgaattggtgcagatgggcatttttagaacctgtagaattgaagagtaaaagttacagcttatccaagcattttcatttgtgtagttagatgcagctcattaatttgctcctgtgtgtctagaactctgagatagaatgctatcttgtgcgctctctatgctgctttgccagattttctccccgctttcctgttgagtcatcctcttttttagtgaatttggtagcgtcagttggcagcatgaggtggtgaaaagaatacgggtttcagaaacctcactaggtctaaatcccacccctgccatttccaagtgtatgactgttaagttacttaacctctctgagcctcagtttcatttgtcatatagggaaaatagtggcactcaggattgttgtgaagatttgagataatctatgaatatacttaacatagtgaatggcacacaatagatgctcagtaaataactagtacaagccaactttttgctttgaacatttgcataggcagactactcaccactccgaagtgttttctgtatcacgttgagggtatctttgaattcatctagggagaactttgataaacacaaactagttttttgtgaaatatttttcctcttagtttgtatgttaagtactcgtggctcgggagcccttgttaaggttgcctcctgatggagaaaaatccccattatttgttgtaaactttttttttttttttgcgttgcacagtactattaagcattcattatgtcatttattttccctctctcgccatcatcaaaaacagggaaagagacagacagatatgattcctgtactgaggcaacttacttgtttgatgattatgtaatttatatccaataaacataattatagaccacttacttaaattaccagaaaacaggatatgttctccctgtctgtgcagtcttagctggacaggcaccaggccctctcttattcatgctctatatggatgaacttctggattttattttgaactgttgttttttcatagttcaattctgtcttcttaataaatcagttcagccaacatttaatgaatgcccataatgggtagagccagctgttgcaaatacaaagatgattaaagattaaagacatagtgtgccctggccggccttagtggctcacgcctgtaatcctagcactttggaaggccgaggatggcggatcatgaggtcaggagatcgagaccattctggctaacatggtgaaacaccgtctctactaaaaatacaaacaattagctgggcatggtggcacgcacctgtagtctcagctactcaggaggctgaggcagaagaattgcttgaacccgggaggtggaggttgcagtgagccgagatcacgccactgctttccagcctgggcaacagagcgaagacatagtgtgcccttaacaaatttataacaccatggtagagaatctgtatgcacaggtaataatgatttttgaatgctattcgaatctgtctacacagataataatgatttttatatgctattcaattaacatacataagtgaaatccttttatgtgctatttcatcctcacaacattgctaaggactaagtatcattatccctattgtacaggtgaggaaagcaaccatgagagagtatatgacaagcagtaaatggcagacctggaaacgcaatctcatcttttaaaaactatggctcttatttcattttatgctagcttcttttgggagaacctgatttttttttgtttcattttattttattttaaactgtctattgagtgataacatttactcctcagtgcacctgagtgttagctattatcttcattttacagatgagaaagcagatatttcagtaacttgcaaagtcacacagtttgcaattgtcagagttagaatttgaactgtggtttgtccatccctaaaacttgctataccacaattagcctcgtcttgtatttgttcagtggtttccagtttatcagtatagtagtcccccttatccatggcttcactttctgtatctctagttacccaaggtcaatcacacttcaaaagtattatattttgagagagataaagaaaccacattcgtgtaacttttattatagtatataattattcagttttattattagttatcattaatctcttactgtgcctaacttacaaattaaacttaatcgtagtatatatagaattcagtactacccaaagtttcaggcatctacttgggggtcttggaatatatttcccacagatgagggacactacctgtactagcattcagcatggtacaaggctagagtagagaaatgaaaataaggaaacctgaattctgttttcatcacccttcgttacttgagacaattacttaactgtgtataccttgatttttcaggttacgaaaaagatatattcttaggaacattcatggaataatcttagaaaaatgcatatcagtcattttagaaatgaagtagcaagtaactgatggctttatcataaaacttgaaagtcacagactgtgagtcaaaagatacagtttcgggtcttggttgtgccatttgtcagtgtatcatctttctgagcatgtttcctaatctttaaaatgggaccaagagattatagagataatctgtgaaagtttctggaagttcttttgtgtgaggcaaaaataagctaataacaacaccttattcaggtttcacgttagtcatttagtgctttttatcactattttgccactctaattgctctacacaattagagaactagacttaatagtaaattgaattatcacaaaatgtagacaatggctcagttcagataacatttaaggtcagatgccgtgataggtaccgtacttgacagtgaaaagccattaaaagattctaagtaggattgggagtagggtgaagtgaagtttataattagaytttttaaaaagatacctacatagattagaggagagtaaaagtgcagagagaagttaggtgattgttgtgtaagagtctgagtgacagggaaggtcatgatagaatgggctggagggaagcggaactgtattgagagattcagaaggtaaaattgacaggatgttataatttagaagaggaccaggtttttgtaggagggaagatgaaagggatcatgggtttggttttggatttagtacttgggtaactttgagatgttcaagaggaaatattgcttacatggccacctaggtctggaaacagaaggaaagacagaggctttcctctattgtgagaaacctgcatgccccgagcgggtctcataatggcttaaaatgataacggtctagggaggaatgtagagcaagaagagaagttaatgcctggagaagaatgaattttcttttcttttcttttcctttttgagatggagtcttgctttgtcacccaccctggagcacagtggcatgatcttggctcactgcacccttcgcctcctgcattcaagcgattctcctgcctcaagcctcccaggtagctgggattacaggcacccacaccacgccgagctaatttttgtatttttaatagatatggagtttcaccatgttggccaggctggtcttgaactcctgacctgaagagatctgcccaccttggcctcccagagtgctgggattacaggacttagtcagtgtgcccggccaagattttcaaaggaagcagggaactaggttttaaagaccttattcttaaggaggaaaaccaggacattaggaaatcaagataagagattgtggcaagacactgaaaactgtccttggatttagcaatatggaagtcattggtgactttagcaagggttattttggtggaatgatgagggcagaagcctgagtttagcaatatggaggtcattgctgacttcaacccctcttccctttctgccatgagtggaaggaagcagccagagaccctcaccagatgcaggtgccagtgccacacttcttgcacaacctgcagaactgtgagccaaataaacctcttttctttatcaattacacagcctcaggtattcctttatagcaacattaaatggactaagacaatagcctagagcaatgggctgtattgtatagcctaggtatgtagtagactagaccatctaggttggtgtaagcacacggaaccttgatgttctcacacaatcagattgctcagtgatgcatttctcagaacacattcctgttgttaagtgatacatgactactatattgcagatttgaggagtgaagcaaggtataaaatagtaatctcaaaaaaatggggagtaaatttactacagagatgaagtaggcctaagatttgtgatcataaatttgatgtatgtggtggcgagtcagttgtgtgagttttatccagcaatcttctgttatttaaatgcaggagaggaataagtacatagttggagctgccaaatgagttagactaagggaaaagaggacaaggaaattaagattttttggagaggactctgtgtagtatgaggccataggatctaaactggcttaggagggaggtagaacataagaaggagtaatagtgaaaaagtggtacatcagcctgtaaactatagatcttaaggaggctggagaattgccacaggggtcaaactactattgtaagcaaacgcttgatggtgtgataatagaatacttgaaatttttgtaggtaatgattgtattagaatatgatgctaggtgaatggctttaggtgaggtggtggaaaaatacagttggtgctaaagacttcaaaaagaaggccaaaatgttgaatctatgtggctgttgaagttatcagagtgataagactaacaatggagatgaaatcagggagccctatttagcaggggacaggtgcagtttgcctggagggaagagaagtggtttggaagcagtattgggaaggaaggaagaggatatctggaaggtccaacactatatggtaatggggagtaaggccgatgcttgcccctgctgaggtatgtgatgagtaagaaaaaagtgtttactgtagaagcaacagtaatctcaggggcagtctggtttccttaagatcaaaagagtaaagagaatatcacagaagagaggtgagtgtgtagaggagtttgctgagaatagcccatgacctccagggcgtgggagggcaaggaagtgcaggagatgggatcagaaaaggcatagagaacagttaccattgtagttgttcaggtatgaggtaaaagggccttgaggtcagggtttgacaatgagaataaagattttaagtagataggaaaggcttacgcatgaatgctaaaatatggcaagcttcagttatttaggaaagccgcctttactatttgttttaatatgacatttaatgttaaacaactatctctttctggtcatgtttcaaatcagaatatggaattttgttgttgtaaaatatataaattaaggactaaatttggaaccaagtaagtaaatacttagtagattttaaattgttcgtttggaggagcagaaaatcagcgtggtcaaagcacacatattgacaagacggagagggagggtggaggattaaacacccaagatatatttcctctggtccttttcccaacaacgacaaaaatatattttaggagttgtagtcttacttcactaactcccctttctccttcttggttctggaaaactgtacagtcgtgtaccacataaagacgtttcaggtagctatgaactgcatcattcatcagtgcagttcaatgcatcagtcaatgcagttgaaggcatcagtcaatgcagttcaatcttacggtggtttcataagagtgtataaataacaattgtatctttactgtcccttctctgtgtttaggtacataaataccattgtgttacgattacccacagtagagtattcagtagtcacctgctgtacatgtttgtagcctaagagcaataggtcgtacataccgtatagccgaggtgtgtagtaggctaggccatctgagtttatgtaagtacactctatgatgatctcacaactatgaaatcacctaacaacacatttcacaggatgtgtgcctggcattaagcagcacatgactatattgcttttaaaagttgtaatccagttgaaagcattacattcctgtttagaattaataggtttttctgaatgtgagaacttggtgctcctcttcacacatttttttttagcatctttcactattattaaataagagaacatatgttacttgtaattgaaggccagcatagaatagacattccacagatattggttgaaaagttaattggatattctaggtataatgaactgtctgggtagcaaagtgttcaactaaaatattgtgtttgggccgggcgcggtggctcacgcctgtaatcccagcactttgggaggctgaggtgggcggatcacgaggtcaggagatcgagaccatcctggctaacatggtgaaaccccgtctctactaaaaatacaaaaaattagccggatgtggtggtgggtgcctgtagttccagctactcaggaggctgaggcaggagaatggcgtggacccgggaggtggaggttgcagtgagcccagatcgtgccactgcactccagcctgggcaacagagtgagactctgtctcaaaaaaaaaaaaaaaaaaaaaaaaaaaaaaattaggtttgggtttcacttaacccaaatctataggctctgtactgtcttcattgtgtattaacttgtacggtgttttacttgcttatttaaatatagaccatctattcagaggttaaataaatcaagagggaggtaagagtcagaagcttatgttgtttatgcggggaaacgacctagctttcattccctaaaataactgtcaaattatttttcctgagtgtgtgagatgaactttaatcactggcaagattcttgtatccatgaaaatcagaaaactgactatggtttcattgtgtttctcatcatacgctagttacatttctgtccctggcctagtcattagcctgccatatgattagacagatgatctttatgctcttgtgtctcatctgtaaaatgggcatgatttttcccagtagaattgttaagtattatttcttagataaattgacattcacataaaatattcttaatgatttatttattctgcttcttgtacagtacttgaaattgccagttaggtaaaaaacatcatggtttttttggcaaggtgggactgaaggtctcactaaacagtacagtagatgccaaaggctgggcaggggtaggtggtcagagcacgtgttgggaagatcagttgttgctgtgtctgtgttctcctctgctatatttaagtaattttagatatttatttttatttttgtgtttaattttattaaattaaggttattaaaaataagtttcttggattcattgaaaatcaaaaccatttttgcatgttgctcaacaagttgctctaatattggatgtttgcagataatattcaaactggagaaattttcgattgttaaaggcagttgggattggaagagataagaaaacaaattcccaagtgcctcctatgataggaggcactgggtctgatgctttcattactattatcttgtttcatcttacaacggggaaggaagattcaaatgcgcagtcttgcttcagagtcagtactcttaaccaatatgttgtaatacattcagctagtctgtgataggcagcatctaagatggtccctagtgatccccacctcctgatattcatacccttgtgtattatcttccccttataggctggacctagtgactcactttgaatgcatagaatatggaaaattgatgagatgtcacttctaagatttggttacaaagagactgtggcttttatcttgggtgcttgccctctctacctttctctcagagcccctacactgttaagtagccttgtgggaaggcccaagagccagtgatgtctaggcctaacagctagtgacctgccagcagccaggtgagtgagtttggtggtggatccttgatagtcaagctttaatgattgcagccccagccaacaccttgactgcagccttgtgagagtccctgaaccagaagcacttagcttacccagctggatttctgatccacataaactgagataataaatgctgttttaagctactgtgattgaaaatgaattgttacatagaaatagataactaggccgggtgtggtggctcacatctgtaatcccagcacattgtgaggccgaggcaggcggatcgcttgagcccaggagtttgagaccagcctgggcaacatagcaaaaccccatctctactaaaaatacaaaaattagctgggcaaggtggtgcgtgcctgtagtccagctacttgggaggctgaggtgggaggatcacctgagcctgggaggtgtaagctgcaatgagctgagagcaagaacttgagcaagagagcgagaccctgtatcacaaaaaaaaaaaaaaaaaaaaaaaaagagataactacagattttggtaccaatagtggggtgctttttggtgaaaatctaaactgggagtgactttgaaactgggcagtggacttttaaggagagtgttagtataagattagaataccttgaacacattataaaaatgggactttgaggcgattgtcacgaggtcttaaaggaaagaaactggaagaaaggggatccttgttatgtagtggtagaaagtttagcaacactatcatttatagttgtggaaagcagaaagtgtgtttcatgaactgagagatctagctaagtaaacttctaaacaaaacattgcagatcccctctggttccttcttgctgcttaaagtatgaggggaaataaataaattgagggaagcactgttaaaaaaggagccagaacttgatgattttgaaaattctcagcctttctggttggcagagggtgatgaaattgagacacggcaaagatcaattcaagagccactccggggagaatggcggtctaaagataaagccaagactgtgcctttaaagcctgctgttaagacctgagaaggtagtgccttagcatcctcttcagtcacactcaaggcctctccgtcaaacaatagggcttctagcctttttagcaggagcccaaggtagaggtagaagagttcctcttggagagatctatgggtatagcttttgtctattgtggtgagatatgcaggaaatccactgtagctaggactgaacaggaaaagaaacagtacaaaatgaaaagaggctgtcggacacccctagcattctgctggcaggaagcaggctgagaaagtgctcaggagctaacacatgccacctttcatcaaaagggaaagatgactcagaggttggaagcaggagcctagagatgaaggcaaaagtcatggagaattcttttcccagtgttgagacctaatcaaggaactttcagtgtttgccctgctagatttcagagtcagtatggatcagtgactcttttgtgccccccaatttcctgcctttcttttgtagaaaaagttatgccatttagtgattgcaaggattttagagaacagaaacccagagggcaagtgagaaagcagccctaatactctgccatctaggctcccagaatgccatgctgttgttaaattgcttcttttggcttttgcttacaagtcataagtaccagatgatatgtgcaaaactgaagcaatcaggagaggatttcccacccccgtatttacccactttctctcatcagtatgaataaactgtcccctcactcatgaagcatttgcattcctatataaggtgaaccttccagttgtatactaggtcctatctctgctagtctgtttaggacatggatccagcaattctcttccctctctctgggatcatcaagttttctgtctttattggattagtcccgtcagcatacagttaagctgttcttccacttatttaaaaataatactcttgacctcactttgccagcaactgctgaatttcttttcctttaaagcaaaactcagtagcgttgtttatatttgattatatctgattatatcagttctcctcttaaacccacgcagccaggtttttattgcaaccacaccactgaaagggctctagtccaagttgccagtaacttgcatgctgctaaatctagtggtctggtctcagccctcatcttacttgacctatctgtagaatattctatcactgatcacttcgttctctaattcactttcttggatacttgacttgcaggacatcatactttcctgattttcttcccacctctttggaagtttgtactcagttttaaagttgtaatattttgagccaagtcctttcacctctttttttgattctctttcatccactctcatggctttagttctcagctaaccaggaaagttttaccagccgggtaaaatgtttttttcctttaacatatattaagttttcttttcttttcatttcttttttttttcttttttcttttctttcttttctttttttcttttgagacagggtctcactctgttgtccaggctggagtgcagtggcgtgatcttggctcactgcaacctctgcctcccgggttcaagcatttctcctgcctcagcctcccaagtagctgggactacaggtccatgccactacacccggctaatttttatatttttattagagacagggtttcaccatattggccaggcaggtctcgaactcctgacctcatgatccacccgcctcggcctcccaaagtgctgggattataggtgtgagccactgtgcccggccctaagttttcttataattaagaaataagaataaagggatagtgaaaaaacaactgcattagacattaaaaaaaaatttcttcctttttttttttttggagacagagtctcattctgttgcccaggctggagtgcagtggtgcgatcacagctcagtgcagtctcaatctcctggattcaagctatcctccttccttagcccctcgagtagctgggtgggactacagatgtgtgccaccatttttgkatttttatttatttttttgtagagacaagtctgtggctgtgttgccacaggctggtcttgaatgcatgatctcaagtgatcttcccacctcagcctcccaaagtgctgagattataggcgtgagccaccatgcctgaccaaaggttcttccccctcctccctgccacccgagacggagtctcactctgttgccaagctggagtgcagtggcgcgatcgtcggctcactgcaagctccgcctcccaggttcacgccattctcctgcctcagcctccagagtggctggactacaggcgcccgccaccacgcccagctaatatttttgtatttttagtagagacggggtttcaccatgttagccaggatggtctccatctcctgacctcgtgatccgcccacctcagcctcccaaagtgctgggattacaggcgtgagccaccatgcccagctgtcaaagtttcatgcaactaattagatattacccctacagtaaccatcaatcacatttgaatgctgtctatatcttttaatcccttttataatacctcatggtttttgtcctttttgcctatccctcctttcttccttccctccctccctcccttccttccatggctgggaatagttaaaaagtaaaagttgctgaaaagtcagaatgtttcaagatgtaggaaaaataaagatcttctaaaatttcacagtgaatcttaggtttataaaagggtccaaggaatacatgtattattacaagataaaatagtttatttttaaagtaacaatttcgtttttctgttttctttttggaatacctctaagaaagaaaaatcataaagtataaattcttacaggtagaactgaactgcttgaaaagaaaagttgggcccagtggactctgatgatacactgggtgttaaattctgtctgtatgttcttggctctcaaatgtatacctctagctagaactctctctagaagctcatatctaactgcctacttgacatttccatctgtaatataatagttacctcaaacttgacatgtccaaagctgagctcctggcctttacttgccttcctctgccctcagacttgctaaacccacagttttcttcttctcagataatgacatctttctgttacttgagctaaaaaaaaccttagtcatcctggactcctctttctccctcactgcggtcctgttaattagcaaatcctttaggttctgcctttcaaaaataacctaaattcaatccatactagctcttcttccttttttttttttcctcagtctcgctctgtcgcccaggctgcagtgccgtggcatgatctggctcactgcaacctccgcctctcaggttcaagcgattcttgtgagtcggctacctgagtagctgggattacaggtatgcgccaccatgcctagctaatttttgtatttttagtagagacagggtttcgccatgttggccatgctggtctcgaattcctggcctcaagtgatccaccgaccttggcctctcaaagtgctgggattataggcgtgagctgccgtgcccatcctactagctctgccacttctatcctggttcggtattccatcttctcttgcccaggtttttgtaatagtctgctacctggtctcgctatctccactattgacactgaagaatttattctaatcacaacatctgacataatcctttgaaaatataaatctgatcatgcacaaaatccactgatgtgtttcgctcagaagaaaagctagagtccccacaaggctccagtcaagcctgctcctaggtacttgtttgactttcatctcctcctgttctcatttctcacagctacttaggccttttggccattcctcaaatttgccaggcactttgtacagctgttccatggtattcatgagggggttggttccagagcctcttaaagatacccaaatccgcagatgctcaagtccctgatataaaatagtgtggcatttgcatataacctacacatattcttctgtatactttaaataatctctggagtgtttatagtacctaatgaagtgtaaattttatgtaaatagctgttatattgtttctggaacacgatttacggtgacaaggaaaaaaagactgtacatatccagtacgaattatttctcctgccccaaatatttcccattcatggttggttgaatccagggatgcagaacccacaaatatggagggcttactgtacttgtttcttctgcctgtaatgcttctctccagatatactcatgtcttcctcctggccttcaaatttttgctcaaatgtttcctattcaataaggccttttgaaagccattttactttaaatttttcatagcatttatcttctaaatattataaaaacaggccatacggccaggcacagtggctcatgcctgtaatcccagcactttgggaggccaaggcgggtggatcacgaggtcaggagattgagaccatcctggctaacatggtgaaaccccatctctactaaaaatacaaaaaattagccgggtgtggtggcgggcgcctgtagtcccagccactctggaggctgaggcaggagaatgatgtgaacctgggaggcggagcttgcagtgagctgagatcgtgcctctgcactccagcctgggtgacaatataaataaaaaataaaaaaacaggccatgcatggtggtttatccctataatcccaagactttgggaggccaaggtgggaggaactccttgaggccaggagttcaagaccagcatgggcaacatagtggtaccctatctctacaaaagcaagtttaaaaattagccagggttggtgggacacacctgtagtcctagctgcttgggagatggcatgcacctgtagtcctggctacttggaggttgagacaagaggattgcttgagcccaggaggtcaaagctgcagtgagctctaattgtgcagactgcactccatcctgggtgacagagcgagaccctgtatctttattttattttattatttatttagatggagtttcactcttgtcacccaggctggagtgcaatgacatgatctcggctcactgcagctatcgcctcctgggttcaagtgattctccagcctcagcctcctgagtagctgggtttaaaggtccataccaccatgctcggctaattttttgtatttttagtagagacagggtttcaccgtgttcgccaggctggtcttgaactcttgaccttaggggatccaccaacctcggcctcccacagtgctgggattagaggagtgagccactgcgcctggcttgagaccctgtatctttaaaaacaaaacaaactccgtgtgtgtgtgygtgtgtgtgtgtgtgtgtgtgtgtgtgtagtagtagtagtagtagtatgtatatgtatgtaaaataaaaactttttttcccacctgtctcctcttttagagttttttgtctggtgtattcgctgctattatcttcagtgtctagaataatgaatggtgttcaataaatatttgtcaaattctagaggtttttttacctgtgatttttttcagtaacggaatacttagtaactatagaatttatagtggtagaactctagctgacatcagctattctctctcacatcgcagggaccagtgctttgtactattgaggcagtagtgctttaatggcacaagctttggaaccaaattaactgggtccaaatctggttctgatgcattctgtctgaatgacattggataagttaccatgctttctcatctgtaaaatgagaataacataatatctatcacagagggttgttttgagccatgtaacgctctcagaacagttcttggtgcatagtaaatgttcagtatatgttagttatgattgttaccgtttcagacccatcccagcagttctgagtctgttgtactcctgagtggcaatactgagaactgattcagggtctcctccttatcaccaagtctctttctcctttaaaaatatcatgggtatgttaggtctgcctttctacccttcacctccagttctctcttctactgtttaatctttacttacactaatagcattcttttatatatccacattttcccctcttttttttctcttcctttctcccttcctgtccttttagcaagtacttattaagcattactttttgcttccctattctgttctaaatcttgctgtttctttttccttatcttcatgtctttgtttcattatcaaataaaaaattacctaatttatggttgattgactagaattacatttgtatcagggaaaatgggaatgcagtaggtgttgaaataaaattgaaattattttttaaaaagttgcaccagtgactaaaacccttgaaagtactcctactccttcctctaaatctacagaagtctctactttcttagtcagtgattaaatttgtcttctaccaaccaacgtgcaaggtgatctgggggaaaagtatctcttatttaattacattggcattatttgtaattttctgctattttagctatcttgttttttgtttatttttatttcagatggatagtagttcaggtacattactggtacagtgtgctcaaacgttttccccatgattactaggttcttgtgatatctggtctagaaacacagccatcatttataaatctgtgtgtgtgtgtgtgtgtgtgtgtgtgtgtgtgtgtgtttcttttaatgggagaatgtgatcagagttctaaaaaactgaaataaaaatgcatttttagaatatgacttattttgtaaattttagatagattatagaatgactacaataccctttttcagagcagaggaagtgaacccatttaggcatccgtttaaaggagttttgttttgaggctttaagggtctttcatctgtaagatgagctgtggtactgcctattatatattaataaacgttacaaggaaaacagtactctttttgctcccttttctcggtatagtctttttttccgagcacatttcagaaataaagaccactaaaatgctacttaatgtaatctcagttacttgggaggctgaggcaggagaataccttgatcctgggaggtggaggttgcagagagccgagatcgtgctactgcactctagcctgggtgacagagcaagactccatctcaaaaaaaataaaaaaattttaaaaatgctacttaaaagtaccccccaccatatttataagttctgggttcacatttctttttctagtacatatttagcccgttcattcatcagttattaaggccatgctatttgccagcaatttgggtaatgaacagcactataagacacaattaaaagtatcagatttctacctttgtttatcggtgatttgcattttttcagtaactctcattttcctttgaattcttaagatttacctctttgacttaagaagtaaactaaattttaactacagctttcaaaatttgtattagaattggacaataaagctttatttatttatttatttttttactatttcacaaaacaaaatgtagctttcttaaaatttgttagttaaaatgttttctttgttttcccaataaaatgtaaagtttaatatgtgatggctaaactcctagggggataaggaggcgctaggagaataggcaggttggaaaagggtagtcgggacttgtccagattcttgtgtggtagtctgggtagtctgtatatttaccatatgggctacaagacacacacacacacacacacacacacacacacacacacacacacacacacacacacacacccttgtgagcatttattaattcgcagttgatggtgcatagtttggggagtgggtaaaggatatgttacttttgtaagtacagaatcgattctgaccgctcattcattgaatgaaagtttgagtttctactacctgtaggtacctttagggaagctttagaaatgtaacctggaattttgcataaactaaacctagccagaggctcagtggccccccttttcattctctaatagaaaagtaaagagggagtgagtgagtacaaatcaccattaaacaaaagtaatatattttaggtttaactatttaataaacctaaaatataaatattacctcactccctctttcctttacttttctgtttcttttccttttgaatgccggaagactttaatgctcattatcttagtctgctagggctgctatcacaaattaccacagtctgagtggcttaaccaacagcaaattgatcttggaagtccaagaccaaggagccagcaaggcagatttcattctgaagcctcctcttgtggcttgtaggtgactgccatctagtcttgtgctcacacaacctcttctttgtgcatagggacaggagtggggaggggagcaagctctctggtgtctcttttaaggacaatgatcctattggagcagtgccactcccctatcacccccaccttacttaacattaattatttccttagaagctccatctcctaatacaggtacaggggtgggcagggtgcaaagaggtgagttagggcctcaacataggaacttggagttggggggacacaaacacttggtccataacacttgtctttttaattcataaaataatttgagtatttactgtgtgttaatcaccttggtagacttgctactatgtagctgtgcaaactcaaggaaattacttaacctcattaggccacagttcatttatcagtaaaacagagatgttgaacccattaatagctatgatgcattccagcttaatcactattacttccatgttcatttcattcccttattttcctctctccctaagattttcttccctccctaagatatttaagattgttatgtcaaatttcctttctgtttttgaccatccttctttttctttcattctgttcctttatgttttttatgtcttaggttgttttctgcctccatccacccctttcctgaattggacatgtttttgacaacttgtaagtttactagatttattagctctttaaaagtttaggaggtagacggaattttttttttccgctcaacatactgaaagcctttaaattaaacttactctaggtaaattgctttgtaccttttacattgccttgtacatgccttacctttgttgcgtgtttgatttcttttcctgtagtctactgcctttcgctaggcaggtttcctcacagcattatttcttagaattgtgaggagactagtgatactgcttttcatgtatgcctttactaaagcatctaattcatcatatgggcagttaataagtatgaattgatgagatgacagtcgtgtatttttwactcttcagggaaagaaagaccttgtgctatcccttccaatttctcccttttgatctgtgacatttggaagtagttatggccgggcgccatggctcactcttgtaatcccagcactctgggaggtgggtggagcacttgaggccaggagttcgagaccaacctgggtaatatggagaaaccttgcttctactaaaaataacaaaaaaaattagctgggcgtggtgacacctgtccgtaatcccagctacatgagagactgaggcatgataaccatttcaaccagggaggcagaagttgcggtgagccaagatcctgccactgtactccaacctaggcaacaaagtgagacttttatctagttgttctgcagtctcagtggcagtggcttttctccttttgtgaatatcaacaacaaactacagagttgactcacaggatgtaaaaaattggggtgacatgcatgggagactgtgttgatactaatatttgcatgactgattgagaaagtttgtcagaaacattgtcactagtactattgtaggaactacgctatgagtggggtgaagtcttgccctagcattagtataaatccttagcctgctgggcatagtcttaagaaacaacccattcagggtcgggtgtggtggcctgtaatctcagcactttgggaggtgggtggattgcttgaagtcaggagctcgagaccagcctggccaacatgacgagaccccgtttctacaaaaaatgcaaaaatcagctgggcgtggtggtacacacctgtaatcccagatacatgggaggccaaggcatgagaattgcttgaactggggaggcgaaggttgcagtgagccgagatcatgccactgcactaggtgacagcaagactgtgtctcaaaaaaaagaaaaaagaaacaaccaattcagtaacaaattttgcagtttaaagctgtttcttttagaattaaaactctctaatctctgcagtgtggtaatgggtattgagataatggtggtgataattataaagttgctgattatcagctactgatttttgaatgccgactatttgccaggcttaatactgctacgggagggggtcagggaagtgctggatagagaaaggtgacccctggctagggctccactcctatggacctaggtgagtagaggcactccagctttcatgcccaagtgttgcatttttcaagaccatcctggcctgccatgccccccatcctgggcctataaaaacccgagaccctagcgggcagacatacaggcagccagatgtcaagagacgaacaccagctgaagaagatacaagcagctggatggtgggaggacgtcaagggagcaagccggcagaagagcacaccgacagacgtcagcaccctggcaggccattgacgggtgggacaaggcggagtttggctggggcagtcggaggagagccgaggccactgagcagccgaactctagggctaaaccatctcccttctggctcccacattggtggaaaaatccttccactcaataaaactttgcactcattgtccaagtccacgtatgatccaattcttctggtacaccaaagcaagaacccgggatacagaaagccctctgtccttgcaacaaggtagagggtctgattgagctgattaacacaagtcgcctatagacggcaaactaaaagagcaccctataacacatgcccactggggcttcaggagctgtaaactctcacccctagacactgtcatggggtcggagccccacagcctgcccgtctatatactcccctagaggtttgagcaacggggcactgaagaagcaagggggaacaagagaacctttcctgtttcaataccaagcattttacagtcattaacatgtcgaattctaagagcaaccccagtaatggacaggccattctagctatgtaaactcttcaaaggcagcacttggtacagtgctgggcacttacttgtcaggatttggtagatgctgaactgatttgaactctagcatcatcttgcttaaaattgtcattctttgcctacccttgccctgcccagctatggatacagaggttttacaaatttgaatctctgtgctctaaattagagagtttaatctgaccttatgttaaggagcttgcctcgccagtagtcagctggtttttcaaataattcgatacctcattacccatgtaccaggggttaaacattacccttattaaattggctagtctactcacctggtcttcttgccttggtgcatggtggcactctagtttctcttggaacctgagccaactctgaaccctcagccattttttgtcagtgcctcttttgagcttactggatcccaattccttttttgctttgagtttgatggtattcctttccatgtggctaggaaaagtgagaccatgccttgtcatcttacaccaaagcccttgaataagaacagctcagattaagctagtctgatatattcttaagacctgaccatttggatcttgacctccatctgcagcacataataagtcttttcccagtttctaccttgaacagcctttattttagtttcataatttctgtacccaggacttcaccatttccctgtatttccattgttgcatattgaggttatgcagtctgaagctcctctgaactgtttttcagaatgcctttccttctgcttcggaccatcagagcttcctagtttcctctattcccttctctcaccttcacatttcttttgttcccctttcctccaaccatagagtacacattacttgggaaaacccgattatataatattttagagcataggtcttggaaacatgtttatgcactgtcaaagttgcgtttccattcatctgtctctccccaggtaattagcataaatgaaaatagtgaccttttagaatatctttcaagggtggtagccaacataccaacccaggatactgctgagtaggagccagctggcatgaagaagcaaggacaagagtaaaccttttaagtgggcagtttcaaaagtatagaactaaatggaagcaagaaaaatgaggggagtgtggatatggtgctaattctaatgtggcaaagattttaaaataatacagaggcaatccagaatacattgagagccccagtgaattgttttctttaaatttcatgtcatgtgtagtcatgtttctcaatggacaaatggttagtggaccaaatgacattttttactcatccctgagtaaaaagtccaacgaatatagttcattagactgctgcttgttgtctccaaacagatcctgaaagttcaaatgactgggagtcagaacctaaaaatataatataccccactgttttggcaggaaattgagacctgcttttatcagccacttatccagaaagcatatgttctatataaatcaagccaaatctatattgtctgcaagtattcctgcaatatagttgatgttcataatgtgatccagatattttcagtatacttctgtgtattttgattatcacatgactttttatttatttgtttgtttgtttatttatgttttgagatggagtctagctctgtcacccaggctggagtgcagtggtgcaatctcggctcactgcagcctccacctcctgggttcaagcaattcacctgcctcagcctcctcagctaatttttgtatttttagtagagatgggatttcactctgttggccaggctggtctcaaactcctgacctcatgatctgcctgcctcagcctcccaaagtgctgggatggcaagcatgagccaccgtgcccaaccatgactgtttttaaatagaaactcctgggcctcctgcgttccaattttattgtttctctaatgacacagcagtgactgcaaaccccttttctgttatactttttcttttgcatatagactactattttgaaccttttgaaagggccttgccacaaaagtccatatttacattctgtatgtttagagccatgatctcaatcagaaatgagagggaggtataaatcagaattcagtgttagagtaagagactgtatagttcaaaaaaatttaaacctctaactcataataaacatttcagaaagtaggttgtacgtgctattctgggttgatgaaagtttcagaagataaaagtaaatatgataaaggtttttaaaatggttaaaaacacaggtttagagtctctcattttctcacagtgactaaaagaatttccactttggtaagtctgcagtagaagtatgtcattagagcttcttcagactaaaagatgagggatgacttgagaaaaatttggacatgaccataaggggcaatatattcttgacccaagattttctcctgaggacttgaaccagattagcttaaacaactgtttaaagaaaaaacaacatcaaaaggctcacgcctagaatcccagcactttcagaagctgaagtgggaagatggcttgaggccaggagttccagacaagcttggacaacatattgagaccctgtctacattttttttttttttttttttttttttttttttttttggtcagccgttggctgggtgtggtggctcatgcctgtaatcccagcattttgggaggctgaggcaggtaaatcacttgaggtcaggagttccagaccagcctggactggacaagtgaaaccctgtctttactaaaaatacaaaaattagccaggcgtggcggtgggtgcctgtaatcccagctactagggaggctgaggcagagaatcgcttgaacccaggaagcaggttgcagtgagccgagatcgcaccacaacaaacaacaaaaccccacagaagtctttcttagtggactagcccctttagtaagacagttggaatgtgttggagctggaatgttttcttgtcagttggttcctgacttgaaagaatcacagtggggtggggtagcctaggaattggatctctggcctagcccttagtagaaaaagggattgaggtttctgtgaaagcagttgagggttagaaataaaggtaaagccctttaaccaaaggaaaacattcaaaagaggtagcattaggaagtagacttggggggaaatacctaaactagaagtaatgattgtttgccaaggaaagataggtgtgtttaaatggaacaataccttaaagaaggaattgtctcatgaccttgttaatttctggcctgttgtttcttaatctttattttgagtctcgaacatctttgagaatttaatgaaatctctggactaggtccccagaacagtgtacgtatttacaacattttgcaacacagttttcaggagatcatgggccttgtgaagctcaaccatattaagaatacattaactagtgcccatacttagtggaaacttggcacgtgccaccacacctggctagtttttaatttttttttttttaaaatagagacagggcctgactatgttgtccaggctggtcttgaactcctgggctgaagcagtcctcccaccttggcctcccagattggtaggattacaggtgtcagccaccacgcctgcctattatcttattttaaaaagattattccaaaagtatctgtgatagatcctttctcacttttgctgtttaaaatgggaagtaacaagcactatggtgttaacctacactttctatgaaggttctacatattagtattggtccttatttgattcaagccaaaatttctatcctaatttttcttaagttccaatagtttatataggtaatataaaaactggtttttatatttgtttatttatttttgagacagcatgtcattcctgtcacccaggtcccattgctcaggctggagtgcagtggtgccattgtggctcactacagcctcaactttctgggctcaggtttttctctgcctcagtcgcctgagtagctgggactacaggctcacaccaccacacccagctaattttttgtatttttagtagagttagggttttgccatgttgcccaggctggtctcgaactcctaggctcaagggatcctcccacctcagcctcccaaagtgctgagattacaagtgtgagccactgtgcctggcagaactggtttttaaaaagtggtgtgatatgctgtgttggatattacgttggcaattaatcatatctaaaagtgtttatgtcttttgtttgatagtcatattttgtttttggctaagaggattcaagggaacttcctctggaggtaaaaaagaaaaaatttaaaaaaattttaaattgtagaactgatggtcaaatggaagatgggagcccttaattttttcttcataaaatagttttcaaagaatgctaattttaaaaagctaatcaaacttacttacagagggcccatctctttaagttctggtaacccttaccaaagcaacaatatttagttagtatatttaagaaacatgaataacaaattaaaaaggctattacaaggtggtttctgcatactgattttgtcctatggtgtgagcaattgtgtgtctagtaaacgcaaagaatacattgtaaagcccatacaatgatttggtaactccaaaggaagaaatacatgatataatcattacaaacattaggtgtcatcactttatggcattctgggtgacatcaaaatataaaactgctggcagatgtactcatattattctggatttcagtgccaagtagattttgttttcattaaactttgttttgagataattgtagattcatgcaaatgtttcaagtgtggtatttgatggaattttgacataggcaaactacttgtgacacaatcacaggaaaggtagtgaatatatctgttaaccttaaaaggttcttttctttatcattttgccacatttgctgtactattctctttttttctgaaccatttgaaagtacgttttaagtgtgtgtgtgtgtgcatgtgtgtgcatataaaatcccttcagtcttagataatttcatatttattttctaagaataaaggcgttttcttacataaccacaatgcagttatgaaatcaagacattgaacgtagatactgttacacattctgtagggctccaagggctctctaattctgtgatatttcttggatggggatgttgagactcctggttagagcctggccagggtagaagtgaaggctcctcacttggcctttcctggcgtgagtgggagtgaagtggtatttggctggattaaggcagcctgcatgttttctgtcttgctaggccaccccttttcttgttctttggctgagaggagcctttcactgggggcttttttttgtcagtgcctgttggtgtttctgggtcctttagttgcaagtctgggctacatgaggcaagaagaaaacccaaggaactcaccaccctgtctagttttcttgcttctttcaacctttgaggagtcatcttatgtttaatatatgaaatgtctagggttttaaattgtacttastgggagggatagggaaaagtatgtgtattccatcttcctggaagcagaagtctgtagttttgttttatgttaattaaataatagtatgtctatcaaagagatgcatgtgtgtaaattaatgcataaatataaatattccaagataaattgtttgaaattaataaatataaatgagtttgaaaattaatgtatgcactttcaaaaaaatggcgtatatattatgttccaaattgcctttctgtgtttattttaggaattaaaattctaagaatcataagactacaaaggtatttaggaaatacatatttaattatgcagtwtgaataaaccttcacgttgtcttttctggtatacccccaaaagtcttttgttattgtttgcttttgattgatggcaggttttaaaagcttacccctaaaccaaccttttgagaaattttacttaaaatatactatttttctagttattaaaatgtaattatcaatctgtagcatatgtagttccagctggatctctgtgtcttctaatttatccccagtgcatatccatcttagacacactggctacagtgtgatagccaatatttggcatgttgttgcttattgtgttaacaattttaatttttttccttgatttgctgttattcatggcatagctgccttttttttagctaaagaacaacacaacagtcctttatctgaaactctggaagccagatatgtattatcatttggaatcttttgggttttagaaagaatatgcaatacatgtaccctatattaggctaaccaccagtatttgggtaagaggcaacactgtgtaatcatactcatctatttgcagctaaatgtttttgaatattcacaccataatattgttatatccacactggtttaggtcacatttgtcactaagtgaatccctcttctatcaaagtgaatccctcttctatcaccatcaaaaaaaaataataataaagatgggggaggggaaaaggatggtgaagaaagaaacttagttttccaggctttttgaacgctggaattaaagatacgggtttttggacctgtgtaggtagggcagtcaccaagcctagtcagaggaaaagcccctgtttagtcctgaactcctcagtgtttaactgaggaattggtgctataggcctggtgttaccaactatgattgttttcaatataaaacaaaagtggctattgatttaatcctgttatatggtgttgatcttaaaaactcattggattcatactaggatttagggtttaatcctgtaaggatcatactaactttcatcttatttatcctaaatccctctttaatcttattaatcatgccaggctttttttccaagggccgagatatacatccatccatccatccatccatgtatgtagtatatattcatacagttatttttccaaagttatctatctttctatgaaagagaagatcagttttctcaaagagagccaaagacccatgaatacttctgcagagtagcattagtattgcaaggatgacatcagttctgtattcttaaacctaagattaaagtaggtcttggcagggcctcctgagagggaatctagtcttagccttggatttcctgagaaggcatatggcactcttctgaaagtgggatgttatttcagtttagaagctcttagtcaaaaaatattggatgaattaattgcaatggagacactgctttctaatagtggaacaaaaagtcatttcttagcttttgacctttgccctgaactggtgctgtgtgcattaggaaaagaaaatacacatttggtcttaagtcactgtttctactttgcacaatataactgattcagaccttgtgctctgtttctttcatttctcaaaggataattgtcagtgaccatcctctccaagcaatcaaagtaatagatcctaagtataagttattatttttcttatttctacttttgggggtgggaagtttgagaattagatcaaaacttttattgattgattcagcaaccagtaaacctgtaccaaatgttcacctttggggcctcacatgattatgttccctctagttattgggtggtggttgtcatcattgttttcaactgatttgcccacattatacagttttgacctggactgagtaacttatgtaaattccttaaattgctatattatagtggtttcaggtcatggggaaaaaaccctggtaggtactatgaacccttctatgtttatttcacttatgacttaattactcagattcctagatataaaaagtgtagcaaaacattgtattatgagttaaaataaaactggctttattttttgatattttatgttcagctgtactttattttttccaagtgaaataggtaaaaaggtcttttatgcatatatgattatgaatgtttactttgcatattaatttaaaaggaaattaagagaatatgtttgcaaaaacagatgaatcattattaatgaaaatcatgtaatgctgacactgatctgagaagcagaagaagtttttaccaggatctaattgtataaatgggaaatttagggttaaggaactcactttaggtgttggagtaattgtatatatgcatgctttgcccgaagtgaggaggggcaacttcgatttctaatccgctttgggggaagttccatatcagagctgcacagaaacattcagtgaagcagctcctttatcataaagggaattttaatttaaaaatattcttgcatcgtgagcagggtaaacgacagctggctacactgggcatttatctccttcaaaccacattaccagtaattgctgcattaaatcaaagtcagaagagattacaggtctgaatggatcaaggggctagtgctaacccaaggattcccacaactgctacattgctgctcttagagccctgtctctatccccagtaggtatgagagtcaggtgcagctgtcagattcctgacagctcatctgtaaggcatgagcatagtgaacacaatccaagaagaggggcaggtacacgctcaagacaccctggccgcctttttggattagctttttattttgaacgcaagagaatggcttcttattgtttttcggtactgttaaagagagaacatgttgcctgctttgtgcttaaggaaatttgctttggcataaaaatcacttcaattttctctcctcctttatttattgatattcccttcttggtcaagggtagtcttctcacttgatttatgttacagaaatgtaacataaatttacaaaaataacataaatatgttacaaaataacaaatatttgcaaaaataacatattttgtaaaatgttacaaatatttacaaaataacaacaatatgttacaaaaataacgtaaatgccctgtgctaggtatgggtaggtgctctcccctgccccccagctgacttttctcctcctaacacagttacctagttctttatatgctttctgcctgctgttgaggccacttattcctcagatatagatttagcttcgtaattcagataattctcaatctcttttaaatgtccttcaattatcagagataatgatgatgacgaygacagcaatgacgccgataacatcaactataatttaataatcagtatatgccaggcctattcatatatcaactgatttagtcatcacagcagccccatgagataggtactattattatcttctttttccagacgaagaacttgaggcagagaggtgttaaataacttttctcaaattacacagctaagaagttatggagctaagattcgaatcaagtagcctggcttaacagaggcctgaactcttacccacatgtgatgttgcttgtgtactacaaccaggtactctgctaggtattagggatactttaaggaagaaggtggactatgtagtacctgccctcctgaagtgggagagacagaaacgatgatatgtctggcaaagtgaggaggatgtatgcacgtgctaaaggggttctctagcagggggctaatctagactgatcagaaggaatttgctaccagtcttccttttcagaagaccttttctgtagtgttttagggaagacggatgcctttcccccatctccttttatcattcccccccccctccaaagaaaataactaacccttcaaaaattcattgcattaagtgggacaagaattcattattttaattttttaacaactcgatggaggtataattgatatacaatgaactgcacctatataaaattaatttgttaggttttggcatatgtatatacccgtgaaatcaccacaaccaagataattaacatatgaatcatctccgtaagttttctcatgcccctttgtagtgctcccaatatgctcttacctccccagcacatctccaagcaaccgcttatctgctttctgtcactattgattagttggcaatttctagtattgtataaaaatggactcatacaataagtactgttttgcgtggcttctttcgctcagcataattattttgaaattcatccatgttactgtatatactggtggttcattaatttttatttctaagtagtagtaattgtggatatatgacaatttgtttatcactattacttatctgttgatggatatttggattgtttccagttttaggccagacaaatagattttttatgagtattcatattcatattctttatatgttcttttttctcttgggtaaatagttagaatagatagatcatatggtaggtgtgtgtttgaatttataagaacttgctaaactgtttccacattggttataccattttacattccaccagcagcatatgagactttcggttcctccatagccttgccaaagcttggtattgtcgaagtcttttaaataggtatgtagtgatatcatactaataggttctaatttcctagtgaataatgatactgagcttcttttcatgcgcttgtttactatctcatttaccatcttcttttaatcaggtgttcattttttttgcccattttttaaaaaacgtgggttgttttgtttcttatggttgaattttgagagttcttgtatattctgaatacaagtcctttatcaggtgtatactttgcaagcattttctctcagttgtggcttgtctttttattctcctcacagtgtcttttgataagcagaagttttaaatgaagtccaatttattgttcttttatggattatgtttttaatgttatagcttagaaatctttgcctaatccaaggtcacagaagttttctcctagaagttttacagttttatcttttacatttttaggtatgtggtccattttgagttgttttgtatttggaaagaagtataaatctcgtttcttttcatccagttgtgtcagcaccatttgttgaaaagactgttctttctctactgaattccgtttgcacctgtggatctatttctggactttctattctgtttcactgatctatttttctctcttgacaccagtatcatacagtcttatagggatgtgagtattatgggatctagcagacttcagaagaaatgataagtgttacaaacatcaggtatagcattcgatttcagtacaggcctagagaaaagatagtcataatctttaaaaaccctttatttgaatagtggaatgaagtggagagatatactgtgttgatagtcagaaagactcaattctctcggatgttaattctccccaaagtgatctgtagattcagtgtatatcccaatcagaatcttagccagatatttgtagaaattgacaagctgattctaaaactcatatggaaatgccaaagacctagaatagccaaaacaactttgaagaaggaaaacaaagttgcaggactaacacagcctgatttaaagcctgcagacagtgtggtgttggtgtcagtattgaggtttacatcttcatgttatgcaatgaaattgtgtcagttaggttttgctgtgtaacaaactttcccacaacttaatagcttaacaaagtgttaatcatttatttgctcagagttctgcgggtcaggagtttgggtgattgttttagtcttggccgcatttgctgagcctcagtggtctaggataacctcactctcatgtctggcagttggcaggttagttgatctgggggctcagctggagcagttcatctgtattccacttgctctcgtccttcacacttcttcacacagtagtgtcggggttccagagagtagcaagagagggcaagcctcagtgaacaggcacctgtcaagcctctgcttgtgtgatatttgctaatatccccaagaccaatgtgagtcacaaagctaagaccaaattcaaggggtggaagaaacaaattccacttcttgatggaggagctgtgaaatattatgaccaattttttgtagttcaccaaaaaggtattatgagttagttgagataaaagttattatggagagaaaaaagttttgttgtataagataatgtatgtgaaattatttttaggtatgtttccctaacagtattagaatatttaaaattatttcctgctctgaaagttttacattttgccccttaacctttatatattgtcttgtaaatttaaagtgaataactaatggctaggcacagtggctcatgcctgtaatgccagcactttgggaggctgaggtgggtagatcacttgaggtcaggagtgtgagaccagcctggccaacatggtgaaaaccctgcctctaacttaaaaacaaaaagtgaataactattgtcctatccatttactgatttatgaatgacacttttaacaaaactgctaattccttgcctcacagtttgtatgccatgtctctcattccaaaacagaaatgcatatcagccattccatggtttactctgttattacccatacttcctttctgtaccatgtgtcatgcaaaggagtgtttccatacttaactatgatttgctattttctggtaggtataatttaaagatttccattggtgtagaaagccttacaattttctcagtaccttagaatcaatagaactcttccatggatatttttaaataggcttttgactttttttgggtatgctgacctgcctgcctttctgtaggtatggcttcatgtatgctatgctgttttatgcacttgaaaagttgttccactgcctcaaagcttcccaccaccaccctaatccatctagaaaactcccgctagtttttttaaagtacattttaagcattaattgcttgtgaaatatttctgggttttcttcaccctgagaaattagatggtggtggtggtggctatagtagcaattgctgctttattttctcccaagccatattggaataagcgtggcatttatcgaatggtattttggtgtgtattattttctactttttctcccctgtattttcagctcttgaatagtttttgctgtttgtaggccttcatgcaatgttgaagatatcatgattgaatgaatattgactgactaacaaattagggatggtctgtatgtggtgattcattcagttacctctgatttgtagtttgaatttattgcagaccttctcttttcatatactgatgagcatatactgtataaactgttttagcttaattcttttttttttttttttttttgagacagagtctcactcttgttgcccaggctggagtgcagtggcacgatctcggttcactgccacctccgcctcccgggttcaagcgattctcctgtctcagcctcctgagtagccaggattacaggtgcccaccaccacgcccagctattttttgtatttttagtagagttggggtttcaccgtgttggccaggctggtcttgaactcctgacttcaaatgatccacccacctcgacttcctaaagtgctgggattacaggcctgagccaccgtgcctggcctttagcttaattatttgtgagaaataggaagatggatggacaggttctatccttagagaattcatctaatcaataaaataagtatgtctaaaaacaaatagagaatgccatataagttcagaggaaagagaaatcacttctagttggaggtaatcaggaagagctttgtggagcagatggcatttaaggtagcatttttaagatttgggcattttgaaatgggtaagaaaacatgatcaaaggcacagaggccaaaaccaaacaaaataaagtaaaaattctccttgatagaggcaactgtgggtagttgaatgtatcaataattggttttgtactttattgccacttggaaatcaagtatcccaatagaaagtttgttaaaatttatatgcaggcattttgtctatttttcattctgaccatgagtttatcaggtttgctaccattctttttactcatattactaaaacagtgctctgaaaactctttaactcttgtttgctaaattcagtcatttatttctaaattctcattttctttaacctttctagatttctacttggcattgttatatattcacctctgatatcaatttatgaaataccttccctagtataaaggatgtgagatcgaagaaaagaaacagatgtcctctgtattcctggcttttgtgaatagtacacgattatgcttaatctttttatcctctgtttctatttctgccttcttgaagcaaggattcctcaaggttctattttcagcctttgccttctatctgtctgtgtctcccctccacctcccatttttcttttgtctctacttttctttttttggagtacatggttgatgtataataaatgttacagactgcatcagtgtgggagaggaatctcaaccccattatggccatggctatttctccttttctctttgatcttcgtgtctaaccctgacctctcctctagctgtaccttcaaccccgagtacctgttataccttctctaccattacttcaaaccagtttatgcttcagatttgtctgtattagcagtgttattcttatttggctagttagctagaattagaacctttctcttataccctacatgtggacagtcttcaattactgtggatgttgtcttcgtcatctcttatatatctataccttctttattcctactgctaatatgtattttttgcattagtcatctgtaacctcttgtaatggtagctgctaattggtttccccacctttaggttgttccctttttcattcttacctgcagccaccagagccattttcacaaaacgttatttatgtagcactcttttcctcttgctcaatctttaaagatcagatctgaaatacgtagcaggatgtcctagtccttccatagtgaacctacctacttttcttgtcatttgccaccacctacccatagtcaagtaaactggtcacacaatcccttagtcagtcagtcttgcatatttctttctctttttttccttttggagacggagtctcgctctgtcacccatgctggagtgcagtggtgcaatctcggctcactgcaacctctgcctcccgggttcaggcaattctcctgcctcaacctcccgagtagttgggattacaggcgcacgtggccacgcctggctaattttttgtattttagtagagatgggtttcaccgtgttgcccaagctggtctcaaactcctgagttcaggcaatccacccgcctcagcctcccaaagtgctaggattacaggtgtgagccaccgtgcctggcccagtgttgcatatttctaatgacatattttgcctgcatatatatcttcctcctccaccccctgtcccatcctcatccttccagctcaagccctagctcttttgctctttttttttttttttcccctcctggcctctagaactgacctatctctttttgaagttctgtcttaccctggtgcacagggtaatatagaatctttggaaccttctaagaatactgtgactaaaaccaaatttatacctcaggcagaaatctcggcaatctttgctaaagcattctaccctgaggcatagctaatatccttaaacatttggcaggattgtggcatgggcagaagggaaagaaaaagagagaagaaaacaggaatgagagaataggagaggaggaaaagaatcttaaatattttctggttaatttgattgactgaacttaaccagtgcttgctaagtcttgagatcccaagggttgtatgtcggtgtacagataacactacagcatcatcaaccatgtcctctggcatgagactgayttaccttatccttagcaaaacttaaaccttacaaatctcatgataatttctaaatatctcactcttaaatacgaggtctatttctaggtctagattttgaataactaggtctgtttctaagtctaggtctgtttctccctgatatcattaaatttctgttcaacagaacattctaagtgtgctaagtgttgaaactttttttttttttcttcctgagacagagtctcactctgtctcctaggctcgagttcagtggcacaatctcagctcactgcaacctccacctcctaggcttaagcagtcttcccacctcagcctcccgagtacctgggactacaggcatgtgccaccaggcctgggtagagatggagctttgccatgttgcccaggctggtcttgaactctttgacttaggcagtccgcctgcctgagcctcccagtgggctgggattacaggtgtgacccactgtgcccgacccaagtgttaaaacttatgttgaaaaatgaattggggctgggcatgctggctcacacccataatcccagcactttgggaggctgaggcaggtggatcgcctgaactcaggagttgaagaccagcctgggcaacatggcaaagctccatgtctacaaaaaaagttgaaaaaattagccaggagccatgacatgcgcctgtagttccatctacttgggaggttgaagtgggaggatccttgaacctagaaggcagaggttgcagtgagctgagattgtgccatagcactccaacctgggtgacagagtgagaccccgtctcagaaaaaaaaagtgaattggtattgcatgtctttgctaaagagatgtatggaaatatacatgaaggactattttctgaattcatgttttttattgatcaggacacatgaactttaatactataaaagcatccataatattgtagagtgtaaacttgaaagtggaatagattggcatcatcagccaataactcttgagtttattgtggaaaattagtctttttatttctagaatttttgagtaaatatattatttaaaattttaaggaaatacccagtcttttctgatgagggaggggactcaggagtaatttctgagttgaaaatattttcattttttgtttctatttttaaaatcattttgataaatgggaaaaatactgaaagaatgatgttgagctattgatccatgcatggaatttctttctgttaataactgaggctacattattctgaagaaagaccatatcaagaaaagagagagaaacctttcaagtttataatttgattttttgtagtgtgttttgtcttataggtaaaagattctcctttttttttccatcagtattatttcaaattttggtttgactaagttattagtcttcaaattatagcaattaaaaaaattttacagaaagaaatgggtaaaaggcaagataaagtataagagttataattcaaatattacattattttgacatttttctgaagagctgatgatttaagctatacctgggcatggtttcagcagaacctaggtgagatatcttaatcatatatctaaagattaagattctttattgtgtatatcctctagtctttttttttttcaagagacagggtcttgctgtgttgcccaggctagagtacagtggcatgatcataactcactgtaaccttgacctcctgggtttatgtgattctcccacctcagcctccgaagtaggtgggagtataggcacatgctgtgtgccaccatacccagctaatttttttggggcggggctataggcagggtcttaatatgttgaccaggctggtctcaaactccaggcctcaagcaatcctcctgactcagcttcccagagtgctgggattataggcatgagccactgcttccagcctatatcctctagtcttaaatgagagtttatagttatcacattatgttaggtaaagcaaatgtggtcgtattattattattattattattagagacagagttttgctttcgttgcccaggctggagtgcagtggcacagtctcggctcactgcaacctccgcctcccagattcaagcagttctccagcttcagcctcctaggtagctgggattacagtcatgcaccaccatgcctggctaattttttgtatttttaacagagaaggggtttcaccacattggtcaggctggtctcgaacacctgacctcaggtgatccacctgccttggcctcccaaagtgctgagattacaggcgtgagccaccgtgcctggcctagtcatataaatcagagaccatgggaatattaataatttttaaagtacttgtattgaaagtaaaatctgttttggttcctttaaacttttaacaaattataggagcagttaatgctaatttaaatgtgtatgaacgattggaaatttatctctaaattagtaagcgaaaaccagccaccaccccattccaccgcctggaggtactagttttgtcttaatggctacacacacacacacacacacacacacacacacacacacacacacacgtgtgtatatatatgtatatgtatggcatataatggtatgtgtatatataatgtgtggacatatggcatatattggtgtgtatgtcaaccaatacattacgtatatgtgtatacatatacatacatgtctaacttatatgtgacttaataaaagcttaactaattacacaataaattttttagttttttcattttatttggagcactgcttttcaaagtctaattacatacataatttattgattgatgtacacatagattcatacatgcatgcatacccctatataatttcatttacaaatatagaactataacacattattaaacaacataatatttttctttctttcttttttttttttttttagacagaggctcactttgttgcccaggctggagtgcagtggtacgatctcgggtcactgcaacctcagcctcccaggtttagatgattctgccacctgagcctcctgagtagctgggattacaggcacccaccaccacgcccggctaatttttgtatttttagtagagatggagtttcgtcatgttggccaggctggtctcaaactcctgaccttaggtgatccgctcgccttggccttccaaagtgctgggattacaggcatgagccactgtgcctggcaatttttttcatttaataatgcatcagtcgtatcttttcaccttgtatgtatagtctagaagaatttaaatctttctctggaaattgactaggccttcaataacatttggggatcactttcatgcttaaattatgtcagttgttttaggatttgaattacagtctttcatcttaaatacaacagcatctgggaatttcctctataattaagtcaccaaatattgaactgggttaactcttgaagtttaagttagtcagtcatagttcattattacagccttttatgatgtataagacatatcatcattttccagtcttcatatcaagaagaatcttaggagatttaatagtgatttaagatactagcttataagtgtatatgtggcccatcctgctgtactgctatgtatgaaatgacagaagtgtacagggaggaagaaggattaataattatttgatttgattagaagaggaaatttagcataaggttttattgcagaaacattctttttttttttttttttttaaaaagaaaggtgtcactatgttgcccaggctagacttgaactcctggcccaaatgatcctccctagtagctgggactacaggcacatgctgctgtacccagtcttttgttatttcttaattaccattttaatacctatacaggagactgttagaatatatagtcctctcatatctgtgggagattggtaccaggatacaccctctcacacccctgcagataccaaaattggcagatgctcaagtttcttatataaaatggtgtagtatttgcatataacctatgttcatcctcttgtagactttaaattatctctaaattataatttccaaaacaatgtaaatgctatgtaaataattattataactattgtctttaaaatttgtattatatttttgttattatacagtattgggttttttttattgcttttcacaaatattttgtttgcagttggttgaattcacaaatgtgtaacccaaggataaggagggctgactgtatattataatcccttaaggtatggcaaagcacatctgaaatgttatgaggctttgataatctctgttaagaattgacaaagtagggttttatagttctaatggtgagagagactataaaactgtgtattaagagcaacttttttttttttttttgagatggagttttgctctgttgcccaggctggagtgcagtggcgggatctcggctgcggtggtgagcyttcgcctcctgggttcaagcaattctcctgcctcagcctcccaagtagctgggattacagggtgcatgccaccacgcccagctaatttttgtatttttaatagagacagggttttgccatgttagccargctggtctcgaactcctgacctcaagtgatccccctgcctcagcctcccaaagtgttgggattacaggtgtgagccacaccacccggccaagagtaatttttaaaaaatgtttttccatgtatgagaagttgcttacaatatttagttttgtgctgtagcattgttttgctttttggctttgcctgtgtccttatctatttctcccataaactgtgaattcattgacaacagaactgtgttcatttctccagggcttagtacaatattttgtctgcaatagatgttcaataaatgttttattaattatactgaatagatttattcttgttcttcatgtgtaatgcacatagaatcagtaccagcaaattgaagataatcgagtatagtggtcctcctaatctgttagaactgagttcaggtaaatgtttaaccaagaataccatcaaaatatgctatagccattttgactcttaaaaatctgtttcttctgaacaatcctaaaataaattacagtgaccgtaaaaggagaagaattacactgatgggggcggggcatggagggcatggtaatacttaaattctcacagatgccctcacagttgcatttaatcctcatggtttaatcatccaaaagcatgttacaatattactggctctccacgattagggacgtcatagcccctgaaacttatttagaattatttaccattttgaaattttgaatgcttgttccaaatagaagatttcgtaggatcaatagttacaactggtttgtcttttaataaacattaattttcactttctgctcactctgtgtcctttttctaaggattacttagcagttttctgatttttgatgggccatttaggctctgaaagccaactcttgaacctattgtgctttgtcagacaaacctaacacctgtccatgtttgttactgcttttaatatctgttatagaaatatgtgtgcacatgtgtatttgtatataatggcagggtgggtatagcagctccctaaaaggagaaaagcaactggcttttctgaaaagacctttccacccccacctttttgcagacagccggagttaatccttccaagtttgactggaacagctgagcaagtgtaccctgcatatctggaggcctccagtggactcatgttgcctcagagttggggccactttcttcttttctagtgctgatcctgccagctgtcctaacctctgttaaagcacagcgagggaggtgttaaatgatacaaaaacatacagtgtcatgaaagggatccccttactgcgtgtatcagtgtgacttttttctcccattcctttccgtggcagaaaggttttatactgttaatcctaacacctgtctctgccggagacagtgagaagggtgtgtgtgtgtgtgtgtgtgtgtgtgtgtgtgtgtgtgtgtatgagagagagacagagaatgcgcatgcgtgcacacgggtacatgctccccgcccaagaaagaatagagtagtaataccagtcccatctgcctttctgtgtcctggattgggagtattctctgacgcacttaaagcctggaacatatatattattttggctcctggataccttagacttcctaccgtgtttgtgtgccagtgtgaggagcctgtgttcccttccctggctgtcattctctgcctcttgagtttctggttgagttgtcaatttaaaaaccaacagtaacagcaaatctccagtgtagttttcagtctgtaactagtaactcaaagctttttgcttttttctgaacatctcttctgtgtattgtcaaatcctgttggggtggaggcctggtctcaaccaagctccgacttcatcagctgagccagcatacctatctgcgtagactggaggtcagcgaaggatttttttggtgctacctagttcctttggacaggacagccagcgcaaacaaggcaaaaacttagacactttttgtactgtccttatctgaagattttttcccttttgctatgtatggtgtatattgtatggattatcaatatcctgttgtccaggtaagctaagggttataatttctagatactgtttgatttatgtgaagctttatggtggaatgaaatgcctacaaggctttctgtcttttgacccggtaccattcagagcctagctttcccagtgctttttgctaatttactgtaataagaggatttaatttatagtattggcggccagacaaaggtggttggcattcacccctagaagttctgaaactttggagagattctgtgtgtctgtgtgtgtgtgtgtgtgtgtgtgtgtgtgtgtgtttgtgtgtgtatgtgtgtgtgtgtgttttgaaccaggtgggctggacaatataaatgtaatgtaaaaaacccatcatattatgataaactttaggctttgttttgagcagatgagaggcacagttggcagtttccaaatgttgtattttccagaaaggtaatatataaagtagagggcatctttccccactaagactatttttagtctaacgttttagactattttgtgatgacattagtaacatcttatttgttaacttgttgaaatttagaatcagaaaatgttaggtcattgccaagcatatttctgaatatcttatagtaagaaaaattgaagttaggagtcctggattctggttccagcaatagagttaaccaccaccatgttcatgctcaaataacttcaatttttcttgactttagttttgttgtatataaaatgaaggagttgggccagatgacctctgagctatcatgattttttgaaatattgtgatggaaacctagaataagaaaataaatacagttaatacaattaattctgaattaaagatactacttggtctgtcagtttgttttagtttgttttcatgttcctttaattatttttttctttcaaatagccatttctctaataattagcacctatgttgcaggttggaccggaatgcatagagttaaaagaaataatggactaactagtacatcttattaggtattttgggcctaaaggcccaagctattttggattgggcctgttgggtaagctctctggagtaaacttacagctttcattcaagtctaaagctatcaatattgcaatcatatggcagtggctgtgattatgtttctctttaactatattctaatagaggtctatattatatgttttatattaatgatataactgtttctgttattttggattattcaaattaagagtattttatatttacgataatgaggttttgatatatttgtggatttcacttatctatgaactgtatctctactgacataaaacaatagcttgggctttgtaacagcttaaggctggaagtgttatgagactagattagaaccaggtctttttacaagtaaatattaatgtgctttcaatgagaaacatctgtgaacagtaaatttctgacccacaaccagcaaagtatgggaattatagtaactataacataagtaaaattctttgaggaaaaagttgaaaaagtaaaaatgtttcccaagtgaattgaagtattagacatatatgaaaaaataattacagtatgtaattgaattttttgaggaaggaaattgaccatctccccctcccaattttggggtggattaaagagttcctgttcagaaattatgacatggtttgatgaaagtcttttgcagcaaaattctaatcaatattcataataagatgaattttccacccccaatttttttggttattagtatttagtactgataaatgtagtgcacagtatttgaaactacactttcctggctttactccatttgtaggtttattctatctgaaattaacgtcgtttagaaatggaggtaatgggatattaaaatttaagggtttactctccattctgccacataggaaagctaatgggattaaaaaaaaacaattttaaattgaaggatcccaagctattttacaatcttatttattacttttttaaagtaacagtttttttcagtgcatttataaatgagtagtagatggttggttactacccaaactcttaactacagttataaaatgtttttagcttcttttatatattcttttgcttagttaaatccaagctttccattgcataatgcttgcagtttcatactaatgcattatacagttggacgttatggaggacatgattgaacagtatttcttttaatgaaaggttttacatctatttttaattaagttatttctagaattgctagttttgagttaatgaaacaaagtgagttctcttcaacagaaagttcgaaaatattttaggtacttgacctttcattgctaaatcatgcctattttaagagtgtgccattgaaaatgattattttattagttataattttcgtagaacctagtctggccaaattagtttaaaatcaggcagagtaaggagatacaggcttgcttgtgatttaagggacaatgaatgtagtctccctgcccagacaaatctatttaagaaactgttcctgaagttattcttatagacagtctttcagattaaacatttactgcctctgatcagatggttaaaatgtaacttgttgcaagttaagggtattgtcttttatcacaggttttccttaggcacttttacttaacctgtcatccaagtggtgaatggggcagttggaggaagaggaaacagggtcttaaattattggaggtatagctaaatttcctgatttgagggtttagggtagccaaggacagcttaaggatattaggcatctagaaaattgagagacagaaatttacctatctaaaggacactttttcttttgaaacagagtttctttcttgtcacccaggctggagtgcagtggtgttatctcggctcactgcaacgtctgcctcccgggttcaagcagttctcctgcctcagcctcccaagtagctgggattacaggtgggcatcaccacacccagctaatttttttttttttgtatttttaatagagacagggtttcaccatgttggtcaggctggtcttgaactcccatcctcgggtgatccacctcctcggcctcccaaattacaggcgtgagccactatgcccagcctaaaggacacttttgatattgaggtatgctcaggtcctcaaaatgctgtagagtatattaggctctccatttcttcatgggaagttgaccttggtgttaagcagtacacacacacacacacacacacacacacacacacacaaactatataaatttatttacttatatagtttatacttatatagtttgtgtaattatattaacttatatagtttatacttacatagttatataattatattaacttatatagtttatacttatatagtttatgtaattatattaacatatgcaagtttataattatagtgtatgtaattatattaacatatgcaagtatagtttatacttatatagtttatgtaattatattaacatgcaagtttatacttatatagtgtatgtaattatattaacatatgcaagtatagtttatacttatatagtttatataattatattaacatgcaagtttatataatttatataaattgaatttattttctcattctgaattagtttattgtgtaccaactgttttttgagtacctactgtgtgccagatactatgccagacacagggatattagtggtgaacaagacaacaaagtttcctgtaacttaataatagaggcatggcatattcgtggcatgccgttggataaagagcagtcttcaattttcacagattaatcatgtattatcttcttgacaacccagttattgataaatttgtttacatcccatccattttcatatttgtctgagaaccttttccttaatccctcacagggatgtgtacaatgtacacataatttcagttgtatgtatgactctagttatctggggtttgggatttcttaaagatatgaataagttacccaaagacatgtagtaatttgtgaattaaattttttgatttgcctggcctcactgatgtcttagtttatgttatttgtggttttgtgctaaaggtttgactttggggaacaggaaataaatgaggattgttttttataagcctataagatctaaagcatttgatttcaaatttcacactcacttttttttttttttgaatggtgaatgggttctatatgactgaactctgcctaaactagagaaataaagttagggaaataatagagttagctgtaatttgacttcatttatgttaaggggaatgttggggcaaaggatattaaagtggtattgtattagaggtgcttctggaaaggtatttaatatctgttaggtgtaaattgttatttacacttagttagggttattgtgtgggggcgtgccgtgaagagcctttataccaacaagtttttattattgcaggaaatgctctccctttaatgttgcctttcacttgggtgtcagaggcagcctgggaaagttggagcaagccctgccttgtagacagggactcttagatccacttttatagcagtgctggtatgtgggtggaaggtagggaagctgagttacttctgtatgacaagaacacctaaaaaaaattttttttaaatgagtgggtattattttgtctagaatctgaactattctaataaaattgaaaataaagcctttctcccactctttttgtacatcttcctttcagcttcagatttctgaaagatactgaaaataaaactgaagtaaggccaggcgcggtggctcacgcctgtaatcccagcactttgggaggccaagacggttggatcacctgaggtcaggagttcaagaccagcctggccaacatggtgaaacatatctctactaaaaatgcaaaaaaaaaaaaaaaaaactgccgggcatggtggtgtgtgcctgtaatcccagctacttgggaggctgagacaggagaatcgcttgaacctgggaggtggaggttgcagtgagctgagatcgtgccactgcactccagcctgggcaacagagcgagactccacctcaaaaaaaaaagtgaagtaaatttataaatttgaagatatctccaagtgcgctcttggaagaaagaatgcttttataatattttgataactacataggtgctcttcattctgatgtatccatgtgtgaataaataaatggctagagtaatagaaatcaaggcattattgtttgatttcaacaaacattcatttactgtgtattcagatactgggttaagaactggggatatagtataaaacatgatttctaccctcagactgctcatagtctagtcatagttatgcagaacagtaactccaaccgttatgtaccatggattaggtgctaaggtaaagtatgctcacagataagggtacctaaaccagatgtgggagcaagtagggtcaggaaaggctttctggagtaggggatttctgaagtaagccttgaaggatgaataacccatatagtcggccatattcaagggaaaaagaatagaaacatggtgttcagaagagatgtatgtgctcaaaaatagaaatgtgggagccgtcagggtaaattcttggtaactgaagtgatagaatgagttggaacaccttgagcaagtgtggtcagcaatgttaacttctttgaggtttggacccttttgagaatctgataaatactacagatcctctctgcgtggaaatgcatataagaaaaatttctactggggtgcctgtgttaggaaccatgcactttgggttaagaacctctggtgtgcagtaaaaagagatctgaggatgacaccttgcaagtaacaacaacaattgagaggatggtagaggaggaagaagagtacgatggagaagagggtgaacagggaaagaggaaagttaagaaagactggtatcattttaagttaagagtgagagtttcccaaaggagggaatgccaaataccacagacaaatcaaagaagacataaaatgtccattaaatttggccatgatttggaggtcttcagtgacttcagtaaggtaaatttcaattgagtagtatggaggaaaggaagctggggttctggagattggatgaaacamtcaaagagttgagactacagggagaagtacctctttccttcatttgtttatttaataaatatttcttgagtacttaccacgtcccagacactgtcctgaaagctggggatttgtccatggagaaggcagggcctccttcattagctgacatctcatcgtgcccaccctgttccaaagcttcccagcccctgcctgtctctctcctcccaaacacacatacaggaaatgtcctaaaatgattttctccttggtacattaccgggcacattcagccaccaggggactccagttttgctgggtcagacccaggctgctcaattgctcttctctctcttggacaccagggagcaaattgtcctctataataccagggacacacttcaaaatatcattgtgccagtcagacctcactatgagcctgtcattcagtgagtttataaaaatcattgtaacattttttttaagcttgtaccaattctttcctgtaataaatttttaagcctatttgcactgtaaaatattggttctaaatgtagaaaagtagcatgaattcctggcctgaggaaacctttatcctagtcttggactttttgcatgtggggacccctcatttgcccttttctttaaaaacaaaataaaacaaaacaaaaaaactccttggggccttgtctctttccatgatgtatggaggctgcagtcacacctaagtgtcaaggtagctgctgcttttctaaggatgggggcgggggacattgtgggggagatgctatcttcttagtgccccaggctttttgtcaagaatagtgtaataaaccagaggattcagagaatgatacacagtgattctgaggtttatttcaattattagaactgaaaacacagttatcccattagtatgattcaagattttttccaaaaatacactgggttgctcttgcttccagtgaaactcacctgcccattttctgcttactcactttgtctttagaaaatttgactgctttttatctccttctgattggcttttcagttgcaaattcagagagtactatatattctgtgttccaggtcacttctaaaaagtgttaaataagaacaggcctagtacttatctatattactttactcagcgtttttcctaatatttgaagatctcattctttttaaaattattactatggattatgccacaagtatacagatatctgtaaaatgcacagaatagagcctgatatactatgttacatcagtttctccaggttccacagatggtcctgtatttcctgtgttcctttcagaattgttaaaatgattattaatttaggagcgggtgtaatgatgttgtattggcagtgtgccagccaatggtgttatacaacacatttttttaattttaaaattttaaaaattgaattcacaatagagatagggatttgccatgttgccttggctggtcttgagcttctgggcccaagaaatccaccagccttaacctcccaaagtgctgggattacaggtatgagacactgcgcctggccaatacagaacatttttaaaagcctggtwctgcatgttgccaaacagtccttatggagacagcaaaaaactatgtattctcagtgtgatttgttattttgaatttagatttctgtagatgtttattttttaaatggagagctcgtgttgttagccgtgggcttgtaaaaaataaaaatagataaaaattaaaaatgggaagcttaattttggaattaatctttttaacctttgggtagtcttttagaaagtatatcctaaaaatacatagcataactaaaatatctcataaatccttcagaatgagctatttattagaatgctgtaaaaaattagaaaatcttaattttatgagacaactgataaactcatcattttataaattgttttatttgaatgtgtgataatataaaatagggaaattatgaagtttatattcagaggttaaagatttttccaagatcactagtaaagggcagaattagaccaacttctggactgaaccacatctttgatgcattttttaattatattattttaataagagaactttaaagaaactcttattgtcagtattctcctaaacctgtagctacagcattctataacaattactatttacaataatgacacaaatttctagggtatatataagaaaggatttacctttttcaataaaggctgaaacatagaaggctggagaaaacaaaaggtgaattttcagttaaccaaaattttattgaagctggaagccttaagcaaatttgcatgcacctttgtgtatctcttaagtttcttaagcagtcatatttgtagacacctttttcagagtctccaggtattttttatagtaggaaaaaaatcatttaaattacctctcattacctgtgtcctctcttttagtcctttgctctcactaggctggtttggtcttccaggacaagcaagttcttgcatattcctgttccttgaaaaaccttccagttagtggtcatgtaatagcttttcacttcttcacatctttcttgttaaatccactgcatctataaactgtacatcagtaaaaatgttttattaatattaaaaataattttgtttcatttcttatttgacattcatggctggaatctcttaaatctgtatgaactatagtaagctgctatgaatgcttccagtgctatataattaattccatcatcgcatccttaaaatatgccagcacatggcgcttgcccctccctacctcctcccccctacacacacacacacacacacacacacgcacacacgcacacacgcgtgcgcacagcgtacaccaaactgccattctccagcaggcctgcttctggagttgggagatgtcagcctgctgggagggggtggggggaggaggaagaggtggggctctactctgattaattaccttaggcattcaggggtggggcttccttcagccatctgcctgagatatgggagggagctggagaaagaaggagggggagagactgccagagaggaagagaaaagaaaggaagaaacattagaaagaaaaaggaaggaaaacggtataaagagagatcaattacccacccttaaatagctagattggggggggaggggggtggaaaagaaagctgtggaggtgtgccccagcacggctgctttgaaaggtttatcatctatccgtttggtttatggagaaaaagaaaatggtaactcaggtaagatttgtgcttcctcggcatgtttcttttctcctctctgggatctaaataaaggtttgagggtggagtatagtaagaagagttttaatcattattgtcttcttagaacagaccagatttattgttatcagctgaaaagtctgtgtctgttgagtccgtttatgtgtgtgttatgtatccgtatcctttcttccccctccctcaactccatagcagattcctgtttcctgtactgtgcagctgtagctcaggaaagaccctgtggggatttgtctacctctttgtcttggttctgagaagagggagggagagaaagactgcagaggtaggaagagattcttgtagactgccaaaaagaggggagcaggattccttttaagaatttcagaagaatttgtgttatagggaaatctgattccttgttcactttggtttctcaggattggctatggaattgtagttttgctgttactctaaactgcttattaaaaatgaaggttagaaaagaatgtttcattttcatgcctttgttactggcaaagaaaattttcagtaggagcattcaggtgtgacagaggcaggtagagccctccttgacaggagaacgaatctgaatgtataaatcacaatcacacaggctttaaaatacatttgaaggagagagagtaggaaatggaagatacctctcctccctctgtctcccctctcgtttttctctcttctcttctctctctcccactcccactcactctctcccccaaccccctcaatccccctttctctcctcatccttttcccctctttctccctgcctctttttggttatgccaggcaatatctaatctgcattttagcaagtcattcctgacaaatggaaaggtgaatgctcttccacagttctccctggcaaggcaatttttcttgttagcatccttctgtacgctccattaccctttttcctttatgtataggttaagaggaaatgatgaggctctgatttatcaatgagaaatcatttacactgtaggacattcaaatcctttagtctcagacttaagatcagtttcactccaggtttctatgctctgtggaaatttcatcactggacagtgctttccttttaaggaggttgccctttttttgtgttctctcttctcttcctctcccagtaaccaccggagggcgagagagccagctagttatcaggatggaggcatcattttaggagctggaatcctgtttagttatataatgccctgcagtgctgtttggaaggagggaaacctgtagggatattttcccattgggacccagaggaaagaagtttcaaatatatcttttcaaagtaatttttcaccaaatctgagtttagaaaatttcaacaaactccttcctcttttggaaaagcggagaagcttttgaaatgtttctcttccatgtgttatcccctcatcatcagtctaattacctcttttgaaatactgctttatgctctcggccttagcgccatttttttggaaacctctgtgccatgagagccaagtggaggaagaagcgaatgcgcaggctgaagcgcaaaagaagaaagatgaggcagaggtccaagtaaaccgctagcttgttgcaccgtggaggccacaggagcagaaacatggaatgccagacgctggggatgctggtacaagttgtgggactgcatgctactgtctagaacttgtctcaatggatctagaacttcatcgccctctgatcgccgatcacctctgagacccaccttgctcataaacaaaatgcccatgttggtcctctgccctggacctgtgacattctggactatttctgtgtttatttgtggccgagtgtaacaaccatataataaatcacctcttccgctgttttagctgaagaattaaaaaaaaaaaaagaaaagaaatactgctttattttttaaaaaaaatttacataaaagataaatcctgtttctggattctctttttgcttgggagatgatacttgcttaaccttagagccctcattcaatttttattaactggcaatattagagggtaacagctctcttcttgcttagcaattactgaaggcttttcaatgacttgacttttcattatttattttttaaactagtgaaagaatgatctaaaatggaaatttttatgatgagttttctattgcctcttggaacatttccccttagtttctagaggagctggtaagtgtagtgtgtgtgaccattaagttagagtgcacatgcttatgcacacttaatattgtggtcgtaataattagtatttaaagaagccataagtttaggaatgaagtagaagaaataaatggaaactggaaagagagattctggggtgcttaataattctaataataaaatcacctgttttatcaggatgtgctaaatattgaagaaaagttatgagtttttgcccatcctgaaattatacaactggcaaggatagaatatcaaatttgtgaattttcagtattccagcgtatttgttttgttgtatatactttctgtgttaatgtaatgtacatagttgttagtaatctagggggaaaacaatcaaaggaaataaccagctgggccaagtctttcatttgtcctgtggttgtgttgtgttgtgcctgcgtgtgtgtgtgtgtgtgcacatgtgtgtgtgtgtgtgtttgagccagacatccaatcccaacatttgataatgacctgtcacataagctttctcaatatagaatgtctatactggtggttaggcctgggttttcaaagttaaacggtttattacaatgtaagagcgatgtatggatgtgttttcactgttttgctacttaggttctttgcatcttcagatgataccatctctgtagtccccagtttccattgctcagctgttggaaaagggctttcagtgaatgactttttcatcataccatattagatccttgtcagtatttgcacagtgtatgcgctttattattacatatgctctacttttatagggcctgtttttgttttaattatcaaactactctgtcatttatagtaagtaatcagtgctctgctaaaaagcaaatggcaatttaatcacaaaattctaatatagccgatagacatgcttatgtgatacttaaaacgttaattttatcggctgttcatgtgtatgttgtaggagtatttcactgagatctcttattttttgggcatatagaccagattattgcatctcatatttatgaaaatagcaatatggaatatgaaggaaagataaatcattcttgtactatgtgtaaaattcgaaaaacaaaattgcaaatgacttcaacactaattagtaaaaaataaatgtttagccaaactcaaattcagttatactatctattgttgaaagggaaagtgtactaggcagagaggaaaagattttacagtatggatgtgaaagaaaatttttgtactctactatggtataagactgccagtttctgtggaacacaaagccctccctttcttggacagctcagtgctttgctggcattttcttcaaaatctgttttccatcaggaccaagaggagggaaggtgttaggaataagggaggttggaaagggggttgctgttcctttaaatagtgcagtgagtccatgtggcagcaggccgctctggagtgtattcttttgtaatgaatcaccagttccattgtctgctatctcccctctttgtagctggaaggctgaagtctttcacctgagctgctgccagttcgctcttctgttcctgggtggttgggagaagagaagagggagggtattttatgctttaattaaagacagataagagagcaggtatgttttgctttgtttcattttctcttttcctgtttttgtttgtctggtttttgaaaggagttggagtagagaatctattctgtgattttgctaagcatatcccattttctttgaattctggaggtcctctcagcatttagtctccattttgtggcactgctttaaagtgattccattcggttgcctgccagtcatgctcccttgccactcgaaccttatcccacccttcatccacggagctgcagccacactgtttgttttggcacactttccactttctatgggctttgcaggatttggggagttggaggataggcggggattgtgggttggagactgaatttatgttcctttacaatgaaaaaaaaaagcctcactttttccagagatttggtttctttctgaattcttctacattgctccatatcttcagttataatcatttcttcgctgaggccaagattgtctcttgaaaagtattgcttttctaaaaattacttagctttcttgaaaagataaacagaatttcataaatgaagctatgatgaaatccgagcaatcttgactcattaaattgttttttccgtcttagtcaccccctaatcacacacacttttctctttcttttttggcccccttctctattttttcctttatctttctccttagctttgcaattgagtctaggtaagcttaatatttgacaacctattacttaaatttgtattgctacaggagacatcttcatattgaacagtaatgacattcctcattcctctcagtgataaggcataagctcaaattcctggttttgttcctccagttttctgttctcccctgagaaattccaaactctgatctacacagattgccatatgtaaacaattttatctctctcaaatttgaacttttcatcatgtaattccttacctaggggttgtttcttggacatctgtttatggtagacagatagtttctgggaaccagtcatactaggtgatacagcmcccccttacccaccctggtctccttctggtataccattcctctccgggatctgacattattggtatcccacatgttcccttccgaagtcataattcctcactcttttttttcaacatttccaaaccactgtcaaatcttttttgaacatttcctcccaacattttgtatgtgaaatttgccaggcacaaatacaaggctcccctgcagtaaatactttgctcttttgattgtagcacctttcttagtgggctccagtgttcaacctcttctaggcagtgagaaatgctgcattctgccatcacaatgtattgtgtctattccccagactcttaaatgtttctctattactattagaatgattaaattcaggaaactaattcattagaggtcattgccagagtgaatcatttaaaatgcaagtctgattttgtcattcctgtgcttataccttacagttgctccccttcagtctctgaataaaatcctgtgaccctgcatgatcaggaacctggctgtctctctagtctcatctcctgccatccttttctttytgtatttcattctaatgacactggcctctttgctgttctcttaacatgcctaagaccctcctgctcaggacccttctgcttttctccctgcccaaaatgtcttcccactggtacccatatggtttgttctactcttgaatatttcttctcaagggcgacctctcccttaactttcctagctaaaccagcactccctcatcactcctaccttcattctgctttgtcttcacttgtcactgattttagttcttaccgttgattgttatatgtttgtttgttgtctgtctcctccccgaccccaaacagaagctccctgagatcaggatcctcgtcagcagtctgttgtattcccagtgtgtagaacagtgcctggcacatagtcataataaaaatagctaatctttatatatgcttatgatgcattaatatcagataccgttctaagcactttaccctcattaactcattgaatcctctcagcagctctgtgttatctccattgtacaaaagaggaaactaggcatatgacggttaagtaacttgcccaagttcagacagctactaagagatgttgtggggaatgatatccagacagactggcttagaaattgatattcttaaccactgtactctaatgccccttgtaggtattgggtattcagtaaatatttgttgaatgtgtgaataaattaatttagttgagactctgattcatttctgaaatttccatccctgacttaagactttgataaaacacttgcagtaatggaattcattgttgaataagattacttcattcttataatatgtaataaagtatacattattctatgataaaaatattaatattatctaataatactaaataataatgcagagcacatactgtgcattaagcattgtcttaagtgctttacatattttagagcatttattccactcagcagccttatatacttactcagcagtactattaatgtccatgttgtagaaattaggaaacccaaggagtttggctccagcatttctgttcttaaccaccactaataatgaccattataaaaatgtttttgtttttttatacctactttgtgccagtcaattttacatacatagcacatttacaaacataattattcatattatgtatcacttgtcaatcatctttgagataggtgaggtttttcccattttttgcaggagactttgagattctaaagatcaggcagcctggaaacagagagagataggtttcaaactggagatctatttagtcccaaattcgcatgctcttccattattctgtgaacctcataagataaatagttccattgttggccatgataagtagaaaagttttctttatgagctgaaatctgttttcatgattgtcttctcactccttctcattttctcatctggagttgcattgagtggtttcatgtcttctacataaaaaccaaatatttgaagatactgctgaacgttccctttaatcttctgttgccttgcttatttttcctacttccttgaattactcctcatagatatgaaaacatacggtttccagaatgtttactgactgtcctggactagttgcattaatttatatgaatgatttgtcatttatgtctaatcactaagtaaaaatatcaattatgattactttttaagttttattgatgcataattatacatatttatggggtacatatgatattttgatacatgcgtataatgtgtaatgatcaaatcagtaattaggatacccatgacctcaaatatttatcatttctttgtatagagaacatttcaaatctccccttctagctattttgaaatacacaataaattattgttaactatagtcactgtgctgttgaatattagaacttcttcttcttctttgttttggagactgaatctcactatgttgcccaggctggagtacagtggtgcagtcttggctcagatcttggctcactgcaatctgcgcctcctgggttcaagtgattctcctgcctcagcctcccaagtaggtaggactacgggtgcatgccaccacacctggctaattttgtaattttagtagagacagggtttcaccatgttggccaggctgctctcgaaattctgacctcaagtgatctgcctgcctctgcatcccagagtgcttggattacaggtgcgagccactgcacctggccaagaacttatttcttctgtgtttttgtacccagtaaccaacctctctccatcccctgcctccttcccagcatttgctaaacattctacagttatgagtattaagtatcatatctttgttataagttttgttttatgataacatgtttggctttagtcagtttcttttttgttgtttttgagacagggtctcactctttcgcccaggttggaatgtagtggtgtgatctcggctcactgcaacctccgcctcctgggttcaagtgattatcctgcctcagcctcccaagtagctgggactacaggtgtgcgtcaccatgcccagttaatttttgtactttttggtagagacagggtttcaccatgttggccagactggtcttgaactcctgacctcaggtgatacacctgcctcgacctcccaaagtgctgggattactggcgtgagccatcgcatacaactggctttagtcagtttgtatagctcattgaacatgtagtgttgttggcaatttataatttcaaaaatgaagggatattaccttgaactcctaaaaagaataaatagaatattgtttttctctccactataaagcatgccctcagctgattggcaggaatctacctgtcttttagtatctgagtcttgccctgatccctcaaaggttactgtcactgagtaatggaagtcaataattattttatgaaattataaatgaatgcttttatgtccacaaatgatacaactgtattcttttttcctaatgttaattatgattcctcataagaagtttggaagagacaaactgggacttaagtgaaggagattgggttttgaaaagactcttaactgagagcaaagatccacgaactttttctgtaaagggccagatagtaaacaattttggctttgcaagccatgttgtttctgtcacaactacccggctgtgctgatgaagcattgaagaagctatagatgataagtaaatgaatcgttggttgtagctgtgttccagtaaaactatttacggacactgaaatttaagttccatgtaatatgtatgtgtcacaaaatatgattcttttaactttatttttaatttattattattttttttttgagacagagtctctcactatcrcccaggctggagtgcagtggtgcgatctcggatcactgccagctctgcctcctgggttcacgccattctcctgcctcagcctcccaagggcaggtgcctgccaccatgcctggctaattttttgtaattttagtagagacaggatttcaccatgttagccaggatggtctcgatctcctgaccttgtgatctgcccacctcggcctcccaaagtgctgggattacaggcgtaagccaccgtgcctggcctcttaactatttaaaaacgtaaaaccatgcttagcttgcaggttatgcaaaagtaggtggagggctggctttgaaccacaagctatagtttgctgatccctgactcagagggatacaggacctcgcaatttcctttatagcatacgtaaggttttcccatatagcttcatgacagagagacagttttgagtggttctagcaggtcatgatggatcccttttataatagaatgaatcccctgatttgctctcttatttccccagccccagaaaatatgaagattcttctccttctttacttcctttctccctccatatgctgtattttataccttattgcttttcatatacattttcatatttttttaaaaacatttttcatgtagttatatactgtataacaacatttgggtcaacgacagactgcatacacaatagtggttccataagattataatactgtatttttactgtcccttttctatatttagacacacaaatacttaggtttgtgttatgcttgcctacagtattcagtatagtcacatgctgtacaagtttgtagcctaggagcaataggcgatgccatatagtctaggtgtgtagtaggcaataccatctaaatttgtgtaagtacactgtgtgatgttcacacaaagacacttgcttaaggacacgtttctcagaacatatccctgtcatcaagtgatacatgactattatttattactttgggccagatgcatttttctcccacatgattaatttgtctttaaaggttcagcttagacttcacctacttcagaaatcttcctgtctcacacagttgtccctctgtgcttcattaacattctgtatgcattgttcgtttagcttatatggtactataattgtgagtatatttctgtgtttttccatcagactatagtttctttcaggattgggactatatcaccagtgtcagcatccagcaaatatttcttttgagttaattaatgatttttaacttgctaattcattgatagtgtcctcttttgaaatgttgaatgggagagttaaattgggtagtcacttgtaacctaatgcttattacttaaatcagttaatacttagcacacatgtagtttgggaaatagatgctttacatggctagaagattgggaggattttggaataaacaactatttgagggacacaggaaactcttgtattgtagatgttttagtgaaagtggaagcctgggtgtatgacggtaaatggcataggagctctagcctcctggggagtcaggcaggaaggacgaagggcatgactcccgcaactggggaaagggcacgacagagaaagagaagtggaaggtgacaatgaaatcttagggattggcaacccatggcaagtataccaaatgtggtatattgagcatagtcatcttcctctctgctttgccttccactcaagatggccaagagttagattctttacatactacttttgaaaacttgtcatcgcagatatatagcagatcctaaccagccattctatgtcattttcaaggctcactattcttttaggtctttttccctccctctctctgtttctttttggatcttttctatatggtaacatcaaatgtacttacctttttttccctgcaacatctagtctgccattaatccaatccagtgggtgtatatgtgttttttaaatctcagattatagctttcgtctctagaatttttatgtaggtctttttcacacctctcatgtctcttagcatgttcatttttttccttttttatcttgaacatatgagacacaaatgttttaatgtcctcatctgctaattctaacatatgtattagttctgggtgagttgtgattaatttatttttctcagcattatgtgttgtagttttcctgcttctttgcatgcctggtaatttttgactggatgccatacattgtgaattttatcttgttgggttctagataattttttatgtctataaatattcttgagctttatctacagcacaactgcgtttcttagaaaaagtttgatcctttcgggtcttgggttgtttgtttgttttgttttgttgtttgttttttgagatggagtctcgctctgtcgcccaggctggagtgcagtggcgcgatctcggctcactgcaacctctgcctcccgggttcaagcgattctcctgcctcagcctcccgagtagctgggattacaggtgcgtaccaccacgcctggctaattttttgtctttttagtagagatggggtttcgctgtgttagccaggatggtctctatctcctgacctcaagatccgcccgcctcggcctcccaaagtgctgggattacaggcatgagccaccacgcccgacctcaggtcttgttttttaagctttgttagacaggactagagctgtgtttagtctctggttaatttttcctggccactgaggcaagactctttttaaaactctaatggatgctccttacatcattaggttttccactctggctgttaagaacaggattattcttggcactgtgtgagctcctagtactgttccctgtatttctttcaggtggttctttccccagcctctggaagtttcacacatagatgtggcagtcatcactcaactgagtacttgagatctttagagctctctttctctctgcaactttctccagtaccgtcccctgtgctgtcttggcttctccagacttctaggtctatcttctcaattcatggaacccaccaggttctgcctgggtccttccttctctgctgcagcctggaaactttatccatgtgataagttggggcagttgtaaagctcaacttgcttgtttcctgactcwggaatctctgtccttccttgcctactagacaatgtcttgagtgctgttgtttcatgtattttgtggtttttttagtagtttcaggtaaaaagaaaaatctgtttcttttttttttttttttttgagacagattcttagtctgttggccaggctggagtgcagtggcagaatcttggctcactgcaacctccgtttcccaggctcaagcaattctcctgcctcagcctcccaagtagctgggattacaggcatgtgccattatgccctgctaatttttgtatttttagtagagatggggtttcaccttgttggccaggtcgaactcctgacctcaggtgatctgcccacctcggcctcccaaagtgctgggattacaggcgtgagccactgcgcctggccttaaatctggttcttgttactccatctttattggaagcagaagagtgaacacatacttttaaatgaaaattaagcagtgttgcattgaatatatttttaatttatgagtgaaaatcagttgaacagttcatttcaaggagtattaaggaagaatgcgtaagatgtgtaagtaattataatacaaagtgggatacagtaaattacatgaaaatgatgtcagtaaagtgttgttaaaagcttatatgaggaaagagtttgagaagtttggcagaagtggaaggtgtgaggagaatggctatggcattgctttgtgtgtgtatgtatatgcgttatacaagacattatctgaaactagaatcaaattctttagtattgagtgaggtttagtggtaggatagtttcagagagtctaggactgataaaattaatggggggaaaaaagtcattagcagaaatacctaagcaagaacacaggaaaaacagagtttccatgtttttatagtttggtgtgatttgtggtcttgcggaaaaggagaagcatccttttttcctatgtattacctgcccttgcaaatcttgcagaagagggagaaaattcaaagtactattttttcactgtgttaaacagtgtaaaagataggggcactccggactgtgaaaatgatgaccactgctgcaaacttggtggaaccttagaaaacctcaataagcaatatttagactctttgagtcattgctatttaaatgataatcagattatctacagatttcaatggcaacacattgtagaactaaataagtagatggcattgtttatagctttcttaatttcagttaaaatggtcacctgactgttgttcgctaacatagagcaactgtgaccaaaagcttatctaagtaaagtaatccccccatccacagtgtcccttttcatggtttcaattacccatgatcaaccatagtctgaaaatactaaggtatggtattttgagagagagcgagaaggaggccacattcacgtaacttttattacactatattgttataattgttctgttactattagtattgttgttaatctcttactgtgcctgatttgttaagttaaactttctcacagttatatatgtataggaaaaaaaacagtatatgagggttcagtgctatctgcagtgttaggaatctactgagagtcttggagcatatgccctgtggataaaagaggctactatatatgctttaaagttttccctcctgaggaaccagggggcatttttgaaaaacaggagatgcagggggggaggtttgtttacttttacttagcctatctcttatatgcaatctttaggaagaagaatgtgatttttcccctcatatttgtattgatgtgactgttcatatgaaaaagaacatggagaactttaagattataactcagctgttagcatttatattttggactatgtatgctttctattttttcttattctttcacaataatagtggtaattattatctctatttttttttttttttttttttgagatggagtttcgctcttgttgcccaggctggactgcgatggcgcgatctcggctcactgcaacctccgcctcccaggttcaagcagttctcctgcttcagcctcccgagtagctgagattacagacatgcgccaccaagcccagctaattttttctatttttactagagatgaggtttctccatgttggtcaggctggtctcgaactcctgacctcagtgatccatctgcctcagcttcccaaagtgctgggattataggcgtgagccgctgcacccggcttttttttttttttgccaaaagcaaagaattttttatatatgatcttagttaattccttttttttttttttttttttttgaagcggagtctcactgtcttgcccaggctggagtgcaatggtgagatcgtggctcactgcaacctccacctcccgggttcaagtgattctcctgcctcaacctcctttggtagctgggattacgggcacctgccaccacgctcagctaatttttgtattattagtagaggcgaggtttcaccatgttggttaggctggtctcgaactactgacctcaggtgatccacccgccttggcctcccagagtgctgggattacaggcgtgagccactgcacccggcctatcttagttaattcttgtaggtacccttttaggtaatgatccttattttcattttgcagatgaaaaaccgaaggccttgagagcttaagttactcatctaaggtcacacaaatagtacattcattgcagagcctaaattttaacccatgtttatctttctaaagtttatgctatttctggccctgcccccattttgatgacaggtattacattaagtataatataaagaatacagaccttactattaaactttttctttttttttttttttcacttagtcaaaatttatttgaaggcctgaagacatttagttaactttttctttacataaactctgccttcccccaccaagtctctgtaacccacctttggccaaacccttgagaaatgtctactaattgtcttggagcctttggttcctctggggtaagcacagaattgattaatttgactatctgatgcattttggcttcccaaaattttatcttattaactgcactcccaggctggagtacagtggcgccatcatggctcactgcaacctccgcctcctgggttcaagcaattctactgtctcagcctcccaagtaagtgggactacaggcacatgccaccatgcccagctaatttttgtatttttagtagagacggggttttgccatattggccaggctggtctggaactcctgacctcatgtgatccacccgcctcggcctcccaaagtgctgggattacaggtgggagccaccgtgccaggcctagaaaattattcttgaatgaagctggatagtgtagttgatttaattgataatgataataatgaagtttcaagtgaggaagactataagtaaagagaagaaatagatatgtctttttatgcttttttaaagtatgccctgttggtttagcattgacttgactttcacaggaaatgtggagtgaaaactacaaacattttcattactaaacaactattaaaatatggatggcttgtttttggttcttttgttagctggtttcaggtatccctagttctgtcttccgcaggccacctttcttaagttgagataggttttcctgttcagtaataacagtctgtttataatagcatttctgatgactacttctaacataggactcccatttcttctccaggctggcctcattgtgataaaggattcaatgttgtaatcactggtttacatttcattgccattcctgattgaaggatcagagtccatggcctgccttattgatccatttgctagagatcagtggggtaacgggaattattttcctctttagactgcattctgatcttggctactattgcattcatgaagaaggagggagatgaaaaattaggcattctaactggtaaatacttgatgttttcttttgtttctgagagtagttagacccttgcaaatcttttctgtttgtaaggatttaaaataatgtttagcatatagtgctgggtgtgtttgtagatggcattaggactgtgacttacagcacatatttagggtttttttttttgagatggagtctcgtccgtctcatcctgtctcccagtctggagtgcaatagcgcgatctcggctcactgtgacctccgtctcctgagttgaagcgaatctcctgcctcagcctcccgagtagctgggattacaggtgtgcgccaccacacctggctaattttttgtatctttagtagagatggggtttcaccatgttggccaggctggtcttgatctcctgacctcatgatccacccgcctcggccttccacagtgctgggattacaggcgtgagccactgcatccggccacatatttagttttgatccttctctgagttgctttgcttcctgtaatttaaatgtgtctaatttattaaagcataagtatacaggcagttttaaaaattgtagtaaacacttcttattttccttttaatcttctctaattttcttttaataaatcttcgagttcttaaaagttttttaaagaaacataaatgtttaatagttatttaacgtttctcaaatatatacaggaaactggaattaacagaactcatttatggttgaaatcttgttttgcagaaaataaatcattacttctgggtcaagatggtagatagatgctttcatttgcctcacatctcttacaagactcccctgaaataacagtatagaagtacaaaaaataaatcagcaatagcaaatagaaaaaggtgaaatgtagcactaatatacaagagagttattaaatttctggaaaagctaaaacaaatgagaaccaatagttggatgaaatgaagaataagcagatgcctgttggtgaatacaaggaggctgcttgctagtgttatggaagccagtctgtccagggggaacccatgggagctctctgagcaaaaatgaaagagacagaaaacagaggaattcagtgtttatttaggggataactcagttacctggcattgccaaaccctttccaaccccttcccagtggcagtagtcagcaagtactatgccatcccctttctctagcattaacaaaggaaaaacaaggccggatgcggtggctcatgcctgtaatctcagcactttgggaggccgaggcgggcggatcacctgaggtcaggtggagaccagcctggccaacatggtgaaaccctgtctctactaaaaatgcaaaaattagccaggcgtggtggcaggtgcctataatcccagctacttgggaggctgaggcaggagaatcacttgaacccggaggtggaagttgcagtgagctaggattgtgccactgcactccagcctgggcgacagagtgagactcactctcaaaaaaaaaaaaaaagacaacccaaaggaaaaacaaaacataaaacagtgtttgtctccaaagaagttgatcagaatgtttggggaaatttaattttgtgtgtgtgttagatattggcacctcttcctttagtctcatatttagggggatggagagggagggcattctgcactttgctagtggcttacactaacacaaagcctgccagtgacatgctcttctctgtcttatactgagttcccattagaattttaattccaaagagagatgtaatcagaaagcaaattcacagaggaaactcatactagctaacaagtccttttacctgggttaccagtacgtgaggatcattagaagtcttagaggaacttttagcatgaaagagaccagaaaaaacaaaaagaaaacctgaacctaggggcaaaagataatgcaggaaacagaagagaactttaaaggaatcttctaactaaaatactcataaatactcatttataaaaccaatactaggtataatgaagagcaaacaattagagaatgcaaaaggagatttagaacattattgtcaatggaaagcacacagtagaaggatagccaaatagagttggagatgctcccaaaaagtagaggtttaattcaccaaaatggaaaatacaagacacaagtcatagactctgttcttagctagtgttctctagaaaacaacctgaaacaaaaaccttacccactaacactttattggggagtaccatctcaggaaagcaggagggaaagaagagtgagacaaggcagaaaggctggccctctctttgtaataggccttgctgattgcttggttttactggaagtcttcaggaaggttgtgtagagctattgcttctctgtcctttccatccaaagaaggtgtgaagaggtgtttatggtttcctcccatttcctgctcctcccccttttggtcaaagtttgccatacaaacagttaactcacttgaccccttccttcagcggcctcaggagaggaggccaggtcctacagtcctatgggtagatcaggtgtgtactgagtatgtgttgccaaagcttgggggtggtcagagcagtcagtaatccctaatggcagcctctggcctgggaacctctgccttttagggaactattaaaagaaggtcagtcctcaaaggactgacagagtgaaggataggatactactgctttttttttttttttttttttttttttttggagacggagtctcactctgtcccccaggctggagtgcagtggcgcaatctcggctcactgcaacgtccacctccacctcccaggttcaagcagttctcctgcctcagcctcccaagtagctgggattgcaggtgtcctccactacaccccactaatatttttagtagagacggggtttcgccatgttggccaggctggtctcgaactcctgacctcaggtgatccgcccaccttggcctcccaaagtgctgggattacaggtgtgagccaacacgcctggccaggctactgctgcttttaatcataagctcttcttacctatttgatttgctatcatgtgcatgtgttaatttgataaagataaaaaataaaatttaaaaagaaaaaatgaattaccaaaaacactctggaaataactatcaaagatattttagaatgcatttagaaaacagaatgaacttcaaatatgaaaaaatagaatctaattagtttatatcaggaacatcttggactgctagaattgatcctttctcctttcccactctttcttgctcactccttgttagcctacagtaccctggggttgaaatctagtagtcttcttctccttcatacccgttgccaggttctgccaagtctgcctttggattgtcattgctcaggccccccagtctatatctcgctgtggctattgtatgtagttcatagctttagtgtaagtcccttcaaagtttgtggtatccttctaatgaatctccttgtcttccctacctcatatcacctttgtttcctgatgctgagtgttggtcacttcctgtaccaccatatcatttttgttataacagaactttgtgtttgcttatatactctactgggttgaaacatcttttatttctttaataaatacttattgagagattttaaggcagccactgggatacaaagatgaattagatctggacaattacctgccttcaaagagttcatgttctgtaaagacaatacatatgtaagcaaataattgtaattgaatataagtaccataatagagttaagtattaggttggggagggtaggaggaaggaatgattttccccctttttgagtgaattagaaacctctagagaggagtagatgcccaaatacctattaaagattgtgtatgtattagcccaatgagtagaaaggagaaaagctttctaagcagaaagaatactatgtgcaaagaaactggaaggtgaaacagtacgtggtgttttcagcattcgacacacattagattaccacctgcaccaaaccctcttcatctcagctgaattatcagggtcgcctcccaacagggctccctgcctttgcctttgccgagtggtacatttaaaacctaattctgaccacatcacttctctgctcagaactctcagtggagtgtaaaagctaacctccctgcagtggctgtaagctttacaggatttctatcaacgtccctctttccccactgctacctttctcgcttcatctcctgccactctgttccatgcttactccagtctgatcacataggtctccaaggcctccatgttcctagttcttagaatgagctgcttgtatttttgcctgtgggactttgcatttgtgttccctttgtctggagtcttcttccatccagatacacgtatagcttgttgccttagtttctaaaaaattatgatcagtgttaccttgctagaccagccttagaaaatagaaattctctgtctctccagcccaataccccgataccctcctcttattttttctctgtagcataccatctgtttattgttttacttgccaatttattatttgtctcttcctactagaatgtaaactccataagggcagggactttgtctttttaatcatcgttgtttcatcagcagctagaacagaatatctgatgaatgatagatactcaataaatatttgatggcaagagttgaagctgaatagatgaagtgtgcaaggggcatgacttccatgcaaaggtatttggacttgagactgtaaacattggcagtctaggattttaagaagaagataaattaactatcagatttaggttttattttagaaagatcattctggcaggtgcttggagagttcattaggttgaggttaagttaaaataaagcagaactctttaaaaaccaaaaaaaatgttatttagatagcctaggtgagagcaatggctcatttttcttttaatttcccatagtacataatgtggactcccacatatagccttatatgtatcttaatagaatgattatttatattgtggtaaggtccctggcagagttggtaaagctattgagagaatggttcctatcttttttttatagacttatactgcagaagcaggtattcaattacctggttaattcaattaccaggcattttctaaagggcacttcctatatgctcatcatcacttcatttggtgaggaagctatgatgaagacgtttatgattcagtccctggttgacttagggactttacttgttaaatgattaaagaatatataagccaccatgtaaccatggttgtagacaaaatgtgttttgttctgggaaagggatagggaaaatttttctctgttactatatgtatatcatgtgaattttctattttaaagaggtagactacaacagaatacccaacaaaatttataaagcataattaaatattttgtaattcagaagacactctactactttgccagtgttttatttggaacctgagtgacatctatttctttgttttgttttttccttagagacatggtctctctctgttgctcaggatggagtacagtggtgtgatctaggctcactgcatcctcaaactcctgggctcaagtggtcctctcacctcagccccctgagtaggtagtactacaggtgcatgccaccacacctggctatttaaaaaaattttttttgtagagatagggtctcgctatgttgcccaggctggtcttgaactcctggcctcaagcagtcctcccaccccggccttccaaagtgctgggattacaggtgtgagcaatgccacctggcctatttttaaggctattccagtttagcatatggaagatgcaaacttaattgtccatgatgacaaaataataaattaatttagattgtagtgaaaagtttggttgagaaaaagaataattttccatggattgtgtaaatccattggaatagaatatttacattgaatagaacagacagttaactattaattgtaagggccttccatttccaaagaagcaggtagctgaaccagagtagttcttgctgtctgttgttgccagtggaagacatgattcatgaatgtttgaggttctaaatacttgtttaaggagaaatagaggaaagagcttttaagaggttggaaatattaagactattacagggtttgttgcttttcacctaatagactataggtttgaatgactttgttctgaaatatttattttcctgtttaaatattcattgctgtgagatttcaaaactcagcctcaagggaaagaccggactggcttttccctctgagtaattcagaagaggggtgtgtgtgtgtgtgtgtgtgtgtgtgtgtgtgtgttgacaagtgatttggaggcaagtttacaatattcttgttggccaagcctgtaactgcccttaaatttacatataccagcttgtgtcatttattggtattctaagcaaggatttatattgtattgcctggttttttaaaaatttattttattaattgtctgtttataagagctcaagattgtactggtcgtgttcctgaattccaacgcccccttacatgactgcagcacactcatcttttggtcctgattctttagttatacccacgctaaaagaaggatccattgtgaggcctacatttcagtagatttgcactttagaaaacaactagtgtttattctcttagctgcaggttccatataagaaggtaaccctctacttttaggaaacttacatttatagccactgttgccttcctctcatcatctatgctctctttttatttatttatttatttatttatttatttattttgagacaaagtcttactctgttgtccaggctggagtgcagtggcgcgatcttggctcactgcaacctctgcctccgatgttcaagtgattctcgtgcttcagcctcccaggtagctgggattacagacgtgcaccatcacacctggctgtttttgtatttttagtagagatggagtttcaccacgttggccaggctggtcttgaactcctgacctcatgtgatctgcatgcctcagcctcccaaggtgctggaattaccttgggagccatggggcctagcctctatgccctctttaatctcttaactgactctgttcttctaaaggtgtagatgcttcaggacatgtcctggaggcatgctgtaaccataattctctcccattttgccagccaaagcctctaagtcagtgtttctcagaatgtgggacccaaaccatctacaccagtaagtaccagggtcctgttccaacccactgaatcctaatctatggggaaaggatcttgacatgtgcatttttaaatatgttccctgaatgggtgttatacgcaataaaatatggtcatctttgctttcaaagaacaaggtaaaagatgagttggtaggtgtgaggagctgggttgtatggaagtagtttcttactgcatcttactgttgagactgaagcaggaatgggtgtgtctgaactccttacccgaaattagacatttttttcttaaactaatacttcaatggcgattggtttttattacagtaatccttattatataatcattgaatctgtttccatgagcttccttgggatcttggccattcagtaagttccagacaaccaagtgaaaagcgaactcttagaattcaacctgaaggtaaatatttggagactacatggagatttcattgtatagatttttcctctcaacatcacatttacctacaagttgcctaacatcttatggctctgagtgtagttcagatgtattgtaaaagagaaaatgtattacttttacctaacttaccagaaatgtattcaggattattagacacttaacacttttgtctgctctgggtgctcaaaattgtgaaactttcttgaggtgagaaaagcaaaacaattctaccctacagctctcctctaggttatggtagtttaaaaaaaaagttaagaacagttcaatagcttggttgtctttagacttaaaaacaaaacaaaacaaaacaaaaaacgagaatattttagatactgaaggaaggagatttgggatttaagtatttgtgtaagttaagaatctagagtaattttgctttaagtcttgcaaatgagcattgttttgtctttgtatgtgtttatctgatttatttatctggattttcctggtctgttcttctacagagttaatttttttaaaaaaacggatcctagatgattttaaatccagtgttgtcttcttatctttctgagagaacagttatatagctgttattttcctcttgtcacagacagctgggcagaagccactgcttttagtaccagatctgagaatgacaggcctttgcctaggtactctttttttttaaacaaaggcaaatagagtttgaaatctgagcccatctaagcaaatcccaagggatcaaaatgatataatttgtaaaaatacttaaaagtaaaaacattttatttgtattataatcctagaaaattaatttccatttataaatagcactagaaaaactattagtgacattgtcagtggtaataaactggtgagaatatgctctaccaaaataatgaagtgattcttttatgatggtgtgaataaaattaatattgatctgtttgtgtgcatgatccattctgaccatatatgtggtatgggaattgagaagcttttaggatttgcagcctgttgattagaagcaatacaatagcagtttatgtatataagtgggactcaaggtgaccaaactgagaaaattagaatgaagttgaggaataaatgagaagatataaacaaaaatacacccttctctctcaaagattacatagactttagttatcctagaaatatgaagacaattatattttgggtcatttctgtgttctcttacagtactgtgcataggttttaaataatattcagaataattcagtaggaacagaaaatatgctaaagaatcagtaacaaaacagtttcacctgctctctcaattaattttcacacccacctctgaagtaaacaacccatctggtaagtggtataattggaatttaaactcaagtctgacttttaggttcatgctttcttctgttttactacattccatgtaaactggggagaaggcacatggttggacctagaaaaaacactgaaagtcacctgtcggtaggtgatgattgaacctctgagattgctgtgggtaaggcaatagactgttgaatgggttcctgtttgacgactgtaatactatagttgtctgtccatagccacgggttctgcatctgtggattcaagtagctgcggattgaaaaattagggtgggaaattggatgactgtgtctgtactaaacatgtacagacattgtttctttttaggagacagggtctcccattgcccaggttggtctcaaactcctgagctcaagagatcctccctccttggcctcccaaagcattaggattacagctgtgagccactggcctgaccagactcttttttcttgacacttttttcttttcttttcttttttttttttttttttttttttttgagacagggttccactctgtcgcccaggctggaatgcagtgccataatcatagctcgccacagcctctatctcccaagctcaagtgatcctcttgtctcagcctcctgagcaactgggactacaggcacatgctaccatgcccagctaatttttaaaaattttttgtggagacaggatcccactatgttgcctaggttggtctcaaactcctgggctcaagtgatcctccctcctcagcctcccaaagatctggaattacaggcatgagccaccatgcagggccttgtcattattttctaaacactacagcataacaactatttacataacatttacattgtactaggtattataagtaatatagagatgatttaaagtacacaagaggatgtgtgtaagtaggttatatgcaaatactatgccattttatataaagggcttgagtatccaaggattttggcatctgtggtgggcgggggctgggaggttcctggaaccaattacctgcagatatgaagggacaactgtatgtttgaattcagaatgaaaacatttagcatatttcacattgtacaccaaaaggctgtatataatatgtatcgcctctgttactatctgtggtttaaaagagaaagacatcattctcaactcagaaattaatagttacatttgattttcactcacagctggtcaacaactcttaaagcctgtgtttgtaagacagaaggaaattaagtgcataaagcacaagcatgtaaatgttgattctttgctttcctaatgcttccccacttctactttcccatccctgcactccagtttgatatcaacccaagataccaacacttgtttcactctgtgttatcccttgttatgctctctagcccaacaaagcagtttgctgtaatgtgcacacacctgactttctatctcagtcttcctctatttcataaatgtttaacacttcatatttattatgtacgatgtgggattctacattgtacaggactgtctccacccatcataatgagccttttaatctaataggggagttaaaatacatatttacgtttgctaagtatgaggctttagatttcaatgtcttataggggatgcaagctaaatgttataagaatataggaaaggaaggaattacttttaactggaaacagaagaaagtttataaattgctaggttagggaaaagagctattctgtctagccttgtggactaaagagaaagctagtaatttcttttctcagatgagatatacttaagcagcttagcctctggtaatagaaacaaaacatttttatataagtatagaggtaaattcatacctagaaatactcatgtgaactgttatctcatagtttgctgaaggctgttgtacttctcttctgagcatagaactttggaatatggcctggaaatttaatacaaatctgaaaccatttgacatttttaataatgtatacttggggaaatattcagacattgcatgctatatgagagaaaatgttaaatcactcctatcccaatttcattcccttaatatataaacaattgttgttacatttttaacaaaaattttaaaagaaatttctgtaagtaacaaaataatccactaagaatttcttcttgacctcttaagggaggttacattacccctctaggaaaacagagcctctgcctggcttgcatttctgtaaaacgcctagtgcctaggctacaagtggattgcaggaaatgtttttacctttctccccatctcccactgctaattgatgtgtttattcagttatctgagtcagccctgttgagaataacgctgtgagagaattcatactgtgtacttgtgtgccagagtctcattcccagcaggctggggtggagaatggaggctggagtaaaacgaggaggctgaaaggagcagtgtcagagcaggagaaagtcgccttggccttgttaatcctaacttgaaaactctatcttttagcttttaccaattatttagtagaactttcttatggattcctgtgagattatatttatgcctgatgtgggcataagacctttggtgctcttattgtgtttcattcaccagtccacctgaattccaattcaattctttttcatgtctgtcttcaggccagtagattcagcgagggcttctgaagcagtatgtttcatatggctagagagagacagagagatagagcattgaataatttgaaggggaagggagataactattttatatctctcgtcagatgcccagaatagctataaagacatcataaaaactatcctaacctagaaataacgtaaagaagttatatggtgatgggtgacgaagatagactttttccaaaaaaatttaaagttttcataacatattttctaagaactaaagagaggggtttttttttttttctatcttttgagatggagtctcactcactctgttgcccgggctagagtttaatggcagcgatgtcagttcactgcaatgtcctcctcctgagttcaagcgattctcctgcctcagcttccaagatatctgagattaaaggcatttggcaccatgcttggctaatttttgtatttttaatagggatggagtttcaccatgttggccaggctggtattgaactcctgacctcaagtgatctgcccgcctcagcctcacaaggtgctgggattacagaagtgagccaccacacccagccttttttttttttttttttcccttaagagacgtggtctttctgttgcccaggctagggtgatgcaatcatggctcactgcagcctccagctcctgggctcaagcagtcctcctttctcagcctcacaagtagctgggactacacataccaccatgcccagctaattttttaaagtttttctagagacagggtctctttgtgttggccaggctgatcttgaactcctagccgcaggcagtcctcccatctcagcctcccaaagtgctgggattacaagggcatgaaccattatgtccaatagcaggaaaatttttatgtaaagcaatttatttttatttttattattaatttctgttacagaatcttcattcctgcctttaccagtttgcaagggctgccataagaaagtattacataacaatatagcaatgtattttcttaccattctggaggctagaagtgcaagatcagggtgtcagcagggttggtttcttctgatgtcttttttgttggcttgtagatggtcatgctctgtgtcttcacatgggcctccctctgtatgtgtctgtatccacattcccttttcttataaggacaccactccaattggattaaggcccaccctcatgacatcactttaattacctttttaaagaccttatctttaaaaacagtgacattttgaggtactgagggttagaacttcaacatacgggttggagactgagcacaactcagtctatgactctgccccttcccactgataactgtaatcagttcatcactttttatctagactgtggcagccccccacccccaattctctgccttttttctttcaccactattgtgtaaagcagtttttattaccaagtagaaatgattcttggacattggagacagctgaattttgaagttgtttaacttttaaatggaagagagttatgaatttttgtttcaaggtaggtcactaccattctcttaagagtaacacagtaattcagtgtttcagaatattggcttccccttattgatgatatattttttgtcattctctttagtattaaaaacaatatatttgtataggttttattacaaaagtaatatatgtttattattggggcacaaggaaacttttgggggttttggatatatgygttgactatcttgattgtggtgatgatttcatgagaatataagtgcatatatcaaaacttaccaaattgtatactgtaaataaataagtgctgtttatcatatgacagttatatcataataaaactgcttaatttttttgctgatttgatgactaaagacttggacttactttgatgttaatgtgaattttcgtgacagttagtgaggttgagcatttttattagttgtttgtatttcattttcaatgaattgttcagatacacagtttgcctgtttttctcttgggatgtgtgtgtgtttgtgtgtacatgtgtgtctgtcttgtcaacttggttaacccactctgggactagtgataataacccagcatctctcttaccttttgctaatattttctcctagttgatttttcttttttgtttttcgtattttttagggacagagtctctctctgtggtataggctgtagtggcttgtggtccaaagtgggctctccacctacttttaatttaaaggaaagatttttgcccctttggcatctagtccacttaaatatggttgtgggcctgtctagtaactacacattaacaaaagtgagtgtgtgtgtgtgtgtgtgtgtgtgtgtgtgtgtctgtccacatacatatatctatgtgtgtatgtgtaataatattttctccaatcctggagcaataagcattccattttacctatgcagtgagagaatattcagagaattccatatactcactttaaaaatagttacgtaacaaggattcaaagtcactttttctttctcttgttgtttgttttagggtaaccaggagccgacaacaactcctgacgcaatggttcagccttttactaccatcccatttccaccacctccgcagaatggaattcccacagagtatggggtgccacacactcaagactatgccggccagaccggtgagcataacctgacactctacggaagtacgcaagcccacggggagcagagcagcaactcacccagcacacaaaatggatctcttacggtacgtggaccatgaggtgaaaaatggaaggatgcatggcaatcatatagaaattgtcgccttaattatacaattagaagactctcggaattaatttagcatttacacctgttctcatttacaccttctctcaacagcattgtatacattgtcctccctcctcctagaaatacttagtctcttggcttttcgagctctcccaattttcctgccaagcactgggtgttctgctcctgcctccttctctgttcaacttttaaatggtgcagtactccatatgtaggtcctggaaccccttttctttttattttatatcctttctctgcataattatactaccaaactcaagcaaaacctaggaatattctttctttctttctttcatctgtacatctaattgattagcaagtcttgacaaccataactctaaaactacttcgtcttcttctctacatcttattactcttccaccaaattgcttgtgtttgaatctcaatatggcccctactaaactgtgtgaccttggaccagttatttaatctctctgcccttggctcactctaaaatgaagataatagtacctacctgaagaggctgttaggaaatttaaaagaatttatcatcatcactgctctagtccaaacctcatcacttatttccggtattactgttgcctaacttatctatcctccacataggactaaggtggtttttttttttttttaatgcaaatgccgatttcctacttaactcttaatagttccctaatgcaattagaatataatctgaactccgtacttggtttactagtctctagccccagcttacctctttgacttcacctcttactactaacttgctaaagtaaaggaaatgtcataaattaataataggtatatatctcatacataccaacatatgggaaattgtattgtctcttgctttgttgtccaggctggagtgcagtggcatgaacatagctagctcactgcaacctcagtctcctgggctcaagtgatcctcctgcctcagcctcccatctagctgggactacaagcacacaccccacgcccagctcattttttaattttttttgtagagacagggtctccttttgttgttgtccaagcttattttgaactcctgtcactctatcctcctaccatggtctcccaaagtgctgggattagaggcatgagccaccatgcccagccttgtgtggtctatttctaaagatagaaatgttctacagtctgcatagaaagacctagctctgtcgttagatttctttttctctttcctatatctggttatgaaaaggagagctttactcagcctttaagccacttgctaaggatggatttaacccataaatgctttcaattttctttcatcaagtattgaaccaccaagaaattcctactttcgatgtttattagttatgtataagcacataattttatacttcagaaataattggctacaatagataatttaagagtctaggcttgataggtaacaaacgagactttcagtagcatttgttctagaatcataaacgtacaggctgatgtattgactgcatttccaaataactttttaatgatcatgaactcacagacctatcagaataactgtttcaattaaagaagtgaaaaagaagaaataaaatatatgtgaggattttccaaggtgttttaattaataaatttctatactaattatcagggtttttttttcatttttattctctgtttcttgttagtttgggtaatttgtgtctttttagcaatttgcttcatataaattgtcaattttgttggtataaagttattcataatttcatataatcgttttaatttttgtagggtctgtggtgatatccctgtttatattcttgatttggcaatttgtgtcttctctctttttttattggtcagtctagctaaggtttattaattttgcagatttttccaggaaaccaactttttttttcattgatttttgttgtttttctattttatttttcattagtttccactctgttattatttctttcttctacttgctttgggtttgatttggtctttattttgccagcctcttgagttgcaagcttaggtgattgattttagattttcttcctttttgtgtttaaaactgtaaacacagaaagtttccctttagctgcataccgtaaaatatgatctatattgtttttatttttttttcgttcgagacattttaaaaatttttcctgtggtttcttctttgctcctgggttgcataggagtatgttgtttcctttccaaatgtttggggatttcccccaaatttctttcttttattgatttataatttaatttctttggcgcttcacatgatctcaattttttttaatttattgagacttgttttatggtttactagacagtctttccaacaaaatattcttaaccaattggttttttcatcaatatgaaatgtccctctttgtctcttttactatttcttggcttatagttaaccaagaaatagtaaaactatttgtctgatattaatgtaatcacttcagccttctcatagttactgtttacatatttttttctgtcattttgtttcaactgctttgtatctgaagtatatctcttatttaacaaaatttaaaaaagaaagggccaggtggggtggctcacgcctgtaatcccaacactttgggaggccgaggcagctggatcatctgaggtcaggagtttcagaccagcctgaccaacatggtgaaaccctgtccttactaaaaatacaaaaattagccgggcgtggtggtgtgcgcctgtaatcccagctactcagaggctgaggtaggagaatcgcttgaactggggaggcggaggttgcagtgaactgagatcatgccactgcactccagcctggcccacagagtgagactccgtcccccactccccgaaaaaagtgcacagctagatcctgcttcttgcttcttcatccagtctgaaaatttctgtctttttattggagcatttggtcaatttgcatcttaatgtaattattaatgtaggtagatttatgtctgtcattttactgtctcatgccttttattgttcctttgttccttctttactgattcctgttaaataatttttgtaccttttacatccatttgtgatattttttctttagttattttttgtttgtgctggtgtttcttgtattttcttagtgctttctcaaggaattacatctttgacttatcacaacttattactaatggttgtgtgtgtgcacatgcatgtgtgtcttattctggttaaatatagcagcttaggtctaatatagcttcattccccacgcgcctttgtgctattgtcatacatattatacctgtatattttagatatataacaatacactattataattattactttaaacaatcttacgttgtttttttttttaagatctccttttttagagcagttttaggttcacagtaaactgagaagatagtacagacttatcccatatactttctgttcccacacatgcatggcctcccccactaacaacattgcacaccagagtggtacacctgttaccattgatgaacctgtattgatacatctttatcacctaaagtctgttagagtttactcttactggtgtacgttctgtgggtttggataaatgtatagcatatagccagcattatagcatcacaaaaagtaatttcactgtcctaaaaatcctctgtggtctgcttgtttatccctctctcctccccacaacccaacccctggcaaccactgatcttttaactatctgcatagtttttcctttttcaggatttcatgtagttgtaatcccacagtatgtagcttttttctgattggcttctttcacttagtaatatgcatttaagtttcctctgtgtcttttcaagtcctaatagttcatttctttttcagcactgaataataacccattggtctgtatgtaccacagtttgtttatccattgaccaatttaagggcatcttggttgcttccagattttggcagttatgaataaagctactgtaaacattcatatgcagggttttttgtggacttagttttgaacttcttggggtaaataccaagggccatgattgctggatcatatgataagagtatgtttaattttataagaaaccaccaaactacattccagagtggctctaccgttttgcatttccaccagcaatgaatgagagttcctgctgctccacatcctcgccagcatttggtgtctggattttggccattctaatagatatgtagttgtatctcattgttgttttagtttgcatttccctgatgacatatgacatggaatatccttccatgtggttatttgctatctttatatcttatttggtgaggtatctggtaaggtctttgtcttacttttttttttttttttttttttttgagacggagtctcgctctgtcgcccaggctggagtgcagtggcgcgatctcggctcactgcaagctccgcctcccgggttcacgccattctcctgcctcagcctcccgcatagctgggactacaggtgcccgccaccacgcccggctaattttttgtgttttttttagtagagacggggtttcactgtgttagccaggatggtctcgatctcctgacctcgtgatccgcccgcctcggcctcccaaagtgctgggattacaggcgtgagccaccgcgcccagcctttgtcttactttttaatcaggttgtttgttttcttattattagattttagaattctttgtatattttggataacagtccgttatcagataagtcttttccaagtattttctcccagtctgtggcttttttcagtttcttgacaggattcattttattttattttttgactatttttagtgatcttcatgtcttcctataggtccaagttattatgcagtgtcatttcctttcagtccaaaggacttcttttagtatttttttttaggcctgctggaaacaaatactgtttttgtttatctgggaatgttgtttttttatgtgttcagttttgaatgatagttttgttagctataggattcttggttgacagtttcttcctccaccccccagccctttaaatatgtcatcccatggaccactcccatgggagtcagctgattgtgatgagaagtcagctgttaaccctggtgttggtccccctgtaggtgatgagttgttcttctcttgctgatttcaagattttctgtttgtctttggctttgagccgtttctctatgatgtgtctaggagtggatctctttgtttttatcatacttgggttctcttgagattttgaaatatatattcatcaaatttgggatgtttttcaccataatttcttcaaatttttttttcctttcttctctcttcctgggcctctgattacacataattttcttttcccccgagatgaagtcttgctctgttgcccaggctggagtgcagtggtgcaatctcggctcagtacaacctctgcctcccaggttcgaccaattctcctgcctcagcctcccaagtagctgggattatgggcatgcaccaccatgcccagctcatttttgtatttttagtagagatggggtttcaccatgttggccaggctggtctcaaacacctgacctcatgatctgcctgcctcggcctcccaaagtgctgggattacaggcatgagccactgcgcccagccaacacataaattaaaatacttggtgttctcccataggggtttttgtttcttaaaaaaattcagtctgaacctaaacaaaatctgaagttctattcatttttcttggatcttttttccttctgttctttagattggataatttctggtggtctctttttcagttcactccttctttgttctgccatcccaaatctgctgttgagcccatctagtgattttttttctttcagttattatacttttcaactctggaatttccatttacatttttctactgagatttcttctcatatttttctttaatttttattattattttttgagatagggtctcactttgtcacccaggctggagtgcagaggtgtaatcacagctcactgcagccttgacctgctgggcgcaagtgatcttcctgcctcagcctcctgagtagctggtactacaggcacatgcaaccaaacccagctaatttttgtatttttttgtagaggcagggtctcgctatgttacccaggctagtcttgaactcctgggctcaaggagttctctcgcctcagctgcctaacatgctgggattacaggtgtgagacaccatgcccagccttaattttaaaaatatatttgtatttactgctttaacgttgtctgctaaatccaacatctgggccttagtctgtttctagttactgcttattttcttgaatctgggtcacttttctgtttctttgcatgcttgtaattttttaatgaaaattggacattttagtaatgcattgtagtgactgtggggtgttatttatttttctgtgatgggcatgtgtgtgtgtgtgtgtgtgtgtgtgtgtgtgttttaagtaatttgcccatacttaaactatgacatgtgactcccacacagtatacggccactagtgtttctgcttattgattttcatttgttgttttattgtttttagcctggctaggaggcacccgtgtcttcctagcttaatggttagcctgtgactagtgcagaggtggtgttcaaacacctgaagcttattgagctttcaccctctgatgatccaggttgattgggaagtgcatggaaagttcagccagttcttaagcctgccttgggttttctttctgttgagacctcttatgtctcccttcctcatccatgtagtttcacagccacccagggatgtgaggagaccatatctggcccttttgtgactcttttctttccaggatctccccttcagatttctagctggtcttccactgcaccctcttcagaccacagcctcaagctagaagaatgtcttctccctgttaggttcccaccaggttggccccttttagctgtcagagctatggattttctaccactccttcaatctcccccttgtcccaagtcagatctgccctctctggcagtgaaaattgctggtttttatggtcccagccctcacctgataaaactaagttttaaggcattaagtttgtgtctggatgctcttgcccctaagtttaagcaatttctcaggacatctatttattgtctgtctgccattgattgatttctagaatcctgaaatggctgtttttgacaactttgtccaactttcttactgtcatttccttttgaggaaacagttcactgacctgttcataccatcatagccagaagtctcttccctgaatcattgcatggcatttttaaattacttactacatatctcctcatcattgcccatttctgtttctcttttttcctttattgctaccattttcagttgtttcagatctccagttgtatatttctaatgacagtgattaagggcaagttctgttccttaatgtaaatatacatatatttacattatatatatagttaagacttgcattcctcatttataccagaaactgttcaccatgaaattttgtatgtcaaccaatttgagttcctaaagagataacccatatgtatagagtataagtttatcgctgccaaaaatagatgaagagaaaatggaaaatcctttgatttgtgcctgtgaacagagatagcacaagttctataatttcaggaagctgttaacaataaaatgagaaatttttaggatgctctggttgaaagatgctttttttttaagtgtacattttattttatttgatcttatttttgagaccgagtctcactgtgtcacccaggctggagtgcagtggcgtgatctcagctcactgcaacctcagcctcccaggttcaagcgattctcctgccttagcctcccgagtagctagggttacaggtgtctgccactatgcccagctaatttctgtatttttagtagagacgaggtttcaccatgttggccaggttggtctcgaactcctgacctcaagtgatccacccacctcagcctcccaaagtgctgggattgcaggtgtgagtcactctgcctggcccaaaagtgtacattttaaatgtgagggtgaattcactgctcataagccatttatttacttttggcggggggagggagagagagagagagagagagtgtgtgtgtgtgtgtgtgtatgtgttgtatatagagagtttgaacagttgagcaatacattgtaaaacctagatttgacaatatttaggttattttattaaacttactatctgcctatatgtctcttaaaatggtctatccagtttgattactcatcaattaaaaacaatggtctagtaattcatgtggccaattaaatctaaaagttagacaggaagcgttgttatttacagatttattaatgatacctcaaatttgtatctcacttttcagtttaaaaattgctttcacaaacaatattttattatggtttataaaatatccctttgggatatattagagtttttacagatggggaattctaagtccgtaatcttcgttctaccactccgactccccatattcaacgtagtgaaagaagatggtgtactgtgtatattcactagtcctcttagcaagcacttagtatcttttcccactcagtttaagtcttatctctgctgaaaagccttcctggacttttctaggcaaagccaaattcgtgtgtccttcatttaggctcaagtagaaccgtaagctgactgctgtttatgtaacatataaattgtgatttttaaattgacttttgtcttcctaagttttaaacttttaaagaaaaagtcatttttcatctttgcattccctgacttgtcacagtgcctgacacttaatagaactcagtaaatgcttcttgggggaaaaaaaaaaaactaggtacaattgtattatggcagttctgaggagagagaagctgaggcgtcttggtgaatacagcattgatctgggccttgtattaatggtaattagaattcgagtaagcatagatggtagtgggaaragttaagaacgtcagttctcaatacaaagttgaagtgatgagaaggatcaaaatgcctcgggataaaagcataggtttctacttgattgaagctttaggtgtttggcagagactagtgggaaataaggtggaataagtgtcagttgagtataaattgggaagagtatttgaatgccaggctgagaaatatggactttattaaagattttgagcaagtaaatgaagtgagcagaattgtgctcggagaagattgatctgtcacagcgtatgcagggtgaatagaggagcaggcagacgattaggaaacagtcttaagtggttatgtagagggggaatgaattcaggagacattatgaaggtagaatatagaggatttgacagctggttggatgagtaagataagaggtagcacaaagattgtgccatccttattgtaataattgtcttgaataaatcattttacctccaatttcagtttcctcatctatcaaatgaagtttatacttgacctgactgtacagggttgtagtgagaataaattaagaaatgctttggaaattacttgtttaaatagttacctaattaccttttttggggggtgggggaagggggtctttgaggtagggtctcactctgtcacccaggctggagtgcagtggcatggtctcagctcattgcagcctctgcctcccaggctcagatggtcctcctgcctcagccgccacgagtagctgggactacaggcgtgtacccccacacccggctaattttttttttattatttgtagagacagggtctccctgtgtcttgctctggctggtctggaactactgggctcaagcaattctcccacctcagcatcccagagtgctgggattacagaagtgagccaccacatccagccgaagtaattatttttaaccatcataagtcttttaagatcagttgtccctatttgtactgtttgttgctgtgagctacagctccatttaagtatatttcgcttatgttggatggtcttagattgttggagagaacaaaaagaaaagaacttgtacaaaaatgagaactgagcattaaaatctgaaatttttatttttaaaatgtgttttagaaatcgattttaaccttgggctagaagcttctgctcttaagatgagagcttattttgatagtcagttggtcccatactgtgcattagcaaaagaggtaagcagttaggggtctaccacctgggcctgcagacacttgatcatctctgggcctgcctgcagagaaaaaaggacctcagttcctgtatctttagatacttttctaaatggcagtgggtataaataaccaaagaatttgaagtagacaagctttagtgaatactcttcagatatgatgtttatatttgtgtacatattctaactacctgttggattgtattattcttaagggtaggaaataattctctctctgtttctgtcacctctattggtatattatggatacaaacacttactagcaagtgctttctagtggtggggaaggcttatagttgttctaaaggcgtataggtggtctaaggtgttagacatacgctattaaaaatactgagttaatacatcagtttaggtaacagaattcatttctccaacattcttccgtataatgtaaatacttttctttttcttagtttgatgtaattagaatcatttacttaggagacatagcatgttattgagtctttcacttaaatataaggttttcctaactggataattaggaaaataaaatacatttatttccccttatacactcttcaaacataatttagagctaccttcttttaaatcaaaatatcagtccttaaataattttttgaaatacatatataggggcaataactacttaatagtaacaacaaaactaatatatttgagtgcctactttgtaccagatattgtttgaagcactttttatgtgttaactccattgagttaccatagccgccatgtgaaataggtatcgttattactcctcttttacagatgaagaaattgaggcttagagagattcaagattacttgtccaagatcacacaactaataaatgtcagtgtgaggatttaaatacaggttatctggccccaagagcctgcattatttcccataaattatattgaacaactgttttatatatacttgtcatgtgcacattactgtgctaggcactaggtgttcttaaaaaggtaaaataaagcccctgccctcaatgaacctatagaagttccagtagaaaaacagtacaggcctggtgcagtggctcatgcctgtaatcccagcactttgggaggccgaggcaggtggatcacctgaggctgggagttcaagaccagcctaaccaacatggtgaaaccctgcctctactaaaaatacaaaattagccaggcgtggtggtgcatgcctgtaatcccagctacttgggaggctgaggcaggagaatcgcttaaactcgggaggcagaggttgcagtgagtcaaaatcgtgccattgtactccagcctgggcaacaagagggaaactcagtctcaaaaaaacaagaaaagaaaaacaaagtacagataagtgctagaaagagagtaatgaagcgggttcattaagagatgcttttagaaggtaggtactacttctcctaaacagtgaacccatagcctgcagtgaagtagaggacattgcaggcagggacaatcctttgcagcagtaattttccctgtgtggtccacagatcactggcagttccctaaattttttcagagtctgggtcgagggagctatgaagtcaatgcaaggtattattttcatagtaataccaatacattcttgctgttttcactatatttgctttgacggtcagtacagaagcaatggtgggtaaaactgctagcaccttagcatgaatcaaggccgtggcaccaaactgtgctgctggcagccatcatattcttcactgtcacagactcacaggaaaacaaaaaaatcacgttcacttaagaatgtccttgatgaagcagtaaaaagtattaattttattaatttcccacattagtatatgatatttttcatattctacatggcaaagtgaaaagtattcataaagcacttgtgttacataccaaaatattttcattgtttcaaggaaaagtactgtgtgattgagttgcaagctgaactagctgcttttttcatggagcaccatttttttcttgtaagaacaattaatggacaaaccataatattcagttttatgcatctggcactcaaatatattagttttgttgttactattaagtagttattgcccctatatatgtatttcaaaaaattatttaaggactgatattttgatttaaaagaaggtagctctaaattatgtttgaagagtgtataaggggaaataaatgtattttattttcctaattatccagttaggaaaaccttatatttaagtgaaagactcaataacatgctatgtctcctaagtaaatgattctaattacatcaaactaagaaaaagaaagaaagtatttacattatacaccattttcttgaaaatgaagtgggcctgccacttcaagggaagaaactgacactatttttttccattggtaaaatgtaagctctcctggtagaaattagaattttgaaaaatttgtgtcctccactatgagctcgacagtttctcagtacttaaagattttttctgatgagatccgtgatgatagtaacaaatgtggtcttgtataatgcaatgtcctcacatttgaaagagctccgtaactcagtaagccgatattttacaaataatgactgaggtttaatgttacaaaatcatgagtaaaagattcatgcaaagtgcatgattgtccagtggattttagtgtaataacatatgaaaagttcactgataaggtttcagattcgacattgcagttaacttttaagaaagtaccacttgtcaagttttgatgtattatcaaagaagactccacagttttctgagaaggctattgaaatacttttcccttttctagctatctgtgaggccagatttttctttgtatacttaagttaaaataacatactgtaatagtaaatccatacattaaaaggagtgccagtcttctaagtaaatttattacgttttggaaaatgtagttaattttctttaaaatatgttatttacattaacacataattggcttattatttaaaattaatttttaaatactttaaaaatttatcagcttcaatttctaatgccataaataacaatggatattacctaaagaaacaaaaagctctctgaatcctcagtcatgtttaagagttaaaagggtttcccacatggaggtggggatgtaaatagaagattcttttctttgtaggccaggcacagtggatcatacctgtaatctcagcacttagggaggctgaggtgggaggatcacttgagtccaggagttagagactagcctgggtaacaaggcaagaccccattgctaaacattaaaaaataaaaattaagaagtttttttaagttgacaagattgtatgtatttatactgttgtacagcatgatgttttgcttacagtatctttagttggaacagaaggctctcttctgaagcaataatgctcaataagagaggctgataaagctaaattatagaggactttgaattcaaggccaaagaatttggaattttatactctaaagagctaagcatcctttgaaatatttgttggtgagttgaaagtagagatttgagcaaatagctgagtggcccactttattactatattagtcagctgtagattttataaccctcctcactggaaagcccctgttgaccattatgctcagaggattttttttttttttttttttttttttgcttttctacacaccccttctctggagtttaagccaatttttctttcacttctctattatcaattggtattgcccattgacttctttatctgataacagttgaaggtgccttgcagattagtgatgcactaaaacgtagccaagaaggtatagcccttaacagtgggatcatttgcccaaatgagtatttctagaacataatgggaagaaggggggccacagtctatcatactatgtattgttgggctatattaccttcagcccacagtgtaggtgtcattagcatgttctgtttccaggctagatgtagaggtcttggactacggaggaatttattcattcagccatccacttttccaagagtggctcttatttttccctcaaagtaataaaaggcagggtacattgagcctacataaaatatatatatcctgtatcaatttacccttaaaaataattacatctgtcctttagctccaaaattttgatgtctatgagtagtttggcagtttccaagctggatccataaggaagctatcacctggtttgagaatgtgagagttgccacagaaaaccaaatttagaattatgcatgggtatttttgaatagagaaaattgccctttggatcatataagactcaagacatcctttcagcacatgttaatattgctaactccatgactgttgcttcttctctttgcatgccttggtttatttacttacctacttactcctaatgcccaagggaaactaaactaaaaaattgctaggcgcgttaatgctgtgctccgctgccccttactgctctcacagcttagggcaaggatgatgaagtagtaaggattatttaggggcaatttttttaacctgtttacatttttcataaatactttatactacctcttgaaaatgagtaaactctgatcagaactgatgaagtttaaagctaaaaaacttttttttttttttgagacagagtcttactctgttacccaggctggagtgcagtggcgtgatctcggctcactgtaagttccgcctcccgggttcacgccattctcttgcctcagcctcctgagtagctgggaccacaggtgcccaccaccacgcctggctaattttttgtatttttagtagagactgggtttcaccatgttagccaggatggtcccgatctcctgaccttgtgatccacctgcctcagcctcccaaagtgctgggattacaggtgtgagccaccgcgcacggcctaaaaagcatttttaaaagcatcttcttttacagctgaggtcagtggtgttaagtgatttgagcaagttacagctagctggttacagagctgggccttaggaagtctgctgtcagtcaagtgcttttttcctgcttctccatgcaaatggtgatttaaaaaaaaaaagacatccatagagagtcttaaccatcttagcttctacttactcttcaacttttaacctaggactctagcttgagcatactaacaaatttctttcattctaaatgaacgttaaaataatcactcaggtataaagttttaaaaaattgaggtgatattctgtgtgcatgtcactatttatatgttacatataattttatacaattcttactcctgtttaaaaaaatgacttgctgtggtttttgtttcacagcgtgacactgataatcagtacatgatcatgttacatatacaaatgatgcctttcataattcctttttgtggcactttgacactctgagaaaatggaatcacatattttcagaagaaatggaattactcgtttattaaaaaaagttagcttacatttgaatgcccaaacaggattagactctcagaattcagcttgtcataacagtgttcaaatgcacagaagaaatgtttaagcatttctctttaaaataaatctaaaagtaattattcttaaatagggagttgctctaagtaaatgtaaattcacttttctgtgtctaaaaaattgttttggtggtgatatttgataaaataattttatattcaattgattataattgtcttatatattattttagcaccatgaagtacattgatttttcagtagctaagcatgtgggctaagattttacttttttgaaaaatattttatcatgttattgcgtttgtactctgtgagaaggaatgcatatgatctaattccaccaagttttaacccatcaggaactccatcgtaaacatttttattcattgatttatttatttttgagacagagtttcattcttgttgcccatgctagagtgtgatggcgtggtttcagctcactgcaatctctgccccccgggttcaagcgattctcctgcctcagcctccaagtagctggaattacaggcgcctgccaccacacctggctaatttctttctatttttagtagagatggggtttcaccacgttggccaggctggtctcgaactcctgacctcaggtgatccacccgccttggcctcccaaagtgctgggattacaggcgtgagccattgcacccggccccattagaaacattttcaaaatgcttagctaggcatggtggcatgcacctgtaatcccagcaacctgggaagcttaggcctgtaaatctcttgagcccaggagtttgagaccagcctgggcaacattgggagaccctgtctccaagaaaattaaaacaaaagtactttaagtgctaacaaatctggttgatgttctaacatggattgtagttcttgttttttgagatactatgcaatggcataatgaaaagtatcctggccaactttgtaaaatattgtaaggaaaaactgaaaattttaaagtgtttttatttttttaaaaaggctatattgtgtttagggagtgtgagcctgtaaatcaggttgcgctggttcagctctcagctccttctgttgactgaatgtgtaaccatgagagaattagaactccaatgctcattttccttatctgtaaaaatgatgataatagttccttccgcctacggttgtttgcaagattagatgagaaaatgaatatcaaatacttagtaggctatgatgtttccatttcaattcgttgaatattaaatatgtcataatcttattttattcaaatttaaatcatttagatttgaaatctgatataaaaagttaataatgtttcacttttgtgcaaattttgattcagtgtgaatctctgcaaatgaaaattttgttaatagttgcctaatttctttttctttttcttttcttttcttttcttttcttttcttttctttttttttttttttttttgagacggagtttcattctgtcacccaggctggactgcagtggcataatctcggctcactgcaacctccacctcccggttcaagcaattctcgtgccaaagcttcccaagtagctgggattacaggtgcccactgccacgcctacctaatttttgtatttttagtagagacagagtttcaccatgttggccaggctggtctcaaactcctaacctcaagtgatccacctgcctcagcctcctaaagtgctgggattacaggtgtgagcctccacacccagcaatagttgcctaatttgaaagctatttgaattgcatggtaattcacatggcagatgtactttgagcagttaatagaaatatctactgacctttgataggcttattcttgaatgacacatttttcagaactatgtcccttacactaaatgttgacttcataatactgtgaaaattacctatttgagtctatggaaagtattcatttacataccttatctgaagatcaccaccccctcccattcgaaataaatggagcccaaccaggagtgattgatatttttgttcttaaaactgtaatgtcttcagagagagtgcagtaggagatgaagctttatatgattggttttttgtatgtaaaataatgagagttacaagttaaactgtttctaattgtgaaatggattaatagtaatgttagatttaaatgtgggtttttttcttcatcaaaccaataatttgaaatgaatgtactttcagtctctttctaagtttcataagagttccaatcacattttgaatacaaaacataaatatttgtttacactcgtgcctgtatataatcattaaaccagttaaacatttttagtgttttaatatttaagggtttagaacctgacatcctaaaatattttcttctttttttttttttttgagacagagtttttgctctgttgcccaggctggagtgcaatggtgcgatctcggctcactgcaacctccatctcctgggttcaagtgattctcctgcctcagtctcccaagtagctgggattacaagcacccgccaccacgcctggctaatttttgtatttttagtggagacgaggtttcaccatgttggccaggctggtctcgaactcttgacctcaggtaatccacccacctcggcctcccaaagtgctaggattacaggcatgagccactgcgccaggcctacttttttcttttttaaaacttgtaattttttttctagcttgcttgtttccttgcttgctttttttgtgtgtgtgtgtgtttgttttttgttttgagacagggtcttgccttgtcgcccaggcaggagtgcagtgatatgatcatagctcactgcagccttgacctctcatgctcaattgatcctcccacctcagcctcccaagtagctgggagtacaggcttacgccatcattcctggctaatttttgtattttttgtagagatagggtttcaccagggttgttcaggctggtctcgaactcctgggcctcctagagtgctggaattaaagccagcctgggtgtgagccattgcacccagccaaaacttttaattatgaaattattttagattcacagtaaatttgcaaaaatatgcagaagatttctgcatacccttcacccagttcccctaatgttagcatcttacatagctatagtagaatgtttgaaactaggcaataagaaatactgaatactgatatagtgctattaggtaaaatataggccttattttaaatttcattttttccagtaatgtctttttctctattctgaatcccatactgtagttagttgccatgtctccttatcacaaatattttaataatcctcaccttatatctgaggtacttctaggctctaaagaacagaaaaaggaaaaaattttgtatttatggacttgccattagatgataaccacatctcatttcctacttcatctgcttattctcccttaaccttttgtgtttgcattggagaatgactataacgtaggcccttcttcacttgaaatataaaagttattttgaaagcaagcaatgtttcctagaatatacatgtcagctcaaaacaagcataggctatgttgccctattttgctgccttgattaaaacatgtacacacagtactataagattttattaaatagttactattagatccagttttgaatacatgagattaattttacttacaccacaaaaatttcaaaagttcagaaactggtgacatcagttagaagattggaagacttttttgaagaacctgacttgctcaagaagacttaaagaacaaattgcttacctaacaacttagaatgaaggaatcacaaagtcccccaagcctccactccacccactcagacttcccaaattttttagctacctgccacctaccccctcaactcttaagtcctgaatagacaaccaatgattactaggtaccaggaaagcccacaacttggaagatagataacaaaaagaaaccaaaacaacaaccaccaccaccacgttacagggagtaggacctttcccccacaattacatttatatgctcagagagagaagaaattgtattaacaggaatgaaatgctagtttgggggatgggggttgagtttcagaaaaggaaaatgagtccttgaaattaaaaacatggcaacaaaatgaaaaactttatctggctgacttgaagatgaaactgaaaaaataaaggtctacatctttttctttttttttgagatggagtcttgctctgtggcctaggctagagtgcaatggtgcgatctcagctcattgcaacctctgcctcctgggttcaagcaattctcctgcttcagcctcccaggtagctgggattacaggcgcgcaccaccacgcccaactaatttttctatttttagtagaaacagggtttcaccatgctggccaggctggtcttgaactcgtgacctcaggtgatccacccacctcagcctcccaaagtgctgggattacaggtgtgagccgctctacctggcctacggtctcttatccacaattccaaaatcccaaaagttctgaaaattatatttttcataagtttacaacacaacctatttctatcctttatagattttgctaaagaaatatcactgtctcagatctcattgtatgtgggtgggatgaggggtgggtattacattatgggttatattctatattaactttctaaaattctaaaaattctgataagcatttggccgcaaaggtttcagataagagattaaggacctatatcccagaaaaatggagcaaaaaggcagagatgggaaatacaagagaagagatgtgaaaattagaggaccggtccagaagatccaataatacagcttcccgaaagaaaatgtgtagcgtgagaatcatcacccgataacacaagaaaacttccaggactgaggacattaattttcatcttgaaagagaccacagaattctccacaaagtaggtgaaaatgaaacaagtccacactgaggcatataactatggacactgttttagaacatcaggtgtatttggatagtcctacaagctgcaagagagaagaaaaaagtcacatacaaggagatgggaatcatgccttcagatttctcagcagcaaggctaaaagctagaagacaattgagagttatcttcaaaattctgaagggatttttttttccaacctataattctgtgaccagccaaactatcattaaactgggatggttaaatagatattttcagccatgaatcagattctcaaaaaatttactgtgctaaactgaatttcctattttgctttttttctctgttagcctcaaagagatgaaaataagaaatgaagacttctattgggggacgggggggaagaggaaaaataaatattgaagaaagtggataatccataaatcaaaatatttctgaattcattaagagattccttagtatctatatcagagtcgtatgtgtttaatcttaatctgatagacttggaaagttatacttaatcttgtgtcactcagaattccctttagattatgacagaacatttgttgacaatgtatagttaaaatatttccattgtatcatagaagagtcagaaaaatcaatcaatttcctagttagaagtattttaaaaatttgaagtcatcaaaaaaagaaaacatttgtagtcctcatttctaggatgagattctgagacttaaaattctagtttgctattaagtgtaattggtgccgacctcctgtgcagtgttgatggctagctcagctgcaccagggaagatgagttgtttgaagggtagatgtataggttttagccatatgattgcatcaggccagcactgccgctagtcctcactctaaactgtcggtgaacggactccatccagcctcttctgttttatgccttgcccagtggatacgttaggtcggataatgaccacaaaagggaaaaccacaaccttggaaagttgtttatatggtcagtaaaggtgctcagcagctagcaagagaaaataatgcagaccagtgctgttgtagactgagatttttcttagatcaattttaactgtccacttttcacaaagataagacttaaaaacttttatttccctttttctctctgatttatatatttcagcaattagtagtctgtattgggataaatttaaagtgagaatgtcccagttgtgagataagatctcatttaagtacgttaatatagtatgaccaatattttctattcctatttctactctgtacagaaaaccacttttaagtccctgtatcagtttagtagttctttggcttttttcctaattaaatgtcagcatccctttgctggttttcttttctctccctttcctttccctttctctgcatagcctgacctatttctctttcctcaaggtatagaacctagccaggcacagtggctcatgcctataattctagcactttgggaggctgaggcaggcagatcgcttgagctcaggagttcaaaccagcctggcaacatggcaaaaccccatttctacaaaaaatataaaaattagtcatgtgtagtggctcgcacctgtagtcccagctatttgggaggctaaggcaggaggatcagttgaacccagaaggtggaggttgcagcgagctgagattgccacactgcactccagcctgggcgacagagggagacccttactcaaaaaaatttaaaaaggtatagaacccatgtcacctctagtgtagccttccgtgtctcttacccatgcctgtctccactcccggagactcttgctgcatgagatgagagtcctaagaaggtaagagaggggtggggttcgtatgggttctcgtttctaatgagaagaagagaggatgggtacagtgctagaaaggaagtgatttcacatatgaaattgggctgcctagttttgaattcctagtctgctgcttactgtgtgaccttggacaactaactgaacatctctgcacttagcatcttcctctgtcagttggagataatggtagtacctgtttcacagagttattgtgagggttaaagaaaataatatatgtaaagtacaatataatggctaagaacatgcactccaggccaggcgctgtggctcacgcctgtaatcccagcactttgggaggcctagagttagaagtcaggatcctcgtgaccctttgccaggggaaccgtgactggtgggggccccccagggtgcttctggtatcttgtttcttgatctaatttggtggttacatgggtgtacgtttcattgtgaatattcagctctatgcttataatttatgtatttttatctatgtatgttaaacttcaatttaaaaattgcattagatcagaagtcttgagaatttaggaaatgataggtcacttttttctacatggcagatcgacttagaattaaagatttcatacttaaaaacaagggggacgggtgttcactacaagctgcaaaattaaccagtcttgcttctgatcttaaattgtgtcttcagagaagcaaagaactatgaagagctacagataagcaccttgggcaacatactttgaagtaatcattagttttcatttatcctgccacttcacatacactgtgacagattacatgggctacatataaagttatatgtaaaagtgtaatttggagtttgtggaatcagtctttttaactttcctcagagtgatacattgtcatcttgcagaccagatctggtggttttaaagtttgattgaagataaagtttcatgtgatccaactgtgagatgttaagaggcaagtttgaaggtgcttgaatgagcattagttgtaattgatgcttgttgctttgactgcgtgttggtttgcttgatgctgttttagtaacttagtgagtttcatctttaaatgggatttgtgttacttagtctgcattgtgccaagactgataattgaaaaccgtacactttcacagaacattgcttcatagctcttcccttttctgctatttttatatcacatgaatcattgcacatttaagccatctgcaaggcctgaatggaatgagataaaaagctgccatcacttaaattgacacttgaaaagctgttattcatttggagtttattcctgattatcctttatattttaaagtttcaaacttcatttcaagatggttgccaacatctctgagccagaagtatctctgattcacagcttcttttagcctgaaagtcaaagggaggggatgcatcctgtcacctagaagaatctgttggggactcacttctatctcatttgagagaataagaacagcaagttccactcctgttttaaaagtatgttggtttaatcagctcagcaagccatcgggtttggcatgcacttcatagggaatagtaaaaacacaaggctcttcgattgccagatgaatacttcaaaattgcatgcctagaatgtgtcacacctgttagatacttatcaaaaattttctcaacataacttttttgaggatttagtgaaaaaaataattagataaatgcatgctgggatgttgcaaaagagattcatgattaaaaatgcatattcagccgggtgtgatggtgcgtacctgtagtgccagccattcgggaggctgaggtgggaggatcacttgaacccaggaggttgaggctgcagtgagttttgatctcgctattatacttcagcctgggggacagagtgagacactgtctcaattgaaaaaaataataataaaataaaaataaataaatgcatgtccaccctttgcaagaggcctggagtgggatcgcgccctctgtggagtgggtcgccacctctgtcacggtcctcaaaccctgccaccgccctggcctaggagcctgccccaccgcagcggccggcaacgcagcaatctgccggcggtggtcgcggcccccgggccctctcacggcaaccagctgcgggcctcccggggcaaaagcccatgggccaccaccatggccctcaagatggtgaagggcatcatcgactgcatgttcgacaagaacctgcaggacttggtccgcggcttctaaaaccacaaggaggatgagattgaagaagaatggggatagtgaccaccaagcatctgtcttcattgaaggatgcccatgcagcccttgggcagtggaagccttagaaagtcttctacctgaatgactgcctgactgcctgcctgcctccctgcgtggacagcaaaggctggcctgaaggagagcagctgtctgataccgcaccactcccaataccagaggctatgtcgggcatgaggtgccaggagggcagggaggttaaggaatttgcctgcaggcacccagtcaccctcagcccatgtgcctctccgtgggaacctgagttcttgccttattgttacacttttccagaagtggtgtgacttcgcctgcctctggcctaatgagatcatttttgttcatctccatcccctttcccttggttttcagcatatcagaagctctccctaactgctttggtgacaatgtgtaactaacttatgtactcttcagattcttttgagttgaaggcatagctgattggcctggattttattttactgagcgtgattcaccagattggaaatgtggtttgcttcctgggaggactttttctgcacaggcaggatctcccagtgcccgtccctgcccgcttcagcgcatgtcactgagcagcctgttctggcatcctgaggacgggccacggggtctgtccagcagaggaccatgcattgtagtctagggtgtggttttcaggggggtgtgcctgtcttcactgggaagcccctgagcctggatttcttcctttggaattggtgtgagttgatagtgccttccttacaggcatgggcccattcaagcgggtattggtggtggaaacatttttagagtagtgtggggccgtccttgaaagttccaggcttccttgtgggccctgctattggccaatcagtgattccatgcaggacacgtggtgtctgggggccctggctttctcatcagaagaccatctttatggcccggaaggtcattattcaggtgttcacttctgattccggatgttctctgcagctgctggagtttcctgattggagaacagcaaatgactgttcaatgaccattctagtggtcaccccctccacgctgtgcccccccaaactcgcttttgaaaagcagctaccctgtagacctcatgttgtaggtttttcccacccaccacacccaaaatgcagactcttggcgtgtgctttttctgcagcagtatagtttcaaaaaaaagtttttattttgtaatatattttcacttaaaacttgagtgtggcatcatggaaacaaggcttagcaatgattttaaaagccacgtggaaaggcagcgtgattgagtggaaatcagatgaagtttgggagatctgagtccaggtgctccgactggcttaatggggtggcccacggagagctccctgttctgtctcctcctgtgtaacatgggaacatgggatgagttgcctccctccttgtggaatggtgctgaggatgctgcagcaaaaacgtggttttctggaagcaccagagtgctcaaagaggttgtttagttcactgttttccggtcctcaggctgtgacctcttagtgggttgtaaattcaatttaccgggttatggtagttaagaaaaaggaaaacaaactagaaaataacagagtgcaggcacatacagtagctgtcctgtcttgaaactttgatttctgcatgtgattcttgtgtgcatgtgtgagcgtattgggttaccatgcacaacccattaaaatgagtgcaaaaagtaaaaaattaaaaaataaataaataaataaatgcatacccacactcatttatactctttaactgtgggtatgtgcaaatcttgcatttttatgctaattagcagatgagtcagggtctctaaagccttttccaacagttagattctctcaatgcagtttgctctgggctgcagaaggttgggttcccctgtactaaagttagctggaattgcataagttagggaggagagtacagatttgtttcagagtaagaagcttcttggccaggcacggtggctcacgcctgtaatcccaacactttggaaggccaaggcgggcggatcacaaggtcaggagatcaagaccatcctagctaacagggtgaaaccccgtctctaccaaaaatacaaaaaattagacgggcgtggtggcaggcacctatcgtcccagctactcgggaggctgaggcaggagaatggcgtgaacccgggaagtggagcttgcagtgacccgagattgcaccactgcactcgagcctgggcgacagagcgagactctgtctccaaaaaaaagaagcttcttcagttgttgctaggtctttcctcttcataaataatatcattataatactttggcaacatagtagtagtaactctagagctaatagagggaatgaaatataaaaatatttccttatttcatttccttgagagagcctgagatcatagaccaaaaaatgaagtgacctccataactaagtacaacagactctattttcaaaatagaaatatcttaaaaatagaaagttctaagagtctaagaatgaaggaactatttttgtatcttcagatcctaatgtatctccatgtgatcttgggcaagtcacttagtacttccgtgttcgttagctcccattttgttagcatactataaatactcaaaacaccaacattttgtttgtagacggtagcatttagaacattaatagcatctttgtgttttgttgttgctgctgttgttgttgcttttgtctttgaagggactactgtgatttttgcttaaacataccctgtttggggatgattgctgtggggggataactttaattattttaaagtaattgtgtatatttttcattctttatttctttgcttagcagacagaaggtggagcacagacagacggccagcagtcacagacacaaagtagtgaaaattcagagagtaaatctaccccgaaacggctgcatgtctctaatattcctttccgcttccgggaccctgacctccggcagatgtttggggtaagtctctgaagtctttttatggattttacaattaaagtagattttaatcccccagatgtgttattagtcattattactttaggattaaactacaaatagattgaaagaacctgaggtaaatcagtcttttcatcagtctttagaagcctttttctgtcatccagtctgctctagacatagtcttgcaggtggctgcacacataaggtggcgatatgacccagcttgctgtgactgaggggtttcttgtgatgtgagactttcagtgctgaaaccaggatggtcaccctactcacctaccaaactcagtaaacataccaataatatgcttagtttcatctgcaagaacaaacatgcacattcttttagagcaatgattcctaaacttgtttgcacactggaaattacctgggaagcttaaaaaatattgatgcctatgcctgacattctagggttgtgatttaattggcctggagtgtggcttgggctttggtatgtttacaaaatccccagctgatactaatgtgcacataagtttgggaaccattgcttattcatcctgtcgccttctttgttttttctttaccttccatataagtccagctcaatactgccttcctctcctcttatctccctcaactccaagaccaaagaaactaggttcagggatgcgttattgccactctctacttagctttgtaatgtctaaaaagattcacaatgtagagaatacaggtttagaggtggcttattgaagtggaaagagtatagattttggagtcaaagagcctgggttcaaattctattcgcatgtgaactttggaattcatgtaacctttttgaatttaaatatcatatttataaacatagagacagtaatgtctacctttcagagtgttataaattaaatgaaataacatttgtgaaaacagtacctcagtgttttgtttttataatacgttgttgctcatactgcacagtgtcaagaccaatatctaaaatcattgtagaggattggtttgctacctctgatgtattctttcaactgtttatttcctcctgaatcacyatcatgaaaaaaagttaaattgcaaagatttgagttgttgggaagttagtgaatggctgctaaggatcttaattttttctgagcctgcttgttattgctttttgaatttgaccaaactcttaacccagagataatcaatagtttttttgttttttttttttgtttgtttgttttcttttttaaattccactaggatagctgcctggtactttattagaaaagcagatgctcttctttaagtcttggttgtggccacttcacggtgacaagacactggggcaaaattctgtcatttatagctgactacttggatgtattttccgcactaaagagaaggccagagttgagatttaatgatgttcttgaagtatttgaagagcttttacacagaaaatggtaaccagatattttccattttttctgagaagagagcaacagaaaataaagggcagcataaaggacttgggttacgcagaagaaacttctcgggagcatgagttattaggttctctactgaattattagagcttatataaaatcttagtctctggaggtctgtgagaatggagtacattctcatctgccagaagtgtgttttctcttgagtcagagaaatagtgtccattgcagatctgcctaggccagttagtgacttcttgaaatgtattatgcccttctcataaggcataaagtgcaaaagaaataattttttccttaccagagatacctagttgctttattttcttccacattgtgactctctgttacttagaagaacagtaacgttggtaaagagcaggcatccatgctccatttcattagcttcataaacttgacaaatagcttcttttagcctcattcgtcttaaccataaaaggagtgtgatccttactccagaaggatattataagaatgcattagaaaatataaaacaaaacaaactccaaagcaccatacaaatcttagttttataggataagcataaatgccctcccatctaaaataaaacattttcctttttccgtgattcttctattaaaccaaaccaagatgtcttactgtagaaaacttgggttattaatacaagttttttgataaagatagtaggtgattcagtccaatggaacagcatgatttctgttttgctctttccatttttcagttttttttcacatttcccaaagtctggtttgaaacccaagtgaagtagataatcaggtatgactccaatactcagagggaaatataagccaaaaagatatctggaaattttctgcatataccttcaattcatttcatccaagcattgattaaaacagttttgtctctttttatatatactttccccctaaataatcattgtgttttgtgtaaccctctagtcagctatttagctacctaacagtagagtttaggcttcgtgtctttagtttttgtttgcttttctgaatgttaaaatgtttaaagaattaccaaagagagtggttatttaaaatattcttgatgttattgtagaaatattaaagtggtgaatagcatgtagcctatagaagtggtaacacagttatatattgattcggatagttgttcacaatctattgctaagttaaaaaataaaagcaatatatgctttggcaggctgaggcaggcagatcacatgaagtcaggagttcgagaccagcctggccaacacggtgaaaccccctctctactaaaaatacaaaaattagctggacgtggtggcaggcacctgtaatcacagctactcaagaggctgaggcaggagaatagcttgaatccaggaggcagaggttacagagagccaagatygtgccactggactccagcctgggtgacagttcaagactccatctttttttttttttaaagcaaattatagaatgcatctgatgtctatagttacttatctctacatgcctgagggaaagcctggaatgctgtgtactaaagcattacgatgataggattgcagattatctttattttctgttttcccttttccttttgtttatattttctgctttttatatagtgaatatactttgcttgtgtaaaaaaaaggagggtaacagccttctatagtatattattctacttactaggatttgctttttaaatctgagactgttctaaaaactaagagatgtagttaggaaaattccaggttcttgtccacatgaagtatctaatgggctaacactgtgaataactttggacaacagcttccacacacacaggtggataaactgtcagctcagtgacgaggaaaaatcagaaactggtattggaacttactaacaaatacaaacatagaagttaaataagtagtttactgaagaagaaaaataaactattcccatttcagaagataacaaaatatgtggataaaaacctgaccataagtaaacgtttttatttttatctctgcagcagtttggcaaaatcctagatgtagaaataatctttaatgaacgtggctctaaggtaagctccatttcagtgtcaagtgtgcttgatttctttttgagttttatgttattttaaatagcaagtattcagaaaacataagctgttttcaagcctgcataaaagtatcctaattatccaccttggtttagattatctctaaaaataagctaccacatggccaaactttattctgatacttatatgggggtggaagggtgatgaagtaagaagcagagaaggttgagggaagagtgggacgtaaagaacacaggatgtaggagatgacagtgctttatgagccttaaattcggcctcagctttctccgtttaaaggaaaagtgcaaagactaaataaagtgaaattctatgagaattctattctgaattctatcagaacaattcaaccaaaatccaacttcaaaacagcatacttagaacaaatttaatgttttgattattcagttaacttgcagtctcttttgaaaattgtgacaagacttaaacagagtgagcaataactgaggaattcagtatgaactgatttccttaagttctacccacataggcaatcctcaggatgtagagtcacctaaatcacaaatacagtgagttagttttttttgcataagaatgaaagtagtaagtgtgtacttttacgtgtgtattttcctctaaatgtgttctatataagaactgaaatttttaattaaaatttatttcccctattaggctgggcgcagtggctcacgcctgtaatcccagcactttgggaggctgaggcgggcggatcacctgaggtcaggagttcgagaccagcctggccaacatggtgaaactctgtctctgctaaaaatacaaaaattagccaggcctggtggcacacgcctgtaatcccagctactcgggaggctgaggcaggagaatcacttgaacccaggaggcagaggttacagtgagccgagattgcgccactgcactccagcctgggtgacagagcaagactgtctcaaaaaaaaaaaaaaaattatttcccctatttactattttaaattcccaatctgtatgatttagaatttccatgcattaaaagaaacagcaatgtttttaagaacaagggaatggcaaagacttacagtggtgttgtgaaaaaaaaaaaaagtatttgatgaactgaatatttgcacatgttacttgagagttttctcactgcttattaaatgaaatacatcctactgaaaccatcagccatagccaagcctataaatatttaccttgctgttgctactttcatttgttaggttagagcaattttttagttaattttcatttggtcatctctgctgaactttgaaaatagcttttggctatggttaaatctcttaaacatgtaatttgagggaaagctaaataaagccaataaatgagctaatatttacctctccaatttcatactccaaattcaccatactttgggaattgataacagagtttatatacctcctgtccccatctgtacacttaaaaatgtatgtgctgttctaatgctacttattattattcccttcctttgtagaatgtatcaacactaaaagtgtttaatcctgactataacaattatttgttaactattaaaggggtaattatactctaagcttccagttttcagttaaaacaaaaatgattaatatgcctatacagaactttctccagcacttggtaagtattttttaaagtgaagtctattcagactgcaaccagtaaactatttatgcttataatttttctcacgatggatttctgttcctttgttgcattgtttgtgtttattttatgtgatcttttttagctacaaggtgggaaaatgacagtggtttagagataagaagcacatgaatgtaaaataaatatgtggagatttttggccactctgtaaactactatctgaagtagttttaaatatttttagttgttaagtgtatgtacttaaaatattcttaactagaatctaacaactagaaggccaatgtagtttcatcaggcattgaggacttactccttaccaagaaaataatttgtttgaattattgtgaagcaaaggaaattgatctttcttaaggcttctttcattgactttaaggatttgcctgctaccaattctttttcttttcttttcttttcttttttttttttttttttttgaggcagattctcgctctgttgcccaggctaaagttgcattggcacagtcttgactcactgcaacctccgcctcctgggttcaagcaattcttgtgcctcagcttcccgagtagctgggataacaggcgcacactaccacccctagctaatttttggtatttttagtacagacagagtttcaccatgttggccaggctggtctcaaactcctggtctcaagtgatctgcctgccttggcttcccacagtgctgggattacaggtgtgagccactgcatcctggccccacatttttttaaatttacctgatccaattacttctctcatgtaactcatttgaaagtaatgacatgagctttctctttgagaaatctaaaagcataggctgcttctgtcagcttgatgctgtgtcctcactgccccatttttctttgggctgctaaagggtgcacagactgtgtactaattggtaaatgttttaaaaacaaagcatagaattcagaattgccctgaatctgccttcaaggactgatacaaaaccttgtttttgtccttygaagctttcttaactgctacctaaagttatttgctggaatgggtgcccttggaactgttctgaggctcctaatagagatttattttggaatcaaacccatggatgcctcctctgggatccacctaagagaaattaatgagcactttttgttttgtgaattaagtttagtttcttaatccttttatatgtttggggttgactgtaaaattacagcgtattttgaaaataaccagagaaaaggaggctttatatagtcctattgtttagctaagagttcctctaacttttaaacagagtgcttttctgtacagaaattagctttattgaatttttttagagcagtaatggaaaaactagtcacaaaataactctaagatagcaatacttaatgtaaaacagggtttaatcaaattgttccaaagcaaaaagcaactccataccatatcttattttgtataataagaccatcacccagggttttaggatatacccatttgaaaacataagtaaacggtgttccactgccatgctcatgccctccttgtctgccagtattcttctttttccagcttgcctttaaagtagaattactctatagtagttttttcttagttgttgactagttttttccttttttccttcttttgccttcatattctagatttggcttacttagattatagaatgaatatatatcatatttgtgcacacacgtgcatacatatatatttaaattatttcatgtgaattttagtctttttactccctaatcctttataaaaacatagaatcacctgtatctaagtttctttgattaactgaaacagagatagactaggcttttaaaaatgtactattaagatatatgatggaaagtggtattcctgccaaaaaattaactaatttattcatatagaacctagaaaattattatatgagtttatgtagctttgttaattctccagatttcaccagtaatgacagattattaacacaaataataagataatgcctagagtgaccatatttcctggcttatccaggctagcctcaatttacacctgttatcttagcataattattaataaatgacccctttctctctcagaatgtcccagtttgaatgataaactatttactctccttatatawgctttgggtaacatcttaaaaaagcagtctttgaaaaggaaaacatgatgcttaatgaaaagtataaagaaaaaaatacatagtttattaaagagaaatgtgcactagtgatattctcatgtatccttctagtcttattttctcatatagaaccttaaaacataacccaaaatggtcacctagttcagccccctgtattcttgaccttgcattctctgctagaaacttttagtgattaagaacttgttttattcaaaagttattccattgtgggtcagactttctaccatcttactcaccatcatccaaccacataacaatttttggtgataattatcaagcttattaaataaagaaatacacagattgtaacatttacattttctataagtttttgccaaaatactttggtatatcctctattgaatggatatgtattaaaatattgaatatgctgaagttgttcagctcttcagatagtgctcattattaagtctactaaaggactacaaatattatacagcccagcaataattatttagatttctagcaattttttttcttttttaaaaattgatagatattagatgtacatattttcagggtatatgtgataatctgatacattcatataatcaaatcagagtaattgggatagccatcaccttaaatatttatcttttctttatgctaggaacattctaattattctagcaaatgtttacttaatgtgttctcattacttctctcaggtagatttctggaataatggggatctaggtttaggttgggcttaagtttaggctgtagttaggggagataaaacttctattcccattccttagacacaagtaatttgctgtaatgttttccctattatcatggcttttaatttcatgcaaagggaaattatttatttctttcaaaatattatcaaaatacttttttggaagtcacagtaagtaggccttttgactttcagtaaaacttaataggtaatgtcaaagtgaaatggtttttattatatttaaaacagaattaacagtgcatgtgtttctgaagggcttagtttgttttttttttttcttttgttaccattatgggctttagttttatattttttttatttatttttaaatttctgtgttctggccatacccaggagatctgtctgcttttgatttctcccttaaaagttacatggtaaattttctttctcattcttctgagatcgaaaaattcaaaaattatacaaattttaataatatttttacaatgttcattctattgctagttatttattgcagtctgaggccagactaaaaaggtgacagttacttggctcctatatgtcctcgatgatgtaaaggcaggctgtgaaattgctgtcacactttgtagaagttttaactacaaccatacacctaataaatacaccattcttcaatttccagaagtcagctaagatacctggtaaatcactaatgtaacactggtgtgtttaaatgtttaatatagaagggctctgaggactgcaaacttagaggagtataaagtgtagagacctgcattgcccagcacagtggtcacatttagcacttgaaatttggagagtttaaacggaggtgtgcctgtaagggtaaaatggacaccagatttcagaattagcacaaaaaaagaatgttaagcatctcactaataatgttttaatattaataccatattgaaatgttaataatatgtgtttatattgggttaaataaaatacattgttaaaattaatctcacctgtttctactttttaaatgtggttattagaaaattttaaattatatatgtggtttgtattatatttctgtctgcagtgctagtgtagacaaacatgtcaaaatcattttttaattaaaaattaaagtttacttttttaaaatctgattttatgaatagaagtttagataacaaaaattctccatctgtttacatagctgaaatatttcctcttgttcagaatttgagattaaatctgtttgttacagattatataatctatttgttacatatattataccggtgtagactggttcagtgtttgataggttgtatgatcatttggaagctgttctaaggaaaatactttagatttagacataattttactgacttttttttccaaagcaagagatcagaatgaccaacttaatgtcaattcaatttctaagagtgaagtgacaaaacatgagttcatgtaagcagacttttctactgataacttttaaacctggataatctgtgaacatctttagcactgtttctggcaccttttctaaaatgctaaattttattgaagaaatagtatattctaaaaatattttaagatctgagttcatgttactgaaactaaattgtgaatgtgatagataaggaagcatgtttgggttgatggaaaatcacctgtttaaagtttaaacatgagagaaaagtatttaagaacagtacttcaaaaattctagtcatacctctcactttcctaatcatggactttaattctaagaggtatgtattaattccctatgacttctgaacagattaccacaagtcgggtggcttaaaaccacacatttattatcttacagctctggaggtcagaagtccaaaatggctctcacaaggctaaaatcaacgtgttgggttcttcaggaggctctaagggatcatctgttttctccccttttctatcttctagaggctgcccacatttcttggactatagctcccttctgtcttcagagccagcaatggccagtcaagtctttctcaggctgctttactctgattcggactctcctgtgtccgcttttcacttataagcacagtacagtggccacgttggaacactgtattacattgggcccaactggataatccaggataatctctctatctcaagatcattaacttaatcgcatctgcaaaatcccttttgccgtgtaaggtaacatattcactggctctggggattaggatgtggacaactttgggaagccattatttggcctattgcaaagtctgtttatcttcaaagcaaagaaagaaatcttcttacctttatgtttcatattaaagagtcccaaaacatcaacaaggctttcttcctcctatcaccccagggaaaagatgcttataaagattgctttatttttatgtttttggtatcttgattcgcatttcctttggtgtataagcatctttctttataaaacacttttaaaacatttgaaagtgaaattttgttccagaatgttagtcattattgagaaaatcttatccaagcagacatgaatgttaaactttgacatttgctgactgtgaaattgcagtgctcatcataccaccttccattcttttggatgcagttattgtatcactaatgttctttcaacacatttcagaaaagaaggttatggaagatacttagcaattagatttgaaaaaagatagaaggattttaggactaatatagtttagtaaatagaatactgaactgagatttgaaaaggcttagaattttctcaccattagctggatatccttgggtacttaatctcagttcgactcagtttctttaccttcaaaatgaaaccaatatgtctattctttttacttcatggttatatttaagaagaaaaactagtatgtatatttgtatgtgggtgtgtagatatagtcataatgctaatatcaaaaacctaggtcttagttttcatataacttaatagtaatccaactattaatttacaatgtattaatttaacctaagtcataaaatatatgactgtaaggaccagttgaaatacagccaaaatgcccttaaagtgtgatattaaaactcatcactctgtgacctttctttaaaagtttgactttcctattggaggactcactaggattagagaactggcagcttgtcttcagcaggtgctagtgtagatgacaaatggtataactaattattaatgtgcccttttataccttgtggtgtcaaagtggctataaatgttgatatcaaaatttcatttataaaaatatgttcctgttgatattttcaacaaacttacacattctttaggagagtattaactgaaattaccagtagtatttcattccaagcaacatacgttttaaaatctctatcagcttagcattttgctttcaagggtatttgtgatgtccaaattgtgggtagagatcatccattggaattctccaaaacaccacccacccacataatcacttagaatgctgagttatcagatccttcaaaacaatggagttgcttttataaaattttattaagcaacgcgcattgtttaccgtgtcagttaagaacatgttttatatagagagaattgtgctcatgttattaagcagctaggcagaacttcagttaaaattaaagggttctgggttatcctacagtggaatattcaaaaaacgctagcaggacaatgaagttattggcaaatgaagactttgtagaaaatcctaagactttaccactttgcagatataagcagcatggaaattatttgtaaaattatagctgcagagtagaacgataaggacagagcacctagaatgaagtgaatatgatgttttaggaaagtcatataagtatatagtaaatgctcctggtgttaaaattggtagtacgtgaacatcggagtgaaggtagtcaactccctggtctcctgatttgtctacttaatgagttaaagctccactccatttttatagtatcttgcaaggaacaaacaaattaatcctaagtcattataccagctgcattgctgttttctgatatcctttttctactgaatagtgtacaactgatgtcactaatgtagatctcattcccattgcctgttgactgttccttttttctctatatatagaaagttactactacctttaatagcaggtataaacatcaataaatgaataatttaggcaaatttgggttagcagttttctgaaattcagttgaacatatttttactctaagtgtcaatctggtcatttaaaaagggcattgaagaaaagttataattgaccactgcttagtgatatttttatttgcttagaagagcatgaatgctctcctctcccacacccagtacatagaaaattgtacaccgactatgccctaagttatcctgttcccaaaggaattaatagtgataaaagcaacaggcaacgtggggctaaaatgattagacctactttaaaaaaaatctcattatgcaatgttgaacctgaatgtcagatttcatgtagcagttactggaaaataatagatttgggatgtcagagagtcaatttaattaagtcttttttagtattacataaaggggcatgtatattaaattaataacatgaattgagagagaaaggtagggcattaaaaaatcttcagatttttggttgaatagtttgacccgagtaactctgtaccttaattttggtctggcctcatatgctttatgttttattttattattgttacattgctgttaattattattattattacagttctttattcttttattggatttaatttccctttacaaatatgcatggaccaaaaatgtgactttgggagattattgctgagttgttgctgatgtcagtttcatactatgatattttttctctatttaccaagagatcagtatttcaatataacgatgtgcatgttttccccccttctcccgctgcatgcagggattcgggttcgtaactttcgagaatagtgctgatgcagacagggccagggagaaattacacggcaccgtggtagagggccgtaaaatcgaggtgcatgtctttaataattcaatttctggtttatatttttatttctcttttttcgtgttgcctcacttagttcacatttggaaccctgtcttatgtgtgcgtgtgcacatgtatgtgtgtttgtatctctgtcttcttcaccttcttgcactaaaatgtataaaagtaacacttctatctgcctccctcctcatttattggttgtttgggggttttaattttgactgtgtgtgtgtgcgtgtgtgtgtgtttgtttttcatttatgtttttccttcaaaatgttgatctttctgctctcttgatttttttcctttgcttcagtttgcaatactctgaattcctgtgatcaggcctaagcaaaactaatgttaaattgtctaaaaactatccagtttataacactgtgttctataatgaatcaaggggccagccaatatcctctctcttgggaggccagttcgcctctttgtgcacatgataagcacgaaatagaagattctagagattgtggggagggaggaaataatccaaaactcgtgtagtttttaaatatatctaataccaagaattttggtatctaaatttttatggataaaattcttaaacagagggtatgatggctggctggcgaatgtactgtgattatgaccaagtctaccgcctggtattcaccagccctttttgataacacatcgaaggttaactggctcctttcccctttcccaattttttaaagtattaaatgtaaaagccaccattttgagtaagatgtctgcatattttgctttttttcccctcctttccaatggtttagcatttagggcccttcacttgactcactctttccatggtaactatacacaatgctggcgatggtgcccgttggcggtaagtgaacaaaagcactagagaagaagcttttaaaaatgtaattacaaaacaattaaataagaaagaaaaagtccatctgccatctcacattaacactacaaaatgtgatttgacttgttgttcctcttccttttcctttcccccttttattttcaatgctgttgagtaatgccgcctggattttggatgtacatattgttttgtagcggtctgagctgtttgattactgacttcatggtgatttttttccccttgcacatcttactcagagttactgaactccagtttggctggttttattaatgcacttcctgcccctacatccttccctacttttcctgtttcccaaacccccgtttgtagctctgactgttctttctttgcccgttacacccttcctgactttctcttttctttttccctaccttactctctttttccggatccttgttcctgtccctttccctattcttcctttcccatcccttcagttacacgcagctgttggtctcttttgctgactggtggtttctgattggttctggccatttttccttttaagtgcttggttgctttctgctccagcagctggtttcagctcttgctccattctaatccttgtctgtgagaaccttgcttttcagtttctcccctctttccaaaattgattgttttttctttcttttatttgtgtgtgtgtgttttttaactgcatgctctcagtctcatcattgttgtatcccattctttctttttaaatgtgaaacgtttatattatttggtgggcgaagctagagtaaatggagtttcaagctctttcctcatatgggggattatcactgtacaaatcttaaaagacataggaagaggttttttttttagttctaattctacctaaaattggtcttttcataacaaaaatttattaccatacaaattgaacacaatgtaaatttgaagaggcaaaaataagacatttatattttatgcttcttttttcaattggcatgttttatgacctgacaacacagtataagtcaagttctatggtggagctttaccctccttgcaagagctttgagactggttctgtcactgggctgcagtatgctgacatcttagttccattcatcttttcttcagcagcagcatctttgtaacacctacttactctagcactgagaatgctttaaaatatgcagttctgtaatgagggtggagagtaccataaaacaaaataaataaacactttattttctcaattcttttaagtgcctactttaaaggctttcttaaaagctttgttcttaaattgatagaccatgtagtctagaaaattcagaatggtcctgaaggctgtcagcaggggaatcttaggtttctatatttgtttacttacctcagacagtaaaaatctctgacagacatatttaaaatgctgaacattaggacaggtgaaatcagatttattttatcacctttccatcaatctatttcataacccatgtggcaagcctctgttttattaacagacttcaaagtgaattgctaatatagtttcctatttacttttttctgtgttttccttagtgcagagatttctctgttaaaaagatgtccaaagatcttgcaaatgtattttctttggagtactgatatttggaaaccaagaaactcactttactcttgttatcctcatttgataagaactttaattaaaatactatatattaatattttatattgctgtgttaattatttaaatcactgctctcagaaatttacattttaaactaaatactctgttattggatgtgcaactttatgttccctaatgtggtccacttcttccctgcccttttttctccttgttatttttaggtgaataatgctacagcacgtgtaatgaccaataagaagatggtcacaccatatgcaaatggtaagaaattataatcttcgaaagagtgtttattcttgtgtaaatatatgaagtttttataaacttctaagaatgtctttatttccgtcttaagacagtttgatttgtgttgaagtagtctctttacctgggagagtattttatttttacagaataactttgtcattacaattgagctaagtttttagttattaaggtgttatgttctaagtaatgttcatcttttacacagtgcaaacatgctatctagttgcctattaacccaaattggatcccacctgagcaccttctttttcagctgctgtagctctttctaatatgttagacttgtccgtaatacccctggatgcccactgactcttacttttagttctgactttcattcatctgagcataagtggaataaattaggaggatattttaatcacttttataattctggacctgttgctctccttagccctagagataacagccatgggtatggttgtgtgtgtatcattttctgtttcatgattacatattatatagtaaggtttataagtttttctcattgagaaggaaattttctatgaataatttgttacatcagttaccaaatttaatctagactcatggtctctgaatgagatggaatataaatttaatctgtagcccagtggtggttttgcagactgttctgcagagccagtttgggagagaaaaaggaaaccaaatggattgaattctgaggtctcagctgtactttagtctgagcaattagggttctgcataagcttttactaatatctagaataaaggggggagtttctgctggagtttttttttttttttttttgagacggagtctcgctttgtcacccaggctggagtgcactggcgcaatcaaggctcactgcaagctctgcttcccaggttcacgccattctcctgccctcagcctcccgagtagctgggactacaggcgcccgccaccacacctggctaattttttgtatttttagtagagatggggtttcaccgtgttagccaggatggtctcaacctcctgacctcgtgatccgcccaccgtggcctcccaaagtgctgggattacaggcgtgagccaccatgcctggctctgctgtttttttaaaaagtttgaacccactgctagagtatggctgtatgtgctaataatgtcttaaatcaaggagaaatgtatccgtattgactatatcccataaagtcttcaataaatatatttagcccagcttttcacatagatgatacaaatttatcagcataatttgcatttttccttactccttttatcggtatgataccactgcctcccactttacctcttattttcttttcactgctcttacaaaaacaagtctctacaattttgataaaaactcaaagtaaacaaaatagaaaggagaggcaaagaatgtcaaattttctttacatctaagggaaatattgtgacagaaagagcctctgactggaattcagaaaacagacgttctccttctaggtttgactctttatttactccgtgacagtggaccagttttttaacctaattctgttttcatatttataaattgagaccacagatttttggcaccaggattttttaagaaattattgaaactcaaccctcccagcttattattaggaaatgagacccagaaaagtatagtattgacctcagattgcagatgtggtatctattttaccttcctctttgggttttgtgaaggtcaaagggcatctgtgaaaatacattgtaaattttctaaaactaaatatattcaaagtattactaacaacatgtcaatatacatccattatattgatttttgtttttgttttgaggcagagtctctctgtcacctaggctggagtacagtggtgcgatctcagctcactgcaacctccacttcccgggttcaagcgatactcgtgcctcagcctccagagtagctgggattacaggtgtgtgccaccacrtccggctaatttttgtatttttagtagagacgaggttttgccatgttggccaggctggtctcgagctcctagactcaggtgatccctccgcctcagcctcccaaagtgctgggattacaggcttgagctacggtgcctgcccattatgtggatttaaagggaatgctcaggcaatagtggcattggtaggaaagaaaaaggttattttttaaaatattattctaaattaatattcaggtttagtaggcaagaaaccttctgctattgtgttaaaggtcctaagaagaatttgttgggttcctcctaatgaattctcagtcagcattctcatttaggttggttggaatctcttaatttgtgcagaaatgttgcacagtatttgtgtaatttgatgttgcagaatatttgtgttcttacaattcaagtaggatttgaacctagattttgccagaattttatgtggaatattgaagagacattgcattttatgagcacataaaatgatgaataagagattggattgaatcagagtgaataggttttcacttgaataatgtcttgcttacagtcatttaaatctggtaatttcaataattcttttgaaaaggccaattgtggctggacgcagtggctcaagcctgtaatccccagcactctgggaggctgaggcgggtggatcacctgaggttaggagttcaagaccagcctggccaacatggtgaaaccccatctctactaaaagtataaaactagccaggcatggtggcacgtgcctgtagtcccagctacttgggaggctgaggcatgagaatcacttgaacccaggagccgaggttgtggtgagccgaaactgcgccactgcactccagcctgggtgacagagcaagactctgtctcaaaaaaaaaaaaaaaaaaaaagaggaggccaattctggcctttttcttttcattcgtatatttatagaatagtgtggcacaatgctagggtcttaatataaaaagacaaatgagtcagaaaatatataatatagagtatttttgcttatatgtaaaattcagttaatattgattaaagttttcatgtggaattctacttttattcactcgcagtgagcaatcgtatattattcctttttaaaaaatacttgccatattcctataaatataaaaaagggaaagaagaaataaagttgacattaaacataatgttatttggaaactcttaatatttataaatatttaagctaatgttccacagtattctggtgttctttagctaagaagtctgattaacttaaaggtgattattacacattaaagcctcagaaaacatgcactgaagttgggaatgtaccttgaattttactatttcatgtctttccttttttagttggtgaaccccagtaaaatcccaatggtaaatccgagtaaaagtggatttcagtttacctggaataccagcattgtatagccaaacatggagtcaaagatctaggttgaatttgagttcagcccatggatacctttattaaaacaactagagtaataaacagggttgagaaaatgcatcacagcatggttcagagtgacatatagtcggccttctttttttaaatgaaggataggtcatccagggtaattctgtgagaacactttaccaaactctaggatttatttctatttattttttctcctctcattccctctccatcttcctcctcccaacatcatgacacctgccaagccccccagccccagcccctcattatctcttcactgtgtcctagttctactactgttactctctcatataaaccccaagctggaattccaaagagaagttgataataggcaaaaatagccccagagatggctgaagccaacttgacatgcactgatcatccctttcctcaaacagtcttaaatgcttaccttccattttgtgtgtttcaggttggaaattaagcccagtagttggagctgtatatggtccggagttatatgcaggtagtatttaagtaaatgtttccacttgtgctatttaattgtaatagcatctgctgtttttcaatttgtgactcctttttaatcttcttgcatttttaaattttttaaaaatccaatcagcatccagctttcaagcagatgtgtccctaggcaatgatgcagcagtgcccctatcaggaagagggggtatcaacacttacattcctttaatcagtaagtagcctatgttggcctggcatggattttgactgttgtgagtgaactatcatgtactgtttttttttttcctagtacagtacataactgaaatggaaatttcttgagagggatattaaatactatcccagtgccctgtcctgcttaacctgtgctagaattttcctgaccaaatattaagattgcacaaagcagaaatagttggaaaaggtagagggggtaagggcatatgaagaatattttagtctgtacttgacgataaagaaaacaaaagaagcaagtatgtgtagagcatattatacatttcctctgcgagtcagccacaggttctccagcagaggatcacttagaagtacttccagtattattgattattcccagctctcttgatctctctaagtcattttgacctgagccattttactccagcaagaggtataattaaacaggattcagtggacatggaatcaatgtctctgcatgctttccagaggacagcacacttaaaataggctcttagaaattgtctgcctctttaaaggatatgaggcccctagaaattgtctgcctctttaaaggacagggtaggagttgtttccctcaccttacatttgtggattaaaatgttttaaataaaagaatgaaattgactaatgaaatgaaatgtctaaagactattatgtgccttagaggttggtaccatgtaaaaatataaaaagaatgttcttttgagtaataattattatgtggacatagtaacattgggaagcaaggttaataactgaccggttgaagagtttgtgtcaatctgatttagactgcccacagtaattaaaagtctgtctcttattatggcagtcattctcagagcttcttgacctgtttctcagcagcttgcattgtaaagctgaaattgagaaggaacagagaagctcactcaagatttgtgatgaatgaggcatggaatcttttgcttttgcatgttgggtctctctttccatttcttccccactgagagacccagggtagaacgtttattgaatgcatgccaccttttccaaaaaggtgtggttcgtatctttccatcttttctataattggttcatagcaagttgtgactgtgcaccttctattgaatgcaagttgaaatttctgtcatattttgggtctccctttagttcctggcttcccttaccctactgcagccaccacggcagccgctttcagaggagcccatttgaggggcagagggcggacagtatatggtgcagtccgagcggtacctccaacagccatccccgcctatccagggtaagcgttagattccaaaatcagtatgtttctaaaataagcagttggaccaaaaaagaataccatggccctttcataacttctgggatgttgccgtgtcacagagtaggcattcagtgaatatttgcaaattaacagattagatgacaaaaaacaaaatataccatcatcagaatgtgacaaactgtcaattcattataagtcttcattttggccaccttaagccctcatggtaatggcttaagacagtagccagaaccgtcttgtgtttactagcagtgtgttggcatgaagttcactcagaagcgcacgaatatggattaacattactgcagagaaccaaaagaggagctcaagattgtagtacaagcctgcatctgctgtgttcacctccttatcaccaccccgtgttggggcagaggctgtcacatgtgtcctcccctttggtttcactgcctgggtggtgagcagcagagctagttacccacaatggatttgctttctttgtaggaaacggattaaaagaggttaattctaagatgaaccaagtccaattgaatcaagggagaaagggagaagtaggaagaattaaactgcagttggcttctgaatgatggtaaaacagcgactgtagctgagcatccttcaccgtttgatttttttatggagggtgtctcatgcagtggaatgattccatagcaacaaataaatcctttgctactgaatggggaaaaggagtgaagatggcaggttttgtttttaggggtttctcagtgtcagcctaaaatgcaaatttttatagagtggtctttcatgagtcagttgtaccaaggacttcctcatcaaagatgtgacatttctcttcaccttttctctgccagataatgtcaatatgacatatttttttttgtattcttacggaggaataagtagcagcagagaagcttgttggctgctacttagttaaaatataaagggaaggaacctcctttgtatgtccttttctgacagcaaaattggcttagccttgaggtgtactaatttagcattcattcattcattcattcatagaccaaatggatgtaccattagaagttctccattccacagagttaaaacatttttattagacaaggtatgttgaagtgggcaggctccaaaagacactggaagggaactgcttcagaaattaacttttgtttggagtttgtagacatttaaatcacatgcattccatcatctccatcttatgccattacttacttttattttaatccttttttctctcaacttgacctttgaccttcaacctctgacatctctttaaagaagtgaatatgcagtattatttcatcaagaaatactcaaatgaaacattaaaaggaaccttttggaagttttacacactaggaaaattgtttgtgaaatgtcttccgttgtaatccaagagaatttactgtcatatttgcaaagagagactactcaccagaaacrtgggacttccttattttgtaacattgctgaattactttataaagtggttgaatttagtcctgttcaatgtagtcgtttcagtatattgaccaaacttgagaacccattctctaccaagtctgtgtcaggtatatatttgctcaaagatattttatctttatgtctaatcatatcaatttctgtgcattacattgaacactgatttcccatgttttctttttattaactaaaccacctgtttacatggaagatggcaaggaataagtccagtatttcatgggaatggcctagaattgcttttcagcttagtaaactaatttcatcattaatcattacgtttctagcctccttgtggcatttgatacagggaatattgggattcttctagaacgtagatgaatattcccaataagttatttgacttagggtaaaatgtattcgtgtttttaatgccaacccttctttatagaaggcttatttgtaaatctttgcctatatccccttactaagatctttgaagtttaattaatcaccacttggtctcagtgctttccattttatcagccttctcattttgaacaagttgtttttttccttaaaatgcagctgagaggcagattactttctaatatcagactttaactgcaactggagactatgaaaatgaatgggacttagctaaatgaacatcagagatgagtttgatttgccttttgtgtgatacaagggcatagcatatttggggcattccaaaatgtgaccatgctatcctgtaaatacaaccaaatgtcattggaaatagaattaagaaacattccacctacctataagaaataagttatttcatattcaagttaaaaatatgatttgatgactttacttgtcagcttgtttattgtaacagagaaggtagtggtgaaaatttccagcttgtttagttgaataaccaataaacagatcatctaaattaaaacaatctgatcttgacttcacagagatgaagaagaaagttttatcttttatctctactgctattccatgtcctttggtcccaaaataatgttttggggaaagtctgtataagtctgtatgcacaaaggtacctcagaaggttggaaatctatacttaagaatatagtgttgcttaggttttgttttttttttttttttaaagtcatgcattgtctgtttgctacaaattcattatctaaacaggaaaataaacccttctattcttaaccagctaccttctcagatgtattcttttaaataagacagggtgatctttggtcaagcccagaacttcagttatcaattgtatttttcagaattccatgaatactcttatagtcaaaaaagaacccttaaaatcttccagttactccttcccactctggattatattgttactatctgggatccccactgcacctttcaattcttggaccttggaccaatcaccttaacctttagctcattatctctgcttgtgaaagcaatgcattgtgggtatttttggttgtgttttttttttaattacatttctctgtttactttggtcagaattgattgacttgtttttctgaggtgttgcattggttcttaaaatgctgaataataatactttgcatgcttgtgtgatcagccaaatcttatcgcatgtctaatgtgcagggtaaaaagcaggtgatgtatggatatcagaaaaacatttacatattattacaatactgaaaacaaaatacttaaacgtaatgtaaaaacatactttgcatacaggccctgccctagtggaattctttgggttcagtttttcatgttaaactcctcttcacccctaccctactttgtaagctctttaaaaagaaacttcctcctagggcaagcttatttttaaaaatactccatatacaaaaagttatttccaagccagcagattttggatagatataataggctcttctaggagtgctttttattgtgtgaatcctactttaattaccaaatatccaggttgcgcattctagttttgcacacctttccctctcctcgcatgtcctggagctgtgtaaccttcgtgtgcactttcacattttctcaccaacttgccgaggccccaagcccaggttatgtattcatacatcacctgcctgtgtagagcgcatgtgcatgctgccgtcctcaataaccggaatgtgtttctgttcttttgttttttttgtttttgtttttgtgtggattttctgcagtgtggtttaccaggacggattttacggtgctgacctctatgtaagtacacacactggggccttctcgaccccatcccctgacaagccagcctttttttttctgtttctttggtttggtttggtttttttccttttaatttatttaatttttattttctttttccttgtggatatatatatatatatatttatatatttaagaatgcaagcatgcttctctgccactgcgcttgcccctgggtgcaaaaactaagcctttgggtttcctgatcattgcaagggtcagtctactggacatattcttttcccttccctatacccacagatgttctgtggatcattaatttacttgtgagatgatcagcaggtttaaagtcttttattattgtcgtgtcatttgcatacataaataacaggactagcttaaccttaaaccagctctttcccttttctgcttttcttctcatttcacatccctctttagatcattagagctgtgatttagaggttaataagctttctgaactgtacattttcctattttacctactttgagagaacatgaccttgtgatagccaaataaggaaccgatgccagcaaagagtgtgtagtaatgagaaaacgccagatatttagttcttaaaagccattggaggaaatgagtagcataatcagcaacccagactcttcttacagctatttgactatcatagatttgctgactctactagccatagtaatatggactccattatttaaactgtctagctatcactaaagttccatgattggtttgtcacatattatttaaaatgtggacaaagtgatataattgacaaagtacaagtttttgagttttgaagtcttttatcatgacctctccagatggactttttctgaatgcaagcttgatttagtcgctcaagtcatcaagggaaaatttttataagaaaaacttgtcagcatgaaatgattctgtggggataggttaaaattgtctagaaatactttctccacccttactttccaaaatcaataagaggtcctttttagtgaactgtttccacagtctaccagagattcacaagcaacctaaaaaagttaatgcactttcagaatgcactcagaggttttgcgttttgcaggaagtagagatgggatgatacagttcttcgaaatacaggtgactcacctgtactacttagcataggcctgtaaggtatgccttaatttaataactacttgaaggaacctcagctatgatttggtccaacctcctaacttacagatatatttctcagagacttacccagaactacataaattattaatagtcaggcataaaacccaaccaatccatatttcattacctctctttgtactttaattaaaatccacctctttcctcaaaatattttcaacaagtaatgaaagatatcttttttcctatgttcacagtgaagcttgagaactggggaatctcctacttttacaccagattacatatttctaaatacacagacttacatatgatgttagcatgtacattctcccatatacattagtgtccatattctcatgaaactcatctttgttatttaacttgttttcttgaaatctgatctattagaacaagattttccatttgagttatttcttaaatcaagtttttttctctaatgtgtttcttatttgaggatttatttttcttaaatacaacctatttatgtcttattaagacttgcctactttgggccgggcacagtggctcaggcctgtaatcccagcactttgggaggccgaggcgggcagatcatgaggtcaggagatggagaccatcctggctaacatggtgaaaccctgtctctactaaaaatacaaaaaattagccaggcgtggtggcgggcgcctgtagtcccagctactcgggaggctgatgtaggagaatggcatgaacctgggaggcagagcttacagtgagctgagatcgtgccactacagtccagcctgggtgacagagtgagactccgtctcaaaaaaaaaaaaagacttgcctactttggccaggcatcatcgctcacgtgtgtaatcgcagcactttgggaggccgaggcagggggatcacttgaagtcaggagtacgagaccagcctggccaagatggcgaaaccccatctctactaaaaatacaaaaattagccaggcgtggtggcacacgcttgtagtttcagctacttgggaggccaaggcaggagaatcacttgaaccctggaggcagaggttgcagtgagccgagattgcaccactgcactccagcctggctgacagagctagacttcgtctcaaaaaaaaaaaaaaaaaaaaaaaaaaaaagacttgtctacttcaaacttgttaagtcaaccaacccaattttttaatagttatcttacttccttactttacaatgtaagattttattgagacagatgatttttctgttcctgttaataaaatactcttggttttttttttttaatctactaactggattaccttgctgagctaaacacaagtaattcagtgatcttgctgaaataattttttttgaccagtggccccttgttaatgaaagtaattaatagtaatgttattatttcttagttcttatcttaaagcagagttacttagagaaaaaaaggttggtcactagtgctgaaataatatccatgcccctacatgaaaagcaagaatactttatgaggtaactactgagttaggcctaatacaactgttgcttttaaaactgtgtgttctgtattccacatgtgagggagcaaaggatacttcttcaaaaacacacagacaacaaaacactatcatttttgccttgagtttgttctgcttctctccatacatttcccatctgtggaaatctgtcagcatacatttagttcttatttcctccgaaaggcatattagaaatagaaggaatagagagtttagtatgaaaagtgcaccgaatcggagcttgaagagaagacacaagggaaaagattttaaattgctggttatgcttaagttaaatgaatttaggctattaattgtgcaaggtttttgtaatccctttcacagtcccattcttagacagtgattcctgctagccatttactttctgtttcttttatggcacattcctctctggagaactgatctagcaattctgttcctagtttgtaaaaagacctaccgtgataggatttgggagtgtggcagctagattatgtatccagccctccctcttcttttttggccagtagaaaaggcatagttcgccctaattcactttttaaatgggttaacaaactgctcctaaatcacctcctgtgaaaagcatgcttgcatccaaaggaaagaaaaggctggtgggccccttagtgggctttttgtatgattgttttccttccacagctgtgttttttgaactgctcttcctgtgttctgttatagaatagtcttacaggaaccaatcattagcgctaaaatacctcaggtaggagtgccagtgtgacctgccaatcaatcagattgtggattgcagtgaaaaaattgaattatactaaccattccagctccacgttagagatgggaacagaggcttttttggacaatcaagacttgtgagcgtgtgatctaagccctgctacctcagcagtgcccacagtcacattccgtacataatggcacttcctctaaaattaagtgctcctgtcctcttgacacatatcccagccaggtgtgtaatatgcactgtcccatcactgccacctcttttaatctgtcagtcacatgtacctgtggtatttaaactgtttttttatatttagatcttagcagttggggacattttcttactactataaatttagaaaagagaaaaaagaggaagtagaactgtacaaataggatttctgaatcccacattgggccctgtagtgagataccagttgtaattggactgtgctgctacataagtttgaagttgccttaaaaatctagacatatgggactcaaacattgagacatgcatttcccttggcctcttctcctttcacctaagaagatcagtgagttcatttggataatagcatacttgttagaaggattgctgatagctggatgctaggagaaagaaaatagtcgatggcttttcacaatccagtttatttatgtggctacccagcaagattttggaaatgaactaatttggggagatgtggaataataatgtttgaaaggtttgattattgaaaatcgtctctcatctaccatagaaataataggtggaagacatcaggttgatcatagcaattttttcccttaaccccaattttaaacaataataagataaaatttaaatactttaaaatttttttcataagtacttttcaaaggagacagagctcaatcaaaagcagtgacggtatcaccattattgtaagtttgtgtgttactcacatttaatcagtgatgccattttgccacaaaagaactctataatatctcctagaaccatggttcttagcaggggtggggaggtggtgaggaaaaagagggagttagattcatccaaggataaataaagtgattcctggaggcccagcattaaacccacgctagttggaatagatctctgctctgctgtagtgattttcagcatcacacctgccattccttacccaccccctgccgccatcccccaaccctctgctctattgatctatacactacatgtaggtaacaagctttcattttgtctgctggtcttgaaatacacactctcctcctcagtgtcacataatgtcattgtcttccgggtagaaagaaggtgtcttgacatcacatgctcaccaaagtcctgttttaatgtaaacctaaaacaaaaatataataaaattaaaagctaggttaaaatcaagacaaggcaaaagtctgccagtgtgagattaaactaataaatatgcagataaaggtcagatataggagggattatattctattgtattttgctctagtttaaaacccagctacagaactgtgccgaaagatcatgtggtcaacgtggcaacatcataaagttaatttgatgataaaattggctcagagcagagtagaaaagccctaggagatgacattgagccatgaaaaactgagactttaacaactgcagaaaacactggaaaggatcttaaagccaacttttcaaaggcattttcctttgaagaagctggaacttgaagtcagagataggttacagatatgtgaaaaagtaaaattcctaaacacaggaaatattttagcagaatgctgtggattagaatatacggttgttgacagagggcgagcatacatgtgagtgctgtgggtcaggactgaattatattgccagtgtcaggcaggttgaataggggagcgatgaagcactgggcagccccactggggacaccaggtatcattcagaatgaattgcaaaggaataagaataattctttttaaaggggcatgtgtgtatctgaatcaagcttagccaagccaaatttatccagctatcagagttccaaaaagccgtccgtgtgtgccctcctacattagggtgtgctgtggccatgctaatccccattttttgttttatttcaaatcacacacagatagaatctgcaaactgcttcagatcaaacaggtctgattgtgtgtaaatacatatgtcctttttaatttttattattaatggttgcttcagttttgcatcagtgcatggttaaaagcaatacacatcagctatttcatgacttcatatctccaaatgaattatttctcctctttttttgtttgtttgtttgtgcagtcagctgaagaaatgttaacatctcactctaaatctctcagtggagtctctgttcccttctctgatataacagatgggttactgcttgttataattattaacattgtggtgtgggccagggctagggtgggcaagattgactatttctttgggctggggaggggccagtcgttagggtatggaatgttaactcaagtggtgactgactgtttccgtaataccaggtcgttgtggctgcacgctctagtaattgaggctgtgtacttcaccgagcttgtggtagagcctagggcaaaccgctgtcccaagagaatgctgggatagatagagttagccaatacgagtctgaacgtggtgattttgctggttgtttagctccagatgttggcatgcttagtttttaatgtgattaataaatgtggcgccatatccctccccacgcctgaaccctgtctcttctacctccttcccacccttgttctttttgaaaaacttaagaaacagtaatgaaaaccttggtgtttcaaactgcactttgttctcatgttttataaaagcctttagatttgctagtaagagtgaaagctgaaaaaacggtttctcagcctgaaatttctatgcactttgaaatctggaatagaaataaatatatctgaattttctttttctcacattttgtgatatgttttgttgaataaagcagcaaaaatactttcgagtaagtgtatgtgtgtgtgtgcgtgtgtgtgtgtaagagagagagagaggaatacatccatgatacacaattaatttttctacttttggagtagtcattagtgaattaccaagttagtttagtaggatattgcctatctatcctaaaatagttcatcttttaaaggtttctctgtaatgccattattataaagtaatcaggagaataatcatgttaaagtcatctgctttaaaaaaaactcttcatgtgttttttcttagtgctgatattcttgagccttttgttttcagtaaagtatttgccaaccctgttctgttttcttccacttgaaaagcagagaacttcatcatgtttaaacttcaaagtcagacttgacttatcaaagaaggaaaccgctacagatagattctctccatctccttctggattggaaggaagattcttttccatagtctgatccatttgaattgttttgattagcagtaacattactcctaaaccaccaaggttcctatggcttcctgtaggcctaggaaaatgaggggaaattggttctgtcagcaacctcacttagaacctgttttttaagaatacagcttaaagccatgatttgatagaatactcagagatcgtacctccagtacctcactcagtcttcctgagagtcaggtgtgaaacctacccttggttgagtacttttgaacctcagtatccctttgcaagaatttatacctctgccgtatggcataagacttcagtttttaatttttttacctaggtaaacatgaattgggctttaactgcttttgttgccttaactttaaaatttttttaatgttactttgatggttggagtaatactaaagagtaaaatgctgaattacccttgtttgcaaagaagttttactaaatagccctgctgtaactttacactagcaaacaaattctaaactaatggaaccatctctagttataatgaaaaattactagggttcattttagtgttaaaattccaactgtaattaacatttgctttgtttaacaaatgcttaaaaaaaaaaaaggtaaagaaatactttagttagtttaattatgttgtggccaggatttacagctttgcccagatcctggctagaattccaaggaaccatgttgatcagaaacggcccccaagggtgcttcctgccatgttcccattcattaccatttcattgtcagtgtttggtaatattaattagagtcttcatatatctctggaagaattcgtaattaagaaggaaatgtttactttctaagtcactcatttgaaaaacaaaggaggaataatgtataaccactgaaagccagtcagggatttttttaagtacatttgaaactaccctgacttcaagcagcataaacttgaagagcaggaataaatttccctcacaatgcagtttcttcatttagagaaagcataaattatataaggaagaagcaaaaggctttagaagctcataagaaattataggtatttctaaaataaggggtaacaaataaaagaagcaagctaggacttgccatgcaagatggttaagaagaacaggggtccccttagaaaatagttgttctcaatcccaagaaatgatacagaagtaaatttgaaatttcttttgtagatttagaaaaatcgaacatttgaaaaaataggaagtagaaagcacagggcagaaaccttcagatatccatgagaaatgagcacattttatccacagaaataaaatgtttatgctattgttcactactgaaatgatgttcagttgggccagttgaacatagttgtttttgatagtgaaaggccaataataaaaatttgcatctgaattacgtttaggtaaaatagatgaattctatttcataaataataaaaagtagagtttgccacttttaaaaatatcctgtctcatgtggcaagcatttgttgttgtgattgtctcttgaaatgctttctgaaagagtgcatgattcaccctgatagtgaaaaccttttgtatatttgagttatctaaactgagttgaaatagaaggatgtgatggtttgaaattctttaggactgagaggatatttggactattggaagaaaagctcagagtctactgtaagattaatatgtaagaatctcaaaaccttttagggaaggaaaatgcagttaagtgctagaagcagggttcctgatctatttgaatccagccaaagaatcctcagaaatttgtaattgatttgctcaagtatgaaatgtagatctgagttggcaaactttccgtaaagggccaagtggtaaatatttttggctttgtaggacattggtctctgtcacaagtactttcaaaaacaggtggcaagctgcattggctcacaggccagagtttgctgacccctgatctacattgtttttccttctaaatattacctgattatcttagcttcttggcaaacatgctaggccggatggagcagaggtttctgttacatgctgtagtctcttattaatgaatcaatccaagaacacgttagagaatctgaagtcaacacatacagatttcatatattttaactttataatttatatttcttgtcagagtgctcccaacttgctgtaaatattttcgcttttgaaagttccaacaaagactgtgaagtaagacagattcaaaatcatatcttcattccttgtatttaacaggtactaccaaactttacttttaatactatcacaaattggaaagcaaatccttgcatatcgtagggcttaattttttattggaggaataataacatgcagactgatgcagtttgaaacattttcttcccatgtgtgtgtctatgtttgtgtcagtccctgtgtctacatgtgtgtacgtctgtgtgtgggcgggtgtgtgtttttctgtacacctggggggagaggtatctgtaaagtcagttctcttctctcctgtagggtggatatgcagcctacagatatgcacagcctgctactgcaaccgcagccaccgctgctgcagccgctgcagccgcttacagtgacgggtatgtacagagacagtggtgagctttgggatgcatgagagctgttccatcccaaaatgtcacccattttcctcccttcaccatttccacagcagctcttagcacatcgggcatcttgccagcctgggctttctgcagacctcttgatggcctctgtcatgcctaaagcacaaggcaccgactctgtcctccactccctctttcttgttctcatctcttctttgactttgactccagtccctctcttcctcatctccaactcctttcttttccattttatggaagtacttcagatttttttcagttattgcatttgggagtagaaatagaaaggttttttcctattccttgtaattccagtttccttatgataatccaagaccaagtgactcacaagtcttaaagcacagtaatccytttaatttttttagatcatacacttttctttatctgtctgattgtgtttcttctttccagttatggcagggtgtacacagccgacccctaccatgcccttgcccctgccgctagctatggagttggcgctgtggtaagtatataatataccattgctttataaaaccatttcattccttcttttacccgtagactacagaagatctagggaggtagtaaattcagcctttcatccaccatcaaggtattaaagccacatagatctacctggaagtttcatgtcaccctctttatttgtgtgttattataatgtgagccacatggcctagttaagggcagcagaaaggaatgatcattgataatatgccccgagtagtggcatgatttgcgagagaaataggggaactggtgaatgttttctattggttcaaatgttgagtgcatacctgtggcatagtttcattgataggtgttggcaaaggagcatggagcataaggctgtagtattcacagtaagcttttcaaaaacttaagtttcaaatgcaaatctaaaggatgtctctgctcttcctaagccttctggtagatagtactagaaattcctaagtgaatgctttataggatattttattattgattattgataacaattgtggcaaaatatggtgttgttgatagaagtatcgaagaagtccatagaactagcataatttcttctgaccaaccacctcactgcagtattattgtgttggcttggatgcctccagtttcagtgattaggactcacaggctgcaacaaagacaggccattccacagtgacacctctgccagggctttctctctaatccaaaatgcaactgggcaactacctctggacatgggtagagttgtttgaaaaggagacagaatgaaatgtaaaatgtaagacctaaaggaatatgagaaagctacttctcacaccaaatttctactgatgaagatttgtggaaggaagtaatagggggccctgagggaatatatgtttataaatgaagtagagcattacaatataacggcagtggtagaagtgcctgaggttgtatttcgtcctaaaatgatataagtcctatgctaaaagaatgacctgagaaagatgcattcctgggaaacttctaattgaaagagataagccattagataaagtcatttgataaacataaaggaataaagcctagttaaaaccccagctagatatgtaaatgtgaatatgtcaagaaacagcctagttggtgtgcttcgtagatgatagaggaaacagactttattaaagactggctcaggtttagatgtggcaccatctcaaacatgggctgtgaccacacatggcagggatcgtgtcagaagtaacgtgcactgccgatgggtcatatgtgagaaggagaaactggtgatctgttttccaccaggattataaggctgtatcaaggtaaacaaaaacctgtgcttttaaaaatcaaactctttgcggaacttgttttcaactgtgtattgtttcccttctgtgctaattcatgtaaataatgaaataaaatgtcgtcatactctccttgagaatatcaggtcagcaataaatgtgttgggctctggtctgagcaccttagaagcagaagttggtttcctgacttcactgcacaaggcaatgcttgatcagttgctttgaggcttcgaagcaggctgtttctagatccctctctggacatttttcttcactgttaatgcttctctcatcaaccttttaattatttttatctctttaattactgcaggcgagtttataccgaggtggctacagccgatttgccccctactgaagtgacgtgagacccctgcaaatgggacagccccccagttcatgaggcctggctattgcaatatttactagtagaggaactctatagcaagatgaagaggaaaaacaaacaaacaaacaaaaaaaaacacaaaaaaagaaagaatacttttttatacctcactatgttctttgaatatgtatttttcctttaaatttctgcctttaattcttttgttccaaagattgtgcatttttttctttttttttttaaactgtggtaaaaaaaaaaaaaataatgcatttccatgtctgtatgtccgtgcttagcttattctatcaatcacggaagaggcagtcaaggaggaaggagagacattaggagccgataaatgcatctgatcagaaatcagcagacagaattaccaaagtgtatctggtgctgaatgactgggggacaagcagaagtggaagagatctttctgcaacaggatattcttctagtcttctgagtttctggtctttgacaggcaattctggttggctgtggctggaatccacatgctgatagataggaatttgtgcttacaaagcaggagaattaaaaagacgctttcctctcctcttccctcctgtcttctccgttctttttacaatcatcttacacgcacagcctgagacagctggcatagtttttggaattatagtattgatatttccaaacgtgctctcagacagtggataataaacacctcattaggaaaccgatctcagaatgaactctggagtatgaaaaagatcatttctttttgttcctgtaacctagcattccttctaggcttcttctcctttaattgaaccacagcttagctcatgtattcttttattaacaccctgctctcatgtccataagattcaggaatttaggacccagggacagaaaagtgaataagccagtgaccagatttcccccagatgtcttgaggattagaagtacaaattgttgacagccattaaagagggtgaggaagggaaaaggaatattagaagatctggtatttcttacttttttcttgcctcagaaagtacaaagtttaaaaaatagaataaagaatctgctggggaaagatagagtaccaggtcctaggtcagtagtccctggaagttttggtgatgaggacatggaagggcaggcagaggcactttgtacttgctccaaagccataggaattttcatcttccagagcctttatgagtcacttctctatccacagtcttgagcctgtggctatcccgctgagcttctcactgtcctccaaaaacaccccgctgagcacccggaccactttgtacacattaacactacaggacataaaatgcagaggccctgagattgctgccctcccatattggaaggagggtctgcgatggcaagggtcttctatatcaccagaaagagtcgcgcagtgagtcactgccgttgccatctggctgtaattttctatgttatcaaggtaggagggagtgtttctcttctagctgttagatagaactgataaaagcaagtgtcctacagcatttcccaaatgaaggcattaggaaatagaaaagcacggtctttttggctccctggtctagtcacattggtactagggtgacctttcacccaagggacagctgctaaagggagtaattcagagacatggagcttctggttatgggtttgttttgggtttgtttttaactcctgcctccacacatgttcttgactgataactgactcatgtccctgaattaaaatgactgacctatgacagcatcaagcattctttgtaagcagagtgatatatctgagagggcgttgacctgttgtgtagaatacatatcctttcccccttcagaatcctgtctcgcctcgtaactgggagagaggctgtgcctgaaactaggggcgatgtcaaggaagctagaggcctcgatgcaattattactgactctggggaggaagacagagaataaggggacaccaactgcccagtccactggccatttttaagggtccccccaccccaagccaaagtttggtttgttgctgttaagacaatttttgttgtatgtatataaatattttagttagaggagcggggaatgggatgcgggctttcacagttctagggaatgggggcagggaggattttgcttttgcttttgctttgagggagaactttagctgactaaaaaaacagaagtttggggtcatgatcacaaaggggccattcccaaaagatggcaagccacgtattcagtggagactaggccaaattctaaatggttttatccatagcaggggagaataggagaatgagtttaagagtttttctcttcttttttcctagaaagaggtaaggataatgggaaaggtagagaaggcggctcccacagaccttttaagagaggcagaatcttgagcttgaggcaccttgagtgcatctcagttcagctggttctggctgaggcctccaaaggcaagctctgtgctttccagtggtttctgctgcatttccagggatggtgtttaacaccgcttcctccagctcccttttctaagaaagaataaatggagttctgctttttatgaaagggtctttggttttcagtgtcaacactgagaattggggctcttgcaagcatctggatttcacagtatcaacctccccgtcaccttttgaactttgagactccgtacggtcaacttcaccagaggcaggttgctcgaagcagcactgcttgtctgttcctgactctggttctcactgtattaaaaaagagagtcagaggagtctggcatttcgtgagtttgttagaggatgctggctgataattccagaaaacttactgatgctaaatcacagtacatgcatgattctttttcagctttactatagttcatgacctggactttctgtactcttggaagctgggctccttaaaggaggcctctagtgaacacctttatctccatgtccctcttagagcccagagagctgcccataggcattttccagaattcctcatgtcacctagttcaatttccattaactcagatcagccattgtgattcaccatttgtcaggctctcaggtttaacaaaacctactatcaccatcatccttcaacagccacagtctgaattgagccaacatttttttttctttgagaaagaagtggactggggcacaacttttagtctgaggggagctagtggaaatctagacaatagaagtcatcgatagcagcttttcctcaaatgtgtgactcctcaggggctraactgctcttagcttagaattatgctttactagagatctagcagataagtgggttaatcactaccatcctgtaactagttatatagcttccagacatgagggagacatcaaacagggatggaagcaaccccaaggatatgcaagaagggcatgatgaacccccttccctctggcaggagaacaaggccaaccaagggacagactggaaagcacttagatgtttaaggaggagaaaggggaagctttgaccagtccttgccttttgccaagttcagccagttctccgctgcttgcaacctctagcgcagtaacatttgcagaattgcagattttcccccagatactaggaggaaagggactttggggggtggggaaggggtcgtggtgttttaaaagcataagttacctgtttgcactgttttaagataggaaaaaaaaatagtgggcaaggtgaacatcagacgtaaatttgtgtgtttttattttgtcatgctcttgaaaatgtttgaccatttgtagtatacacagtgaaacttgattctctgttgcataaaacactatatttttttggaaatgttactgtccaaaagcctcttccctccctttccttttcctatgtacttccttcatacttgctttactgatcagccaggcaatagccatccaagagctagagcatgaaacagggccctttccaagtaggctctgggtgtcctaagccagcgtgtgccctctggtttagtgagtgtaatagagtccctggcacctttctttgcaaatgaggctaacagaccagactgcagcaagttatcagattcctcaatcagatgcactaggagtgaggagcccagggatggagggggttcctgaagtattgcagttggctgtagtagctgagttcttttccatgttaccgaaactgtagccagttacagtttactcaggaaaacggtagatcaattcagccatggtagtgctggttggcagggattggtaacggagagaactgctcatcagccaaaactcaagccttgccttttaggaggccaccagcagagggacttggtcctccttgtctggtacttgtgtacatgccggtgacctgaggactccactcacactggcgagcaaaaagggagcagtgattctcttttctctccccaccccctgccctttgttaccaacaccagtttcccagggggtacatgagtttctgaatttttaaaaaatgtttttggtttggtttttctggggactgataagtgctttaagcaatgtccataccccgtcaagactcccagcttagtcattttcttgtatttttctgttcacagtatttgtgtgtgtgcttgttttggcagctcattttggctgtattatatattgagtgatgaattgatcctcttttttccctaagggatatgaattgtttttcttgtgttatattctgcttgtgaatagctggagcaaacctggggctgacacgcgtaagctagggctgcaaagcgagaagagagccggtggagtgtacttgtccctgacaggctgacctacctgagtctctgagcttttcagtccaaatctttgcaaggctcaaaatgccacagaacctctcctcttctccccactccccatggcagggaccggaccatccctacatgcaacatgctgttcctccagcccctcccattgccatggcaaaacaggtacctttggggcatgggggcattacatgggatgcttgtgtaatcgaccacctagccttctctctcccctcccgtcctcccccagaatcacttcctaggacacccgagctgcttgcccagggtcctgtttccctgctaactccagagaagcatcccagggctttgtgacagtctctaattcccttcccttctcgttaagaatcatattgtatagtagctttcagaccatacagtattcattgggttactcctattattatcaagtagctggaattgtgaaggtcggagtagttagatctttagcttttattccttatttttttgtattactctccatgtgtataaattattgatcatgttgctggcttttataaactctaagcgaaggaggagcactgcctcagcctttgcacatggtaatgaagcactgtttttaaataaaagagagaaacaccattctttgggctgtgtgtattaatcctcgttccctgttgcctctgcctgaggctccaaagataccacttggatttgactttttaagcggggggcagggggggacaagaaggaaaagtgccaggcgttctaaggtgagacgttctaaatggtgatgagaagccagaaggtaagcgtgtgtcagctgctctcagcttccccagctgtgaactccagtctgtccaaaagctgcttctgaaatctttcagcttcacttcttcaccgtccaccctcccctagattcaactgctgcctttactgtaccacagacactgtccttgccaggggctgtggccccacttgaccttatcaaagtgttatttccctgccttgcctcctctgtccctgctgcccctggctctccggctgccacccaggctccttcactttttgttcagccatagaaaatatgtcctgcctagccctttcctccctgtttcttttctttttttccccttgagacagggtctcactgtgtcgcccaggctggagtgcagtggtgtgatcaaggctcactgtagcctcaaactcctgggctcaagtgatcctcccacctcagcctcccgagaagctggaactacaggtgcacgccaccacacccggcaacattttttgtagagatggggctacactgtgttgcccaggctggtctcgaactcctggcctcaagtgatcctcccacctcagcctcccaaagtgctggcattacaggcatgagccagcacacctggcctcttttctttcttacctgtgctgaaacccatcccttgctgcatttgtttcgtttctcagccaataattcccaaatctctgaaattctccataatccataaatctctaactcccttcacttcaccatatgagatcatcatgcttcctatttcacagaatatggaggttgtcagacatagtctccctgaatgaagtttccctaccagatctacaagcctacttgaattccacacagggtgtctttccccttctctctcgttctattagaggcattcttcacatcaccgtgaaccccacacctgtgctctgcatcccagcctttcccacctgctcggtgctttgcttcagtttcctcccttgcctggtttgcctcttcctctcaatagtccctttggcacttaagcgtgcttagatcttaagttaaaaaaaaaattggaaaatctcaagttattccttgtactctttttttttttttttttttttttttgagacagggtctcactctgttgcccaggctgcagtgcagtggtgctatctcgactcactgcaacctctgcctcccaggttcaagcaattctctttcgtcagcctcgtgagtagccgggattataggcatgcaccaccaagcctggctaatttttgtatttttggtagagacggagtttcaccatgttggtcaggctggtctcaaactcttgacctcaaagattcacccgcctcggcctcccaaagtgctagaattataggtgtgagccaccacacctggccctaagttgtttcttttgtggcaaacttctggaataagtttctaccggctgactccaattacttgatcttcaccctgtggctgcctgccttctacctccagtacctggaagcagcccctgaggatgacagtgaacggatgctcctctgttcacctgcttgactgctgagtgttcccaaggctgcttcccttgtgtgttggactgtgacaggccaaagtgagcgagtacctcaccaccaccacccactccaagctggcacgtccttgcccggcctcgtcttatctcctaaactggtctccttgcctccaccttttctccgacagctctccatcgccgaagtttgttctctcgacagcctgttcaatcggattgtgacgtgcttttgtgcaaacttctttggcttcccatcccgtagccagttccaagtccttattttggtctacaaggccctgtacaatgtgctcccctggtagtttatttggtgtctgtctttctgtactaaaatgcaggcacctggaggtcaaagactttgttctgttggctgctgtatctccatttgcctggtgcattgtaagcattcagtacctatttgttgaattactgctttccattttggatgtaaatgatgcacttttcagccctgccttcctccacattgccacccctagtaacaacagtggacatgagtgtggagcgctgttggtggcacttgcccattttcactcctttcatcttcccagcagctctgtgaggcgggtgccccctgaggcacttctgtctgcagctcctgctcctgccttcctgctgggtttgacaagcatgcaaaacctggattgccccttccccaggccatttctgggggttgtgtttgcagcaagaaaacttgtatcccctcaggacaaacagcaagcttgcttactacctgttataaaagaggtggatcccctaagctcagtgctcctcagctgcagcgcaaacctactacctgcgccacatctatccaggcctgtgggactcgggggctcatggaactgttccatatgctggtgctcatgctgcctgctgcactgtgagtaataaagtcctttgcctctcaccgagtcgtgtgtcttccaccaatatccgtgaaacaataacaggctaatgcatcagcttctaaggaaggagaaatcaaagcctatacctgacagtattgttattcctctgttaaaagatgaagctggacgcatagagagattaactaactttctcaaagtcacataagtaggaagttgcagaaccaggatccaaacccaggcagttgctcccaagtgtatgcctttaacctctgactgctagtgtttctaagtgctgctcttgtggaaaccccacagaaatcagagccagcactgcactcctgtctctggctgcctctctgcctcttgtaggctcctcttcctccagctctcttttaaatcttgttattcctctagggctcagttgtaggccaacttcttcccatactccactgaaaagatcactgttgagacccatttctgcctgtaagctaatgactcttaaatccaaactggagttcataaagctttcctagagtctagactcacgtccagctgcagccccacaggcttctaaaattcaatatgcttgaaataaaccctttttctactcaaaacctatgttcctgtctagtccatttgagctgataacaaaataccataaactgagtaatttttaaataacagaagctggccagacgcagtggctcacgcctgtaatcccagcactttgggaggtgaggtgggggtggatctcctgaggtcaggagttcaagaccagcctggccaacatagtgaaaccctgtttctactaaaaatacaaaaattagctgggcatggtggaatgnnnnnnnnnnnnnnnnnnnnnnnnnnnnnnnnnnnnnnnnnnnnnnnnnnnnnnnnnnnnnnnnnnnnnnnnnnnnnnnnnnnnnnnnnnnnnnnnnnnnnnnnnnnnnnnnnnnnnnnnnnnnnnnnnnnnnnnnnnnnnnnnnnnnnnnnnnnnnnnnnnnnnnnnnnnnnnnnnnnnnnnnnnnnnnnnnnnnnnnnnnnnnnnnnnnnnnnnnnnnnnnnnnnnnnnnnnnnnnnnnnnnnnnnnnnnnnnnnnnnnnnnnnnnnnnnnnnnnnnnnnnnnnnnnnnnnnnnnnnnnnnnnnnnnnnnnnnnnnnnnnnnnnnnnnnnnnnnnnnnnnnnnnnnnnnnnnnnnnnnnnnnnnnnnnnnnnnnnnnnnnnnnnnnnnnnnnnnnnnnnnnnnnnnnnnnnnnnnnnnnnnnnnnnnnnnnnnnnnnnnnnnnnnnnnnnnnnnnnnnnnnnnnnnnnnnnnnnnnnnnnnnnnnnnnnnnnnnnnnnnnnnnnnnnnnnnnnnnnnnnnnnnnnnnnnnnnnnnnnnnnnnnnnnnnnnnnnnnnnnnnnnnnnnnnnnnnnnnnnnnnnnnnnnnnnnnnnnnnnnnnnnnnnnnnnnnnnnnnnnnnnnnnnnnnnnnnnnnnnnnnnnnnnnnnnnnnnnnnnnnnnnnnnnnnnnnnnnnnnnnnnnnnnnnnnnnnnnnnnnnnnnnnnnnnnnnnnnnnnnnnnnnnnnnnnnnnnnnn

SEQ ID NO: 97128 - DNA, 26328 bp, Homo sapiens
ctcactgctagtaggtccaaaggccccacctaccgcccgccagagcccagggtcacactgtcgcaatgtgcaggagaacttggtgcctgctgcactgcggttgccaggtaggggcagggctccctggaacctccacaccattccccgggttcccggcagctctgggaaagcagagctggggccgctcaactctctcccctggatccggcaaggctgcccccctcccagagtggagccctgctccccagctcccatctctatcccctaaccctctcctcatggcccagcctagtcagcatcaaggtggagctgaacagaggcagagggagggggacacaaggtggtgtcacttaaaacttgggttcaagtccttatgcttctgcagcctggcctgggtcccacaactccccagggtggccaagggcttcccagtctgcacagaggacagggggacttgacagcatcaaatgctggtgactacaagacgcccatgtggggaatgcagacagaccatgcctctagcccttggcatccgggaccatttgtccaggacttgctgtcctggaaatgcagcatggacctccagggagggaggctgtgtggaggccacgccctgcctgtagctctttcccaccctagctgcgggtctgcttccctgaatccaaatccgctattactgtgctggcagcgcagcctctctagggacactggcctggctctgttctccccaggcctcagggtgcctaaatgggaggcagccaggagagtgaggacccactgaggggctctgttgaccaggctcagcaggggtgcaggtgatgtgggctggacttcttcccacgtggcccccacagtcctccccgcttcctccccagctgaacactgcctgctccagatgtctacacctggaagccgggcccccccatctgggcagcagagaaactgaggcacagagacagactgtgtccttacaggccacacagcctgccaggcccctatgtccagccagagcccctggtcagcctggactggaatgattgtttagaggcaggctgttcccacggctgcctctcgcggtggggggcctgtggatgcctcctcccgcccccacccgactcccaagcctcagtgacattgctcaaccaggagctgaagtgcattcctgggcttaggccagcccacccacccacccgctgcagtcctggaagctcagaggcctgggcagcaggaacagtggagacagcagcgtgggggacgtcccccctcctctccccaccatcctggtcaggcagaggccagggtgcagggaccgcctgagcaaaggcccagggaaaggaatgggtgtcattctggtcctgacccgaggcacagccaggaaggtccctgaatgtccttcctcaggaaatgatgggggaaggggcgatgagaatgaaggagaggatttaagtccctcaccccccgaggtagtcctgggctgagccccacgggacctggagaaccagggtgtaccccaccagcgtgtcgggtccaggaagcctcgtggccagctcccacttctcttcctgctgtgcaacccagagcaaggcctgcccctccagcttcagtcttctcccctgcaaatggggccacggcctttcctctcaggccgaaataaggattgaggccgggtgcagtggctcacccctgtaatcctagcactttgggagactgagatggggggactgcttgaagtcaggagtttaagtccagcctggtcaacatagtgagaccccatctctatttgtttaaataattttttaaattaaataaataaaataaggattgaggagtgactcgtacatcactcaactgggagccccagagacacagccctccagggctcagaaccggtggtactctactctgcaggcacaaaaccctgtttgtgggccctttggtatcaccaggttttcggggctcctgaaggatagccccgacctggcctcacctgggccctggccagagtgcccctggtgatatccagagtgcccctggtgctgggctgtgaccaccacccctcaccagcctatctccaccagcctttcccagaatcctgccccaggtgttggaactgtgcctggaggagggagcaggccccgagggaggcctggaggggctgctgatggtgaaggctgctgtgtctagttgttcccttccaaacccactccctctgggctgcatccccggctggtccaagccctgatccctgggatctggggacctcttccagtttgctgttccctgagaaccaggcctccctctggagaggatcacaagcttgggtttcactctgggcttaaacttggaaaccccccaggggcttggctctgaccgagatgttttcctccagcctcttgcccaatccccactcctcagacctcagcttcacctcccatgtcctcggcagggtgagctggacgcctacgggtctgagaaggcacccgggttcccggcatcagctggccactctctgcctaagaaagggccggggtcgctgcaccctctggtggctggtcctaggtggtgttgctgcccagcccagggaagggagggcctggccccaagtctgagggatcagggtgggaaggggcagggcttggcatggaccttcccctggcccccagccacgtgcctggctttccccatgctgaagatgctgaggctagttccagcgaccgcagcgtgaagatctccgaatcccgcctctccagtgcctcatttattgtgctgctctgctgctcacaggggaagccggtcccccagagtccccttcctggtcctagtgagtatcttgtccctagattgcttgtcagccttgtccgcctggagcactcagtagccagcaggctccccgcctttcctggagtccgaggcagctgcccagccaccagccgtgtggacgatggcttgcaccacagcgatgaaagtggatgcgatctgggtgtgatggtgccgggtctccagggctgcagtcactgcctgggggtgggaggagaggggaagcctgagcaaggctccagatgccacctgaaccacatctgtgtggtcacaggcctcagcccaggtggtgccatttcgggccaggtcatcaggaagagcaggttggggcctgctgggtctcactggagcagggggtttggccttcatgtcacaggggctccagatggcccaggcactagagagaggacaccaaccattgtccactctgtgatgatccaggcctccagcccaggatgccctggggccccacaccgtgactcagtttctccaacccccggcccacctggtcaatgtttctctccactgtcgtgacgttgggcagaagctggttgtgcagccggggctcctccacggcccgcttcacgtcatagccgaaccagaggttgtagatgatggcctggggcatgggagtgtgatcagcgtggcttgggggctgtgcagggtgggcacggccagggagaaaagctgtgacacatatcagtgcagtggctgtggtgatctgtgtgcccccagcagctcccacaaccatccggacctggccgtcctggcccaccatgatcgtcgggcacatggacgagagcggctgcttccctatggccgatgggagaagacagggatgcccgtcagctgcctgcccaggacacccgcccctctccaccccagtcccccacccccggacctccaccccatacctggctggatgaaattggcaggtgagggggcaccccaaactcgttggtgatgttgggagagctgaagtcgtccatttcatcattgaacaggatcccgctgaccggggagcggaccttggagccaaagctaccgcccagccaggtcagacagtgcccgaccttgcctggcccagcctggtccctatccacccactgaggctcaaacatactcactgagaggcccaggataagctaccaaggttgggcctcagtttcccaccaggaaaagaggtgacggagccaccttactggataagtgggcagtccctgggccacccgcccctggccctttcccacccaggcggcccagcagcccctactagaggttgatggtgctggtggtggacacagcactgccgtcttctgcgacgacagacaggtgagcagtgcccccatcaactggcgtgtagaactcgggcttgtagtaggagatcgggtgagtggtgtcgtcagagatctgggcccggagctgggcagcgaagaactcagaggtcatgttgtggaccacctgccgagaccccagagctggcctgaggaggtggggagggagggtggggaggggacacaggtctcagaaggcccctgactgtggctctgaccacaaccctctggcacccacaaccttccgtggctccccaggacccaagggcaggcccaggatcttgcatgaccagtctgactccctgtctctgtcgcgttccagcaactctgaatgtctgtctgcctggtcctcagcctccagacccttgctgcattcaatcactcattccttcatgcaaaaaatatttctagagtttgcactgcatgcctggcactggggaatcaacagggaacagacacttaggtcctgccctcatgccaagaaaaacaaacacacacagggaaagtgctgaaaccacaagccaggtaaggggaatcaagaggcatgaggtatgggcagagtggtcagggagggcttctcagaggaggcaacgtgtgaaaagagcctggaatgtggcctaaatggtcagtgcaaaggccctgaggcaggtggtataggctggtgagcgataggcagagagtgaatggagtggggtggggagaagaggatgaagatgcaggctggggcccatcccacaggacctcctaggtcccataacaactggcttttgctctgtgccatgcaggcttagggcagaggaatgagcaggctggggagtgttttcacagggtccctctggcagctatgacggggataaggataaagcccaaaggggaggctgtgggtatcaaccaggcaagagatgatggcctgggtgggagaaagagaagaatcaaggatggtgccgactagcgaggtaaaccctgcagaaagggcaggtttggggatggtcaggagcttgattctggatacttcatcagacctgaagagcatgggtgcacgtataaaaaaataaataaataagcatgggttcacgggcaagggcgggctgagagatgaacatggaggtattgacattgagtggctgctggatgccatgagcctggccaaggtccccaaggcagtggcgaggaggagatgaggaggtcaaggaggagacagaggatggacccgaaggccgaagaaaatgcctcaagggagtttcaacaccgggcgcggtggctcacgcctgtaatcccagcactttgggagggggatcacgacgtcaggagatggagatcatcctggctaacacggtgaaaccccgtctctactaaaaatacaaaacattagccgggtgtggtggcgggcgcctgcagtcccaactactccagaggctgaggcaggagaatggcgtgaacccggtaggcggagcttgcggtgagctgagatcaggccactggaatccagcctgggcgatagagggagactccatctcaaaaaaaaaaaaaaaaaaagagagagagtctggctctgttgcccaggctggagtgcagtggcgcgatctcggcgcatcacaatcccttccccgcccgcccccgggttcaagtgattctcctgtctcagccgccggagcagctgggactacaggcgcgtgccaccatgtctgactaaatttgtatttttactagagacggggtttcactatgttggccaggctggtctccaactcctgatctcgtgatccgtctgccccgacctcccaaagtgctaggattataggcataagccaccacgcccggcctcttttttttctttttcttttttttatctggagactgagttttgcacttgttgcccaggctggagtgcaatggtgcgatctcagctcactgcaatctccacctcagcaggagagcaggaatcttcagtgatccacgggcagatctgccrccattgtgggcacctgttcctcccgcaacctttgtgcycgcctctctccttccmgtacctattgcatgaccccccacgtccgcctcccgccattgccagcaagtgcctcgcgcgggtacctggctgcgcttattaatccgttaagctsgctctgtcacgggcgccstgatgygctcacgcrcccgctccctcaggtttaaaaggcgcgttgcccggcaacagaagaaactgctggcttagccgttggcsgagttggcggctggaygaggacgctcmgagcccagctctcgagagttcaagcaaccgacggttccccactgctcccaggagcggttaccygggcactctgtgcccctccttcctgttcgggcccaggccgaggacctgccagtagggctcagttgcctggagcccgttcagcccatcccccagttcactttgcytgtgggatctccccgttgctcctgcccgtgsactgagtggcaggccatcctacaagcacccrgacacttgacatcagtggtgtcaagacaactctaagaaggttttccgtgatcctgcaagccctgccttccttcctgggatcctgccttcaatttgattgcacaggtaccacagcaagccagtgctgygtgctccgagttccagggcgtcctccagctcagccactgcactgagaacatggactctctgtgsggcccaggagccgggagtcacccctttggggtccwcaacasccggctgtccccagacttgtgtccagggaagatagtgttgagggccctcaaggagagcrgggcagggatgcctgagcagsacaaggaccctagagtccaagagaatcctggtgatcasagaagggtcccsgaggtcaccggggatgcaccgtctgcatttcggcccctgcgggacaatrgaggcctctctccctttgtgcccgggcccgggcctctgcagacagacctccatgcccagaggtcagaaatcagatataaccagacatcccagacctcctggacgagctcstgcaccaaccgaaatgccatctccagctcctacagctccaygggaggcttgccggggctaaagcggaggagggggccagcctcatcccactgccagctgaccctcagttcctcaaagacagtgagtgaggacaggcctcaggctgtctcttyrggtcacacccagtgtgaaaaggcagcagatatagcaccagggyagacactcrccctcaggaatgactcctccacatccgaggcctctaggcccagtacacacaagtttcccctgctgccaygcaggcgaggggagcctttgatgctgccacctcccttagagctggggtaccgggtcactgttgaagacctkgaccgggagaaggaggmggcmttccagcrcatcaacagtgcactgcargttgaggacaaggccatctcggactgcagaccctcacggccttcccacactttgtcctcacttgcaacagggrcttctggtctgcctsccrtttctaaagcacccagtatggaygyacagcaggagacacacaagtcccaagactgcctgggcctactggaccccttagcatctgctgcaggggtcccctctacagctcccatgtctgggaagaagcacaraccaccaggccccctgttctcctcctcagatccccttcctgccacctcttctgattcccaggactcagcccaggtcacctcgctgattcctgcccccttcccagctgcaagcatggatgcgggcatgagaagaacaaggcatggcacttctgctcctgcagctgccgcagcagcccctccccgctccacattgaaccccacgttggggtcactactggagtggatggaggcccttcacatttctgggcctcagccacagctgcagcaggtgcccagaggtcagaaccagagatcccagacctcctggaccagctcgtgccccaaatgaaatgccatctcgagcccctacagctctacgggaggcctcccggaacaaaagcggaagaggggccagcctcatcccactgccagctgaccctcagttcctcaaacacagtgagtgaggacggacctcaggctgtctcttcgggtcacacccagtgtgaaaagacggcagatacagcaccagggcagacactcgccyccaggggtggctcccccagatcccagkcctctaggccccgtatatgcaagtttcccctgctgccacgcaggcraggggagcctttgatgctgccacctcccttagagatggggtaccgggtcactgctgaagacctggaccgggagaaggaggaggcattccagcgcatcaasagtgcactgcaggttgaggaccaggccatctaggactgcagaccctcacggccttcccacactttgtcctcacttgcaacagrggcttctggtctgcctgccgtttctaaagcacccagtatggatgcacagcaggagacacacaagtcccaagactgcctgggcctagtggcccccctgcatctgctgcacaggcctgtagtcccagctacttgggaggctgaggcaggagaacggcataaacccgggaggcagagcttgcagtgagctgagatcgcgccactgcaatccagcctgggtgacagagcgagactccgtctcaaaaaaaaagaaaaagaaaaaaagttcttgtgacatttgtgtatgaaatcagccttcactacatggataggaccagcacgcttccgcggcacgactctgcaatcttactacattttttttattttgtattttttttattccttttgagacagtctcactctgtcacccaggctgaagtgcagccgagatctcggctcactgcaacctccacctcttgggttcaagcaattctcctgtctcagcctcccaagtagctgggactacaggcacacgtcaaaacgcctggctaatttttgtatttttagtagagatggagttttgccatattggtcaggctggtctcgaactcctgacctcaggtgatcgacctgtcttagcctcccgaactgctaggattacaggtgtatatttatttatttaagatggaatcttgctctgtatttattaatttatttatttgagatggagtcttgctccatcgcccaggctagagtgcagtggtgcaatctcggctccctgaaacctctgacttccagtttcaagtgattctcctgcctcagtgtcccaagtagctgggattacaggtgcctgccaccacagctggctaatttttgtatttttagtagagacagtgtttcaccatcttggccaggctggtctcgggctcctgacctcatgaaccacctgcctcagcctcccaaagtgttgggaatacaggcctaaggcaccatgctcggccatatttatttatttaattatttagagacaaagtcttctctgtcacccaggctggagtgcagtggcgccatctcagctcactgcagcctccgcctccgaggtttaagcgattctcatgcctcagcctcctgagtaactgggactacaggtactcaccaccatgcagggctatttttttctatttttttttagagacacggtttcaccatgttggccaggctggtctcgaactcctgaccttaggtgatctgacagcctcgtcctctcaaagtactgggattacaggcatgagccactgtgcccggcctctcactacatttaagtgacgccatggctcatgcctgtaatcctggcactttgggaggccaaggcaggtggatcacytgaggtcrggagttcgacacgagcctggccaacatggrgaaaccccgtctctagtaaaaatgcacaaattagtcaggtgtggtggtacaagcctgtaggcccagctacttggaaggctgaggcaggagaatcactttaaccrggaggcagaggttgcagtgagccaatatcatgccactgcactccagcttgggggacagagtgagacaccgtctcaaaaaaaaaaaaaagaaaatagaaaaacatatgatgccggggcgtctcggcctcaatacctgcatgagcacagtcatgtccaggccagggctgctggtcaaggtccggccccatctctttcagcagaaagggagtaaggttgcagggaggctgagggacaagatcccaggatctcagcctccgctcatggatcagctctgagaccccaagtgagctgggggtgctctgtgcgcattggtttccccagctgtcaagtaaagggattggatgaggaagtcttgtcaaggtggaatgatctcagatttggggcagcagtgaatgatcccgytccctgggccatgccagtggcccggcctcggctsaacacagccccaacactctggaatggggatgagggggcagtcagctcttgctcctagtaagagagatgcaatagggctctgtggctgagctgggtgccttgcctcacacctgtaatcccaacctttgagaggccraggcgggaggattgcttgaggccgggaattttgagaatagcctggacaacatagccagaccccatgtctacaaaataataataaaacacacagctatagtccaagctacttggcaggctgaggcaggaaggtccattgagtccgggaattggaggctgcattgagctataatcgcaccattgcactccagcttgggtgacaaastgagaccctgtctctaaaagaaaaaaaaattggcctgtgagcatgggtttgattttcaaacaggactcggagggtagggacaaacagtgctgtcacccttaggtgctgaacactcagaaatgggccagcggcagcccttccctcacctgcagacaccagattgggcagaacagcacgtggcacttgcagctcttgcagtgagggcagaacccagtgtcaacccttctgcctgtgggaggggctgctgaggcctgcggagaggccagggtggaggctcgttcccttgtccagcccttggcgtggtctccaccaggtccccagcccaccagtgtaggccgcccctgagcctgctgctgccacgggccctgtctctacccaggacgycccccgaccctcgcagtgtcagggaaatgatcatggtggtggtgacactcygcaggcagggctgctgagagaagctgagaagggtcacacygcaggcagrsgcccgtgtgacaagcccctctcaccccgagagagctgaccaggcagctcacgagcagagccacatcccgggagtccgagaaaggtcctggctgggctcagccacctcaytggccacrggcagcctttgtcgtgtgagccttgctctcctggggaggctcargctgacggctgatgtgggcattgccrmrggtaaccygtggcccagtgtatatggccggstctcctcaarytgcattcattcaagtaggacccagggtgcrtgcccatctccagcccagggcagctcccctgtaagctgggtgagctactgaagccaaggygggaggcagctgacaacaccacccacggcccatgcggaggtggcrgaaaggctggactcagcaggaacaccaaatcccggaccaggcagaaaccacccaagactgaggggctcgtgccagagcggtggccacaggtaagracccgggcccaggctgtgtggcaggaatcctccatgtcccagggcttagcatagcaaaggaagaccagccgggtcaccctggtggccatctgtccctgtcccacctgcagagtcagaacagcctctccccagtggggatcatctctctctgccaaagcaacagcggtccctgccccaaccagactaccccactcagtggggttacggatgctgctccagcatcctaacactgcccagctggtgcctgcctgtgctcacccacaacccccaggccggccttccctgcagcctgggcttggccaccttggcctgattgagcactgaggcctcctgggcacccagccccatcactgyacctgctgcttccagccccaccccaccggctcaggggttcttcccagcggcgctgatcatgaagtcaacatgcacgcaagtcgtctcaggaaactttttaatgaaagtgtyggccacggtggtgtgtaggtggctgagctcagattgcagctgctragacaccagccacttaccaagagaaagccaggctgcttcaaacccagggccsgmggcaaaraagcatcacttccggccrgggagtctggaagccacgccttgtgggaggtcacactggcatctaggccttcgcctgcactgcagaaggagagccgggtccccctcctggagaacgctgcgttccccagccccacaccggctttgccaccacacaggctgttgaggcaggaggcgggtaagacgtagctgtagacccaaagcaaccaccagccctgggaccctgcgggagaggagcacttttagaacatggaaaagtgtggtcatcccatcattagacagcacacatcctacataaataaaaagtcgtatggggaaggaggttggggagggaataaaaaattggcacagacattgatagactggtttccagtttcaaggtaayagatgcacatcatgagaccagaggaggcagagacaagggctggatttggcttttctaagcaacatgtgttcctgcgcagggctgaatggtcgctgagacagagatggaagccaggacaagggagcccaccgggccyagataggtacrgagagcagaggctcctgttctgtcctyrccacccaygasggtgacactgcttgtaaatggtggctgtgctctcccagcaagwaaaaagcacaactaaatccacactgcacacagacgcagacagrmagccttcaagtrgctctgttttctgctccctgccttgccaggtccacaagcagagaggagtgtcaggyrcatggccccgctgtcaggctccccagtgagctgyrggctcagcaggagctgcccactgacacacaggggacacccactcctsccaccttgggagcrgktgccagacagagccgyactgggtgctggtgtcatccagggaccccacacacttccttaaatgtgatcctgcttccctctgsgsagctgcatcctctcctcctgcaggacygtctggaaacttggctctcagtttgatctcccttctctcctctgcctgccccaagcccctctttctaaaaaagtgatgcmrygttcatgggrttatttcttgaaaayacttggcggcctccatgcttctgttttctttgagycaggtrgtcaggagggyttacaaasaatgcctgggctyccccgcagctgycggcagatggggtagcgaatggtcctgtgcctccacctgctccgggagggagtctcccgtctctaggcctggccccttcctaaccctccacgtatcctgttctccagagacttcagaacccactcctgagaacagcggagccaggcgcttagaggaagaccaaatgctgccaggacacggattgtccagggattacattccagcatcttattaggtatctggatctgttgggaaaaaaattagaaactatgtataaaacttamaaatattcaagyatcaaaaggttatttaggatgaaagttttaaaacaagtcatcagcaagctgctrccaccaagtggagacttatacaaaagttgagcgagtccactgagctgagaggacagaaatgaagtcacctgtgctggggcaggggcagggacactgggggcagggagtgtgtgggcagagaagccagagaagtccaggcctgtggaagccaaacaggagagcgtgggccggaagggcggtcaggatcgggggacgaggtcgctctccctggagaacgaaccctaaagtgcrtagcctggggttccctccctgggggtcctgtcccccgacgtttcayrggccttctgagctgccttccaaggaggactaacacggcaacaaaagamccatttctgcacaaaaatccttctgggaagaaaaagaagaaagccaagaatggagtcaaaacgctacccagtgctgactaagcctctcaaaccctgttctaagtggastgtggtttctaagtcagggaaatggaagaggccccacccacacagggacagggccayggcccccacaggatgaagcagcagcatttattcaagatacaacagtgagggaatccggtcacgttcccttctccccagagagggcgcttcttgacaagtgattcagtagaaatcttttrgactcttaagttaagttcataaaaaccactgctttcaccctgtctcccagggccaggcctggactcygagatgaactggcttggggcgccctcgggtggccacataaaaaacccacagtctgaggccagcctggggctttcagacctgggcgggatctgcccaggccacctgtccttctgctttgggccgctgtctcttggcagatggcctgacacctgggggtggcccaaggatgcctcagaaaatcttgattcccactctacagatggcccgattagccagaggtttccaggccatctgtccgcctccaggagatggactgggacctttagacatcggtggagaacaggatgctctgtctcttgctgtccagggcagggatggcctccagccgcaagaagtacagcagcacctcgacctgccctcgcrgagtggggaagaggagagtggctcagagcggggctcacagctgctggtggggaggtctttggggcccaagtccccaagtccacctcaggtgctagaaacccctgctggtgtcatgaaccccttacagtgagacgggggtggggtggggtcctgacaaggcatgacttgttgggtggggggtggttatttattttagagatgcacagggccttgctctgtcccccaggctggagtacagtggctccatcatggatcactgcagcctctaactcctgggctcaagcaatcctcctgtgtcagcctcccagatacctaggattacagatrtgtgccmcaatgcctgcctaatttttctttgtattttttctggagatggggtttgctacattgcccagactggtctcaaacacctgggttcagttgtcctgcctcggcctcccaaagtgctgggattacaggcatgagccaccacactcraacacttggggtggttttaagcccccagcaaggtgcaccagcaggaccaggaggtggcctrggcaccccctatcactcccatccatgcaaacctaggcaagtccctstctctgaatctcagccaccaccacatacaatgcaagtcggaagatgggcaggactgggggtggggcaggcagagaccacctctgtcaggctggggttgcatgggctggagrctgtcttcccatacctgagacatgacctccaaggacctgctgtcagtcatggtgatrggctggctggggttggcagggagcttgctctcyttctcggagggccggagcagcgtggggccaaasacagtggcraggttgtgcagggacaycttattgactgcctccttctctgccaycctgtmgaggacsgaagcagagggtgctgtttcaacgccaccaccaggagagaggcagaggggctgtgccgtgctagagtcctcagggagrgagtgacctcgaccctggctgtgctgcaagctgactccagccttggtacttctgggtctcagtggcccaggacaaggggccagctctgggctgatggggaggtcttcmtgatgtgcttgggagggaagsggggggtccaagtgcactgctggccacggccaaagctctgagctctttgttaaggccacagtgcagagggaggmgggtggcaaagaggagaggcaggggcrggggtggcagtggtgctagtccttagaagcagtgagttactgcagacaggggtcrggggawwaggtccktggtgctgggggtctggtgggagcagaggggcaccccaamggcctggagacctggagtcctgggcagccacaagagagctgggctacctttccasgyggtctagaaggaaaaggaaggtgagcaggttggcctccggcagggacracarcaggttgagcatgcagctcttcyttgcaactgggtctgaaagagctgcaggaggcagtgggtyactccyctgggttacgacaagccrgagacctctcccgaggtggtcacatggagcgccmrggacacgagtccttgcrcagtttaggctygtcatcatcgtcacacccacagcgctggccgccagtgaggaccctgtgaggggcacctgtgtggggtgtgaaccacctgaacgccttttctctrcctcgcaggkstcagcagcaccyggtraacagcagcaggaggagccgctagagcagctgctsatgggcagagcwgccctygggcaactcctgccaccaccccctccccagggagcccaaggcaggggaggctcagcatggaatgaaacagsggagtgagggacacaaggaggtgggaagtgggagggtcccarccccaccaagtacrcagagaccccctygwyrtcctggacaccacaggggcacctgcaggctgggagaccaggtcctctgtgcatgggcccgggaggcagacctgcccyaagggtgatgcrsaggcyacaggtrctgcacgcdycagcgcccactctagacatcagcctccaggttgactaagggtcaggtcatgtttgaaaccatgcttggctggaccrggacccatggcaagagcaccygggcaccmkysttyagccctggtctgcaggaaggaggacagcagactttaggaccccacagcayggcagtgctgaccatttcacccacttgkcctccttgagraatakggatggggasccctctggggatgrgcaaggccttccaggayaggctcrgttctggtcccctgctttttgaggttgggttaaaatgccgaccatggcagaggggtcacagctcrggttcccacacctcrcttttcacagcctccaagggcagcagtgcacatggaggagacgtctcccacgaggccaaggcctccaatgctcaccgatgccctctgcgaagctggggtagaactcgtcagtgaagaggggctcaggcagctcacggaagtacagcttcagcgtgcctgcgatggcgttcatgtccgtctcgctcatcatcaccgacatgtccttcttatctggaaagagcacggaaatgcagcggcctccttgaagatcctgagtgagtcacctgccatccctgccttggctaaagcaccgtccctgctatgctgaccactgtgtgggtccctcccgggctttgagcagctcatctgactcctcccaagagctgtgcatggttctgtgtctgcagagttgataggggtgcatgggcattcccattcctctcccctgcttggcctgatgtgatggccaggaggaggccagcatggcaggacacagctcctgcgtggggattgggtggctctgccctgtacatagcaaccacccctgcaccagtgtcgtctgatggcaggaaggccgtgggagaatctgattggtttcagtgtttgaaccggtgtcttcctttggacccaattggccattggtgcttacatcctcaccacaggccaggttcattctgggcccccagagggagctgaaactaccacagggccctcccagggatgctgrgcattctargggtcctggtcagggtgggtggtstgtgctgcaaagaaggryctgcaggcacaaaatcctgttgctttgaagatgctgggaaggaccctctggggtctcagtgccctcccctggcatttgaggcaggtccgggtccttcaaagcctgtgagggttggtgagatggaggcggagaggctgcagccccggcctgcgctgaatttcatcagtgccctctgcccaccacatcctcatacagggcagtggacagaccgcactgagtcctgggcttccacctcctgtccamccccaaggcaggaaggccaagtccccacagaagcccctggtccactscaccaagtggcatgagtgggtacgatggtgtaaaaactggcttctatagaagctgtttgtacaactcttgttttctctttttttaaaataataaaacagtaaatgaagaaaagacacagagaaggatgtgacatgcctgggccatggagcactctgagatctcatcgcggacaccactgcccacacctccatcccgtcctgcgcaggccracactcactgacatcgaagsctgccttcagtgcctggatgtctgcggccacaccggccggacacgtggtagatgcccacctcctccatgcctcggcgctcgatctcctccacgcactggcgcacgatgtagggcaccttggacctctctctcctgtgggaggggggaatgttctcagtgtcctaacagccctgcttgggccataacacaggagacctgctccctatctgcgcacccggaggtggggtgaggacggtgacgaaggtacccaggtctggggctgcacacagagccttctgcatgcctgtcctccctctgcaagctctgtcttcacggcatgtgctttctcaggaacctttcaagcggccagaacccctgcgaatcacacatgacctttgygggaaggtcaggaggcctgtctaagtcaagtcagcacgggaagggcatctgacagattccaggcctggggtkagcagcctgtgcccccgkctgggagatcagacccggtgttggtcctgccacccacgtgctgtrtragaggagaahscstgacccctgccctgggccttaacacacatccgacgaatgaatgaagggttgcctcagyaccggtgctccaagtcctgcgatgctaagtgcttttctcctctgagtcttagcaatggacaattccaatacctccacacaggacactagagtaagaaaccttcacagttagaacgcagtgctgtgcrgaggccttaacttgagttctgttttgcacctggatttaccagcacatcaaagctgcttcgcaagccccctcattagcagggcttatctgggggagctgctgatggagtcctcgctgctcatgcccacagccctcccagagtgctatgcgagtggctgccgtgcagttgggggtggggcgtggtgtttagacacagataggagtccagggtatgactgatggaggccccggcccacgtgaccagcaaggtcagaggcccagccagattccatcctgrggaagcaartgaattctcagaggaagtggtctgtgtctgyatgaactgctctcaaaccaacaaayaggcttctcttggcaacwgactcatgacaaaggattcaagattgtttgaaaaaaaaaaaaggggrgcagggaggcagwargtcctggaaaagtaaattgtttattttacaataagaaagtgattacatatttttttttttayaatggtggaaaattagaagtsattgtgaaaatgatgtctaccygccttgctgatgagtaggatgtgatttggctctttaggaaactgaatttgcagaactkaagaatattgatttataaagggcatggccattgacccagtccatcttatgcaaatctggatgccataaataatatttaaaaatgaargtattggggtggaggttgcagtgagcrgagatygcccccgctacactccagcctggtcgacagagtgaactctgtctcaaaaaaaaaaaaaaaagaaaarraagaagaagccattcccaacrttgctcatcaaattatgaccataaatttccaggatcagactaacggctaaagagactgatgcatcaacaccaggcagagaataaagcagatttttttgttgttgttctggagagcttctaggaacttgaaaaatacatatgscacactcttaagacccggtggttcttaatcagggatgttcattaaaatgctggaaaactstaaagayttccaggtcccatccaaggagattttgcttctgattgactggctagtggcctggccattggtattttgaaaaatccctccaagtgattcttttacatcccagmtagaaaaccctaaattaaaggtgaaaaaaccagacaccaagtggcatttaaataaatgtcaactttaactccacaaagcatctggttgcatgtggacagaaagagaaggaaagagggccctatatctggataacttagaaatgtgctccccctagcaagatatctaccaaaattaaaaccatatttgaggatgctggcactgcgagtaatatataaatgatgcatgtaacgtcatttaatatgatcttatttttaaaaatgagtagagtggtgttttctagctgttagtttttccaaatatcaatatagaaatttgccttctgcagctgcagaggcaattcagtttgcagcttgcttgcatgtggcctagagccataacatggcccagggcatctctgatccacccctcccacaaccaccaaagccagagacaaccaaatgccttgggccatctggtgagagaggtagctgcatggcagtaagagtcctgctctgaagtaacaagagccttaaggcctagttttgacttactgctaacttgctgacactgcacacttgctgagtgatcttgggtgaatcctttcacctctctgaggttcactatgaaatgagaggtcaatggtcaaacttaaacaccttcagaggttgggtaatatcagtgagtaaaatggaccaggcagagcacaaagcggaatggtgcagactgtggcaagttgagaacttatgcctctgtaaagggggcagccaccactcatttactgccgattactctatctttgctgaggacagttgcacaggtagtgcactgcagaagggtaacaccttagaggggtgtcatttgcatcatagatgcaaaattcacaggcgaagactgatgtagtttgtccctaaagttttgctttgatttgcagatatttatccatggcagtttcctgaaagatgtctatagaaggttttgaggaatgggcaccttttaatttgctactaaactaaaccccaagggcccattatatgccagcacggtcctagagattccacactcattcagttccttttcatcataggaagtgggcattataatatcaggtccactgtaagaggtggagcctgggcatggtggctcatgcctataatcccagcactttgggaggcctacctgtgcagatcgcgggagcccaggagtttgagaccagcctgggcaacacggtgaaactctgcctttacaacacatataaaacgttagctgggcttggtggcatgtccctgtagtcctagctattcgggaggctgagatgggaggatcgcttgagcctgggaggtcaaggctgcagtgagcccagattgcacaactatactccagcttaggccacagagcaagaccttgtctcaaaaaatacagtaaaataataaaaagaaagaaagagaaaggaacagatcaataggtacaataaagtaacgtttgtataaaaaaagcaaaagaacatatttgtttatttggatatttgtttatattcataaactatctctagaaagataccaagaaactgaatctatttggttgtatctgagaaactacaggaatagggatggggttgagatggtgccttctgaattttgaaatatacaaatgtattgtctatttagaaataaatgggccaggtgtggtggctaggctgggtgcggtggctctcgcttgtaatcctggcactttgggaggtcgagactgacagatcacttgaggtcaggagtttgagaccagcctggccaacatggtgaaactccgtctctactaaaaatatgaaaatggccaggtgtggtggctcaccctggtaatcccagcactttgggaggctgaggcgggcggatcacctgaggtcaggagttcgagaacagcatgaccaacatggagaaaccccatctctactaagaatataaaattagcctggtgtagtggcgcatgcctgtcatcccagccactcaggaggctgaggcaggagaattgcttgaacccgggagatggaggttgtgccgagccgagattgcgccattatactccagcctgggcaacaacagcaaaactttgtctcacaaaaagaaacaacaacaacagcaacaacaaaacacacacacaaaaattagctgggtgtggtggtgggtgcctataatcccagttactcaggaggctgaggcacgagaattgcttgaacctgagaggcggaggtcgcagtgagccaagatcaggccactgcactccagcctgggcaatagagcaagactcaatctctaaataaatatataaaataaataaacagtattaagacaaaaatcataaggacattacataaaccacgttatgccagtgattttttaaaatatcaaaacaggcagttttatagaaaaatacaacttcaggccaggtggggtgcttgtaatcccagcactttgggaggccgaggttggtggatcacctgatctcaggagttcgagaccagcctggccagcatagcaaaaccccaactctaccaaaaatacaaaaattagctgggcgtggtggcacatgcttgtaaccccagctacttgggaggctgaggcgggagaatcacttgaacctgggaggaggaggttgcagtgagccaagatcacgtgactgcaacagagaaattctgtctcaaaagaaaaatataacttcataaaaacgaagtagggagaaacagaaaagtttgtctagatctagaaccatcaaaggaattgaatgtttattttaaaatctgtatcccggccgggcgcagtggctcaagcctgtaatcccagcactttgggaggacgaggtgggcggatcacaaggtcagaagatcgagaccatcctggctaacatggtgaaaccccatctctactaaaaatacaaaaaattagccgggcctggtggtgggtgcctgtagtcccagctactcgggagcctgaggcaggagaatggcgtgaacccgggaggcggagctggcagtgagccgagatggtgccactgcactccagcctgggcgacagagcgagactccgtctcaaaaaaaaaaaaaaaaaaaaaaaaatctgtatcccatcccctcaaaaatctcacaaaaaaacaaaaccaaagaaaagtacctggcccagatgattttatggacagcaaacattaaaaagaacataaagtttttatcttctacataatttttaaaaattaattatttatttttgacagaaagtctcgctttgtagcccagactggagtgcagtggcgtgatctctgctcactgcaacctctgcctcccaggttcaagcaattatcctgcctcagcctccagagtagctgggattacaggtgtgcccggctaattttttgtatttttagtagagatggggtttcaccatgttggccaggctgttcttgaactcccgacctccggtaatccgcccacctcggcctcccaaaatgctagttttacaagcgtaggccacagtgcccagcctagataatctttcagaaaaagaagcaaatggaattctccccaactcactgtgaatttagtataggcttaaaaccaaaccagacataaatagtacaaggaggcaaaagtatggactaacttcttatggacatatatgcaaaaacgctaaataaaatattagcaaataatccagcaatggattaaacatgtatcacgaccaagttggggttttcctaggaaactaagattatgtaataaaagaaaaaactattaaagtagtacaaactatcaaaggaaaaaacctgtatgatcattgcaacaggttcatttgcgacataatacaatttttttctttttttttttttaagtctttttggctgtaagtttattcaatgcaaaataatcctctccaattctactgaggtggctgacggtgtccacgaccaaatttgcctctaaactggaattcggttgctgacccagccccagcctcggctttcttgtcggcaccagggggcacagcactccttctgtaggtatctctgtcggcttctcctcttgtgagtcttgcaggtcgctcaccctccagacctttagaccgaggcctgccagtccctggacggctgcggcgtagggtggcaggcacaatctccaggggcagatgaaggtaatcacggagatactggatatcctcattggtaaggtaccagtagacatgtctccaggcaaactgttccttcacgtagtagcctcgggactacatgacaggaaggttgggcacacacattcttttttttttgagaggagtctcactctgtcgcccaggctggagtgcaggggcgcgatctcggctcactgcaacctccgccccctgggttcaagcaattctcctgccttggcctcccgactagctgggattacaggtgtctgccaccgcgcctggctaatatttttgtatttttagtagacacgggtttcaccatcttggccaggctggtcttgaactcctgacctcgtgatccgcccgcctcggcctcccaaagtgctgggattacaggcctaagccaccgcgcccggccgggcacattcttgtctgccaactccaggtgcttaggcatgtggacatccttcttgaccaccgtgacttcctctttaaaaaggagttcataaatggcaatccggtttttcttaggcatcagcattctggggaggagcagccgctaaggtggcagggtggcccggatgggggccgatggaactcgaactcccccagaatttctttaatattttatatatatatatatatatatatacatatatatatgtatatatatacacatatatatacatatatatatacatatatatatgtatatatatacatatatatatacgtatatatatatacgtatatatatatgtatatacatatatatatacatatatgttgctcgcttattctttttgtctgttcccttatgtaccgggagtgccaggaggacagggctttgtgttttcctcactgctgtctggctcatgcatagcacagtccttggcacacggtaaacacgctgaggagaacttttgggactagcggactctgagcatcattccgctgggcccagtggggcctctgaagggacccgccttgcccggctccagcccaagacctgaggcatgcgcaccggctggccggctactttcttgaccggccaagtggcagagcggctgcgcgacccagtgccgagacggacgcgagccggagatgggggaaggggagggggtggtggtgggggacggcggcgcctgcgcagtgaaggaatgtaggcggggcctccacgacgcctgcgcagacggccgcagccctgctgggcgcgaaggggctggccaagggcggggcccgcgagggaggccgggcggcccggcaagcggcgctgcggggtaggctgctttcctgaggccggactcaacgggtctcggctgagccaccgggtgagctcaccgcccagcccaaaccaggagattgcgagggagcgatgcggtgcagcgcggtaagagcagcagccgggttcccgcagtgttcgctggcgggttggtttatcgcctcagcgccgcccgcgctgccgcgcccgggcgtccccgcagaccccggcaggcccagcgcctgcgccgtctctgctcctgggcccctccagtgtgtcccgcgcctgcgcctttcccttcccgcgccgtcctcgttctgggcttcggggcttctggaacaacccgcaggcttcgccgccgagacccactggccttcgtccgttggtgttggggttcagctggttctgggaccccgcttgcggcttgactgtgtgcagacaggccgggtgcgaccctcgtgcttgcctttccgccgctccgggagaggctggggctgccgccccatcgcccgggtcccttgcctggggcggggacagcgttgttcagtggccccgagggcgcagagcggaggagcaggggccacaggcggcggaccccgggcctgctgccggtgctgcttctgctgtggccggcgcccgaggcggacggaacgtccttttttcttgagacgtggtta

SEQ ID NO: 97129 - DNA, 12323 bp, Homo sapiens
ctaaggcagatagagcagacagtatgacactgatcaaccagaaaacctatttgcataataagatcagggtgagacaaccaggcttccctgcatgctatgtgaatgtcatacctgactgaaccattctgtgagccctatgtaaatcagacaccaccttctccagcctgcctataaaacctgctgtggttggccacctccccctttttggatgtctctctcttgcaaggagctgctctcctctctcttttattaaactttccgctccttaacccactcagacatgttcatatcctgaattctttctcagtgagagacaacaaaccccagggtatataacccaaacaatgtagccatttcactatgaggttgagcatcttctcatgagtttctctgttgtttctcgtcttctgtgaatagccagtttatttggccatttttgaattgggttgtttgactttacttttgtcaacctgtcatttcactaatgatttttccaaagtaccagttgtctagaccagtgttcctcaatctcagcactactgacatttggggccaaataattccttgttgtgaggcatctgtcctcacaagcatgcttagaagtatccctggcccctactcagttgtgacaaccaaacatgttccggagattgccatatgtcccctcaggggatggtggaaaatcaccattggtctagactctgctgttggtggctttttcttatttgaatttttgttcacttttaaatgtcagcattctcttttcctgtctaccttctagatttcctagcttgcttaggaatgtttttctctcttcaagactatacaaatattattctaaatgttctaacatttttatgttttttaatgtttgcatttctagaatatctagaattcacctttttgtatgatgagataggaaaagtctagctttattttattccagttattgagcaaatcagtcttttcccactgaattgaaatgtccacatttgcacagatgaaaactcctttctgaaagcatgtgtaagcttctgcctgctgggccccccacaggaaaccgagaagccttgatctttgttgctggtgccctggctcttacaggagattaaggtaggggaaacatacactttttgtttgtttctctttatcaattttggcccagagatctttgagaaagtattaaatatatcttccgctccccaacccaagtctggctattgtgactgttgtattattccagaaagggaacagggaggaagaaagaatcagagacatgtggytaaagtcatcttctttctggaatctcttcgtctggcttgttttttgttgttttgttttttagtgaaaagagggtgactttcttcatctgagaacattttataaatttctttcaaagttctaatacccttctacctacctaccattgataccttctataagaaaggtcaactatacacatagtaggccctcaaatacttactgaatgaatgaagtaagattaacttaatgtgattcaggtgttctggtttaagcctctctgatgtgaagaaactgcctgtaaaatgcagatactgctggtggcagtaataagttcacttgttgcatggaaagtatttctaccaacaagttgtcatccttaggtcatgctaggcccaggtaattagggaaatctctaatattgccttttggcctacctggtctggggatcagggctggggaccctgagtagagagcacttgggttaattagaaggacactatagcaacagcaatgtgactgtccttttggaagcagcaaggcatctattaagctttgccagtcctgattgatgcatacattcactaaaccacttctctccctgaccctgctggaaaccatggtactgcttaactatttgggtacgggggggagaggcaatcttattttcacatgaggagaaatgatttagtcttgcagtttcatagctggaagggactgtagtctccacgggccctcctctaacttagggggtagcaggttccattcctaaaaagaagggaggaatggacttgggaacaactgaaggtcgtcgatttgagagatctgtgtctttggagcagtctggtatcttgtattccactgtgactttttggttttgtttttaggctgtaatgatgagcaatcatggaaccataggaaacttcttcctggctggccaaaatctatcatggttgccagtgagcaggccttgcatccactttggaaggtatgtgtaagcttgtctgttactttgatttagacgtctaatccccaaaataatgtgaagttgctaaatcaagaatgttatttaattagtagtttccttaactttcaagtagtttacctaaatgtgtgcattcaactccagtttagttcagtaattatataataggtgcccagtgtggacaaggctgtgttgtaggttccacaacatagataggaaatagccctgtcttctgtaagcacacaacccagaatgagaattagacacatatttaactaattacagtaattacatcgctggacaatatgtctaataggaggtgcgtgggccagggatgggtgaaaaggaaccaagggcttgctgggtggagggagtacgtattgcaagataggcaggatcttactgaagtggggttatttgagcaggatgtggagatgaaatcagtgtttgccaggtagattaagtgagagggcattcagggcagagagaacagcatatgccaaagaacggaggtgtggaacagcatgaggcaggctgagagggctagaaacattttttgttgtgtgtttaacttattgattatgcaaagttattctgtccaagaatgactcaaaaaccccatggcagtggaggcagctgcccgcactgtatctatgatgtgggtggtggtgggggtgccctagggaggaggaggatgtgaggacccatgccaagtttgagccaggactgctttataacttactatgtaaaaatatgtatgcatttcccacataggagtgtaaggaatatttagagaattgtgtgagaaccaggcctttgttgaataatttattgaatgtcctcagtttctcacattggggtaacacttgatagagagaagtcttgcctcaggaggagaaaagtaccttattccaaggcaagaaataagtgcaatcattaactctgctgaatcaaacaacctaaaagaaatagccttgccttggttatcttggagactgggggaaatcttttttcctggtgttaactctctgaatgatgttttggttttcttcctttgtaaactcaacttagagagattgacacggcaaaaagatgtttgtaatgggcctcctaccttcatttcttttttggcagaggagtctagcgatgcatttctattcctaggctgtgaggctccccagtcttttgtctgagccactctttggccttaaagttgtattttctgtatccagaaaagaggaaatctgctacctgtgtgaccttgtataactgcgacagctgtaaggattttcagaagtcctgaacatgctttaacctcccaatgtttatatacattatgatttattaatttctgtactatgactttttttcattattacattaattgctttacgaacaaaacatattatggtgttattaaaggaaattaaaaccaaagaataattttactactctttctgcacttgtatatttcttcaatcagcacacatctgatgagtgtcaatagctctggtcagggaccccagcgaccagcacactgcttatttttgcattcaattctgagcccccatcttgcctggcttagctgtgatgtctgaaaccctcagactccaccctccctacatggtcacctggctcccaggccatcgccctctccttcccctgcttcaccagcccctgctcaactccctgccttgttctttcccatctccccagcttcttcatactggaggtccccagggctttgaccctgacctctcttctccaattgcactcctcacttggcaatctcatcccacctcctagctttaaatgctaattggagggtaacaacccccaaatttacatccataggccagatctctccttgaactccagacttatgttgtctggctgcttgtttgacacctgccctggaaaggcctctcagggctctccccctgaacatgctacaaagggaactctgggttttcctctgtaaatcctcttctcccgtagtctccccatctcattcacagcagcctcctcctgcttgctcaggttggcaaactttgcatcagcgtaggctcttctttttctctcatacccaacatgcaatccatcagaaaatcctgtgctcgatctagaagatacttggaacctgaccaattctcaccaactctacccccagggccatgctgccgtcatctctcatctcagttaaaacagcctctttgggttccctgctcccaccctagcttctctgcatgaagactccacaaagcagctaaaggagcctattctaactcaaggcacacaatggcactttccagctcagagccctccagcgcctctccatcaccaagagtgaaagcccagttgcttacaatggcctacatcaggctgcaggggatctgcacctccttccctctcaggccttgcctcttaggatgcctgtccccagctctagtcagcatccttcaatgtttctgccatgcttccacttcagggcctgtgcctggatgctctctctggatatccccacgggtccctcccctcacctcttctggtctcccttggctctctcctatgcagtcagccccggccgccctgttactcagggttcctggccacttccccacctttctttgctatatagtgcttattgctgtctgttatgctataaaatcatcctctaatttattgtgttgtttctcttctttccaaaagcatgttggcctcatgagggcagggatgggatttttgtctatttcactcactaatgtgtccttaacacctacaatgggccaggggcagtggctcacgcctgtaatcccagcactttggaaggccgaggcaggtggatcaccggaggtcgggagtttgagacgagcctgatcaacatggagaaaccccgtctctactaaaaatacaaaattagctgggcgtggtggtgcatgcctgtaatcccagctactcaggaggctgaggcaggagaatcacttgaacccaggaggcggaggttgcagtgagccgagatcgcaccattgcactccagcctgtgcaacaagagcaaaactccatctcaaaaagaaacaaaaaacaaaaaacacctacaacggtacctcacctatagttggcaatggaccctaatgcatatgaaattaataatgactttttttttaagatggagtcttgctgtgtcacacaggctggagtgcaatggtgcaatcacagctcactataacccccatctcccgggattacacgtgccctctaccatgcccagctaatttttgtatttttagtagagatggggttttaccatgttggccaggctggtctcaaactcctgacctcaaatgatccactcgcctcagcctcccaaagtactgggattacaggcatgagccaccgcacccaaccatgaatgactttttactctaccttttcatttaataatgtaataagaatatatttctaagtctatataaacacagatagagatactttatatgcagttgcgtggtactatatcatatagatatttcattatttattcactgcattactgggcaatttagactataaataagttttcactattctgatacagtcaacattaacagtaaaaataaccattactcaagcacttatgtgcctcttctagatttttttgctttatatttgtcactgctaagaagtttaggaagtagattggtggcggtggtggctttggcagctcaggaccgagtgcaagtaacatagaatcagcatgactcttcagaggctcttcaggttctcctctgtcattctgtcagcagtctcagtccatttgtggaggaacatcagtgttacagcagtggcatttaataaggaacttgatcctatacagaaactcttgtggacaagattagagaatacaaatcgaagtgacagacatctggaggacctgttgatactggtccagagtatcagcaagagcttgagagggagctttttaagttcaagcaaatgtttggtaaaacagacatgaatacatttcccaacttcaaatttgaagatcccaaatctgaagtcatcgaaaaaccccaggtctgaagaaataaagtgaaattaatctggtaatttatcatgggtcaattgtacaactagttagaagtttcagaataaacatacatttcataacggtcaaaaaaaaaaagatgtttaaagcatgtatgttcccaactgtcttattagtacattttaccttttatatttattttgaaaaactgttttctttaatgcttttgggtttttttttttccaagatctctctgctgcccaggctagcatgcagtggcacaaccatggctcaccacagccttgacaactgcttcaattgatcctcccacctcagcctcccaagtagctgagactacaggtgcatgccaccatgctcagctaatttttgtatttttttgaagagacagggtctcactatgttgccctggccggtcacaaacttctgggctcaagcaacccacacacctcagcctcccaaactgccgggactataggcgtgagccaccacaccttgcctgctttgattgtgaatgctactttatttcatattagtatcatcgatgctgttttatttttgttttcatttacctaaaagactttgttgttttcagcctctcttgataatttgggtttaaatgtgtctcatgtcagcagcataatagtgaggttttggtttctattgcagtggttacctccactccattcaaaagttattattggtttaggaggtattttattcattgtaaatgcttctaggagtttttattttgaaagtaacaggtgttgattagttaaaaaaaaaaaaaaaagttacagcccaagcatagaatttgaaatttcctccctactccatctctataaccaataattccagcccccagaaatattgttatatccactggtagaattactcccaggcaaatataaacatacrtgcacaagtgcaatagacatagataaaattttaatgagattatatttattgtttaccttatttttatgacttaataaagctaccctattatttttgtatgctatgttatatttcatcatattcatgtacaacagtattctaaccagtctcttaatcctagatgtctgttagattgttaaatttttaaattacagtatttcaaacaaattacactcctacaaatatttctgcattagggaattgcaagtagaagtttagtatccattctccaaagtgcttgagaccagaagtgcttcacattttagattttctcagattttgggatatttgtattataatactagttgtgatataggacaggcaagccccaaacaggggcctggcccatgaaggctcttggctttgcccaggaaagaatccaagggcaagccagaggtagaagaaaacagttttattgaagaggcagtgttacagctccatactgctcttgcaaagcagggataccccataggcagagaggagcagttgagggcagttttgcagtcacatttatacccacttttaataacatgcagattaaaggacagtttatgtagaaagttctagggaagggttagtaactcttgggttttcaggtcattgccatagaaaggggcggtaactccccggtgttgccatggcggtggtaaattgacatggcacactggtgggtgtgtctgattggaaagctgcttccaccctggccctgttttagctagtcctcaatctggtccagtgtctgagcccagcctctggagtccagtcccacctcctacctcagttgagcatcccaaattaaaaaacccaaaatccaaaaacgttctaatgagtatttcctcatgttagtgctcaaaaagtttcagattttggagcatttcagatttcagattttcagatataggacgcccaacctgtatatcagtggagcacgtgaagagcagcagcagcaggacagttattctactcttttcacttccttccttgttgcctggcttctaattcatcatcagagattatatggaagaaacattaatgggaattctgcccagggaataattccttttgagaaaatgtgaaattcagtgagaatgtgcatttgtgagcattaattcttggagttagactaaaagttctgatatgtagtcctcttttgattttcagataggtatatctcttttggccttcaatattggcagtagccatattatggacctggctgggatagacgcatcttcaggaattgctattggggctggtaagtggaatgtaagtaatattatttgcagcaacaaacctccatctttatcattatccaaataaaactatataaacataaaaatttgctttcaactttgagtaaatataaaagaattcttgtgaagtcatagaggaaagaagccaagtctttgacttgtcaaagggattctgctgattttcattctacttagtaaattaatggagagagaatgtttacattccaaggaaataggaatgcagtgaagaaagaactgttagtagataggttaagaaaagatcatatttagccgggcatggtggcgcctgcctgtaatcccagctacttgggaggctgaggaaggagaatcgcttgaacccgggaggcagaggttgcagtgagccgagaatgcaccactgcactccagcctgggcaacaagagcgaaactctgtaagaagagaaagagaaagagaaggagaaagagaggagaaggagaaggaggagaaagagaaaaaaggagaaggagagagagagaaagagaaacaaagaaagaaagaaagagagggagagagggagagagggagagagggagagagggagagagggagagagggagagagggagagagggagagagggagagagggagaggggaaggaaggaaggaaccatattaacattaaacacatatgcagatatatatgtatatgtgtgtatatgtgtgtgtgtgtgtatacagagacacacacacacacatatatatacacatatatatctgtatgtatatattctgccctttgcactacatactgagaatgggctcagccaatgtccttgagatattcaactaggaactacaaatcttctgattaatctcccaggagtaccaggttttaaccttataaatatttgattatttatttaatttgtggcatatcttcataaaaaaggatgagttcatgtcctttgcagggacatggatgaagctggaaaccatcattctgagcaaactatcataaggacagaaaaacaccgcatgttctcactcataggtgggaactgaagaatgagaacacttggacacaggttggggaacatcacacaccggggcctgtcatggggtgggaggctgggggatggatagcattaggagaaatgcctaatgtaaatgatgagttaataggtgcagcaaaccaacacggcacatgtatacatacgtaacaaacctgcacgttgtgcacatgtaccctcgaacttaaaatgtaatttaaaaaaaattgtggcatatctttgttataggaaatagaatttattctcctaaattataaatgattttataattctttggtaattaacctatctctgtataaaccatttgacattttagaaataaatcagaaagctccatcctttctgagtctcaccttttttctcagactataaaaaaataaagaatacttctgcagtcaaaacctagtaagaagccctggccttcaccgccatttacccgtcagaattttctggggtttgtttgtttgttttggtacctggtagtcatcttagtaagattgtgttatactttccatagtttccatacacattgtttcaacataatcaacagaccaaatgcagagaagctggtggaagcccaaggctgtggaggctgctggaagacagcctcccaagctttagagatgcaggcctgaccagaagcaggtgcaaattttccttcttgattatgaggtggggaaatcaagtccaaacattattcctatgtaatcccttttgtaagtcaaatttgttttctccatgagccacttggttttaagtttcccaagtcatttagtggtcttgctgcagtcgttgagatctacctgtggccccttcctggaattgggcagtgttttgaaccccatctgcctcttctagaaaggttcccacccaattcagcagtcccagtgaggtccaagaatgccatcgtcattctttcctaacttgtatgctgtggatcaggcacagagacagtactggttcctgctttagaagctgagcttggccaggtttggtgggagccacagaaaaccattcggttcattcaaaatggtttcacaagccatctttacatctttggagttatctacacattttaccatatctcatcccaaatcctcagttcctggtgagggggtgacaagatgtaagaatgtacctccctcaatacagagcaacagggccattttctctcataaccagaccagtctgctctgatggcaccagaatgacaaatgtggctcagttctgagggcctgggtggcaggctctgaaggtgggtggaacagctgcaggatgccgctccttccaagaaagcctgtgggctgaagatctgctaaaagtctacatgtgggcagcaaggaagaacagccccaagcctggggccaggtaaaaccccacatcaagcctctaaattggatttcctgggtcacgtcctcatgtgactaggaagcaaccttagacttggacgccacactccaacgttgggaggggcaccttgctggctataaatctccaggtgacaaactccagcacagggagtcagatcgcctacatggtaggcctggagcttgaagaggtgtctctgcgaagagcactctgggcacttcgagatcttcccacagctagaagctaagctaggagtgaggattcccaggagaaggtaagaaggaagttaatagatggagggcacaagacctcattgggtacatcaggaaataaccacttaagcacaagtgttctgatgagtccaaaggtactctggttcctcttgacccagtgggaggcaagctttacagagaaaatctctgaactccaggggctggaggaacctggggcttcggtgatcatcacagggttctgtgagaaccagctgcctggtctctcagaattttcaagtatcttctttcttcacatatttaactcatcttattccttctttgtaaagaaaatcagagccaaacttatttaatttcaatggtatggaatgttagtatagtttatttccctcttccctgaatggttatttttctttctttttttaaactatcttttaaatttaattataaaccacctttattcccatctgacaaataaattaaaaataaatgccttgaaaatcagctcaaataaccatcccgaattaagaatgtatccttttacaagtaaagatcatgttcctgcaaattaagtttctgtgctggaaaatgtatccaagcacctttattggtaaggtccccagtaatgacacattcattaggcagaagacaaataggaaataagcttccttttcaagcttggcctagatgagatcctgatttaattgctctttttcttcttggtttcaggctgtacttctgctctatggcattggttggatatttgtttctgtttataataaggctcaggtaagtggccattatcactctattatttacaatatgtttccttataaatataatgtgtgtactaaaaacatcctagaggagaagttaaactttctcagtcttttgatccttgtgctgacttccccaaatcctgagatggctgaaataccatcagtctgtttggggcaaacagacacctgtaactctccactatttaactctggaccttattcaagagtttacctcttaaagattttatagtaaaccttttaaagctctatgaaaaaataagacctaaataaatgaagagaaaagctatgttaatgaatgaagactcaatatcccaaaactcttggttattcccaaattgatctatattgaatgtaa

SEQ ID NO: 97130 - DNA, 11238 bp, Homo sapiens
ttgcagtgagccgagatcgtgttactgcactccagcttgggcagctgagagagactctgtttcaaaaaaaaaaaatgttttgagtaagttgggtaaaataaaatgcatacattattaaaattactttcacctgtttctttttgtttttaaatgagggtcctagaaaatttttaattgcatatgtggcttacattgtatttctgttgaacagagctgctgcagaatgttataaattgggactctctagaaagaatttgcagctgtaagtttggggatggcatttgccaggacaggtggtattaataggagtatgttaaaagattggtggggccaggagccagactttggaggactgaggactctggtgacctgcctagtgtgtaggcaaggtcacctgcagagtagtgtgtgtgtgtgtgtgtgtgtgtgtgcgtgcgcacacacatgcataggaatgcatgtgtgataaaacggggtatgggccagacatggtggctcatgcctgtaatcccagcactttgggagaccaaggcgggcagatcacttgaggccaggagtttgagaccagcctagccaacatggcgaaaacccatctctactaaaaatacaaaaacatttagccaggcatggtggcacatgcctgtaatcccagctacttgggaggatgaggcatgagactcacttgaacctgggaactatcataccaagggcccatgggctttgctgatctgagagtaggaggcagaggttgcagtcagctaagattgcgccactgcactccagcctgggtaacagagcaagactctgtctcaaaaaaaagaggggtatgaagagagaggtaaagaattgtaccagctgagtgcagaggctcacacctgtaatcctagcactttgggaggctgtagcgggtggatcgcgaggtcaggagttcgagaccagactggccaacatggtgaaaccccatctctactaaaaatacaaaaattagccgggcgtggtggcaggtgcctgtaatcccagctactcggaggctgaggtgagacttgctcgaaccctggaggcagaggttgcagtgagccaagatcacacgccattgcactctagcctgggcaacagagcaagactccgtctcaaaaaaaaaaaaaaaaaaaaaaaagaattgtaccagcccctaagaatcaccaaaggtagcagaggagggccaagtcaaagccacagagtgtagaagcctcaagatgaagttcaaagccatacagtcttaaggaatgctaggagtcggtaacacagcaagttaatatctttgggtagacacgtgcagctaccgttgtggaataaatttcctcctgagagtgaaactctacagtgcatgccacctacagtgcattgaagcagacattatgcaaacacttcaagagaaaggacacttggtctcggaccagcgaagcccgtgggccctcggtgtgatagtctcaatgtatctgtagaagagtaggtcagtgggtggtcagcatcagataaaacagtcaacaaagccagctctggctgtgcccatagctcacggcaactcacttcctccagctgctcaggccaacacccgtgggtcatccctgactcctcccactctcacaacacccagcagcaaatcctgctggctccacttcaaaatggattctgggccaggtgctgtggttcacccctgtaatcccagtactttgaggggccaaggagggtggatcacttgaggtcaggagtttaaagccagcctggccaacatgatgaaaccccgtctctactaataatacaaaaacttagccggatgtggtggtgggcgcctgtaatcccagctacttgggaagctgaggcaagagaatggcttgaacctgggaggtgcaggttgtagtgagccgagatcgtgccattgcattccaccctgggcaacaagagcctgggcaacaagagtgaaactctggctcaataaataaaaaaccacatcatttctatttgatgttctctctggatgtgtatatgcaaatttccctttttcctaaggacacctgtcatattggaatatggcccagcctgatgtcttaattttaacttgttcacctctgagaagaacctatccccagataagatgacattctgaggtagtaggagttggaacttcaacatgtgaatttagtggggagaacaagtcacaattcaatccattacagtcctacccaattgtgagctaacaatgtgtgttatttgaagctactgaatttggtgtaatggtgtgtgcctgtagtcccagctactcaggaggctgaggcaagaggatggcttgagcccaggagttcaaggctgcagtgagccatgactgctccacggcaccctagcctgggtgatcttgtctcttaagaaagaaagaaagaaagaaggaaagaaggaaagaaggaaggaaggaaggaaggaaagaaagaaagaaagagaaaaaaaaaacagctgggcacagtggctcatgcctgtaatcccagcactttggaggccgaggcaggcggctcacgaggtcaggagttcaagaccagcctggccaacatgatgaagccccgtctctactaaaaaatacaaaaaaattagccgggcgtggtggtgggcacctgtaatcccagctacccgggaggctgaggcagaagaatcgcgtgaaaaccagaaggcggaggttgcagtgggccgagatcctgccactgcactctagcctgggcaacaagagtgaaactctgtcttaaaaaaaaaaaaaaaaaaaaaaaagggccgggcgcagtggcttgcgcctgcaatcccagcactttaggagaccaaggcgggctgatcacctaaggtcgggagttcgagatcagcctggctaacatggtgaaacctcgtctctactaaatatacaaaattagctggacgtggtggcgcatgcctgtcattccaagctactcgggaggctgaggcaggagaatcgcttgaacccaggaggcagagtttgcagtgagccaggattgcaccactgcctggcaacagtatgaggctccatctcaaaaaaaaagaaaaaaatctgctaaatttgtagtaacttgttgcacagcatagaaaattaatatagtctccctaaatattatagttagtactgcctgcttttaagagtctctttcaatctatagattccccctgcatctctttattctctctcaattttttattgaaaaatttgggatggttaatttgtatcgcttcccatagtctggattttgctggttacattcctgtggtataggttaacaggtttcattttttcctcctgtaaattgatcattgcatctagagtgttaatcagattaagctttttatgtttttgttaagactctttctaagtacacagctacaaggtgtttgtgtgtgtgtgtatatgtatatgtgaatttgtgtattttttttaagataagatgcctcatgaaacatactgatacttctgattcaaattcaggagacaagatgttactcattctcttctatttcacatctgtaactccttttccctacaccaagaattcagttctctggccactggggatgatagaatttgaatatcacataattactaattgctttgtcccatgttcgaaaacattcttagaataaaaatataacattaccagtccatatgatcactaaaaacagttccaaaacattttattttactttagtattattattacttttttttttctttgagacggagtcttgctctgtcacccaggctggagtgcaatggtgtgatctcagctcactgcaacctctacctcctgggttcaagtgattctcctgccccagcctcccaagtaactgggattacaggcgcccaccaccacacctggctaatttttgtattttagtagagatgaagtattgcaggatctggccagcagcctgcaatgcaacggggctctctctttgttcccaagcggattggcaggttgagaaataatagacacacacaagatagtgaaagctgggtccaggggggtcactgccttctggtccctcagtgccaacaatgcacgggatataccagcatttattattaagtttagtgaggtcgggggtaggttagtgagggatttagggtcatttgattatgaggtgagatggtcacatggggatgaagcaattctttaacataacatttgtatgtagaagtacagtacatttgtatgtagaagtatagtatacagagataagaatttacaacatagtgtgtgcgtcagtaatttctaacagagccttaaaacagaaacacagtctttccataacctatgattagcaagattttaatcagtagtaaaaactgcaacaaaagctggttacaaacaatccatggaaacaggaagctagacaaccggttagaccagaaattctcagaagggagtatgccttaaccctaaagaggcctagaagagccacggcaagatgagggcgtttatagccctatcttatccatatggacaggcaccccctatgcgtccatttataggctctccacaagggtcgcattccattcccagagctatgaacatctgctttgctgggatacgaatcttggtgatgtgaaacttccctgactgcaagtccattcataggctctctgcagggggaagcacatcacgtgctattggctcattctggcagtccaacctggcattgtctttacacaatcctgcatgcaattttgtatttacaataatcaggagcatttcatcttttattccatagcaatagtttcagggggtctccctacaatgaagttgcgccacatcggccaggctggtctcgaactcctgacctcaagccacccacctgccttggcctcccaaagtgctgagactacaagcctgagccaccgtccctggccaaaaaacaaaaaamamaacacacacacacacacacacacacacacacacacacactttaaagatatgcccacaccattttctccccctatttatagctgtactttgtctatgttgttggcgaatgtaaccattacactccatcctctcctttttactcctcatcttctcttggttctccatgtaaatatatctttaatgttcacaccaggctaatgtcaatgtctttttagtctcgttggttgtctgaagcttattttctagtaattcctcaggaaaggctttgggaacaatattctctgggttcctgcacattggtgagaatctgctattttttttttctttttaactcactctgtcacccaggctggagtgcactgccgcgatctgggcccactgcaacctccatcccccaagttcgagcgattctcctgcctcagcctcctgagtagctgaaattgcaagcgtgcaccaccacgcccagctgtttttctattttcagtagagacgcagtttagccattttgaccaggctggtcttgaactcctgacctcaagtgatctgcctgctttggccttccaaagtgttggaattacaggcgtgagccactgcgtccggcctgacaatctgctatttttatacttaaaagttagtttgaccaggccgggttgggtggctcacacctgtaatcccagcattttgggaggccgaggcgggctcaccaccggatgttgagagttcgagaccagcctgaccaacatggagaaaccctgtctctactaaaaatacaaaattagtcgggcgtggtcgcgcgtgactataattacaggactgcccagtggtcgggaccctgctaggttccagccagtgggagcggatggggtagtgggaaggcggggcctggcgggtgagggcggggcctggcaggtggggcggaggccttccgggggtggagccggggccttcctggggtggagccagcggccctgggcacagggcccgccggggctctggcagggcggtgggaaggcggggccttctgaatgggggcggggacggctggagttgcggggactgctggagttgcggggcttgcctggggtggggcggggcggcctaggggtggggcggggcggcctaggggtggggccgcctaggggtggggccggcggccctcgggaygggtcctgccagggcgcaaagatggcggtggaaaggcggggcgaaggcggggcgtgaggcgtggaggtgtggcctgactggggcggggcggggcggggcggaacagcctagaagcagggcctggaactgcaggatacactcccctcctgctacctaggcaggcgtgagggtgtgacggccgcgcattcgccagacgagagcgatggctgagaacgccgcaccaggtcgccttagactcaccaggtcgccttagacttagatgggacggggaggcctcgcgcgagcgccccattgcccacccacctggttgggactgtggaggagggcggatggagtggagggttcaccgaccgcgtcgcccttctgggtgtcgcagctccttcctcggcagtcccggggcgtgagagcgcgaccggccgggagttgggggacccgggacacggccgcacgtggcctcccagggttctaggagaccctgagttagccgggcgtgcgcgtgggtgtcgggggcgcgcaggtctccagccttgcagagacggaggaggctgccagctgtggggggcggcggcgggtcctggagtcccaccgcctgccctaaatttccactccgcccctgtcgcccagtgtgaccttgggcatgtactgcagctcccagtgcctcagtttcctgctctgtggagggagagtgacagtgctcccacctgctgcgtgtgtgagggtttggcacccctctggcctttgtgaaaggcttaggaaacgggctgtttctttactccggttttacaggaaaggaaactgaggctcaagacgttttagtaacttctccaaggttacccagccagcaagtgatggggtccaggcctgaccagcgcccccgccccagcacattctagaaggttctgccccagtttaaatggggtgcatgctctgaggcctgtcacagctttttccggcttagcttctctgtccctcctctgggagtctccactcccatgtctgactctctccccataaccttctggggcagctaagggtctgagtccctctggacatgagcccctggctcaagcacatcaggsagagataaggggctcagggagcaccagcttcatgggtgaatgaatgaaggaatgaaagacccggctgtgtctttcaggtctgatctcagagctgaagctggctgtgccctggggccacatcgcagccaaagcctggggctccctgcagggccctccagttctctgcctgcacggctggctggacaatgccagctccttcgacagactcatccctcttctcccgcaaggtgtgaggctggggctgaagggaaggccagggggaaagtgggcaggaaggtgaggggggaggtctgcaggggaatgaggagggcggggagacagctggcatagacacctcttcctaccctccaacccgcttctctctgtttcagacttttattacgttgccatggatttcggaggtcatgggctctcgtcccattacagcccaggtgtcccatattacctccagacttttgtgagtgagatccgaagagttgtggcaggtaagaaacagagtgtgtattttcggcggtgtggggggtgctctagggcaccccctcttatcactggaggcggggtaggatccaggaagcagcgctggcctgagagtggggcctgggctctggccccaggtctgccagcaattcacgggagatcttgggaaagttgaagagttcgcttcctccagtgggtcccccaagctagtgtcctgggtggacaccccagatgctgggaagggatttcctgagcctggggactagaagcaagatcgtgggctgagcctgtgcccagccggaccttctggctccttgcatttccagccttgaaatggaatcgattctccattctgggccacagcttcggtgagtacagtggccaggagctgaccgggcccggagtagggctgggagggaaggataggagctgctgccccacccctttcccctgcacttatgagatctgcaaagagagatgagagggtcagtcagaggttgaccactgtaccctctgacctcaggcaactgccgcaagggacacagggatgagggaaatgtggtcttttgagtggtcaggtctgatgaaggggacatcatggcccagatgctgagcccccagccacccatatggtgccccccccccaactggtgggaagaagctttagggtatgcagctggggagggagtgagggaatgtcacccacagctcttttgtcccccaggtggcgtcgtgggcggaatggtgagtagatggctttgtctggccaactggggctcccttgggtggagtggggaggggagcacaaaggaggaaggagaaggtacctgggacagaaagtgcctcctcctgtcacagtgatagtccttataccaggaagttggtgtaaacggtggagactcctggtagagttcatgtttccacgcccccatacccggtcccaccgcaccctggagtccagccatcaccaaggtctggagctcagtgctgggtgcagacttaggggtggtgggggaaggcacaccatagatagaagattctcctctggcctcttggtcagcaccctccccccagcctaaaagatgtttcggggaactccagggtccccagggaaaggcgggagtgtcctttccttcttccccctattcattctccccttttggcatcctcacagtttttctgtaccttccccgagatggtggataaacttatcttgctggacacgccgctctttctcctggaatcagatgtgagaagcgggctttcgtgcatgctgtcattagggaggacctgggccccgggcagcgctcccagccctgtctcctttggtggacactagggaagcacgaggaggcggcagagggtgggaaaggggagtcagggacccgctccccaacagatgacacccttctgctgcttatacccctagcagtggtcaggacaaggggtgtgggggaccccttggaaactggatgtgtggctcgggatctgcagaatgccaggctgatcacgcagtggcaggcagtggaagagggcagcggccatgggtggaagatgttctagggcacacagctgggccggcacactgcactcacacccagtcgaatgcctttgcactgtgtccacattgcaccaccacacatgacagccctaaatgtgaactgaaggaacaaggactgacccctctgaccaccactacccataaccagtactgtctctgcgtctgagtcctggcctggtttacctgctgggtgacccttggcaagttactttgcctctctgggccttagttcccgcacgtgtaaaatgaggttgggctcaatgacctggccagctctgacatcctgtcattttcttgccaaggtctcagcctatcagttgtgacacaagtctcatcagtttcagttttcttgtccatagaatgaccacagatcggccagatgcggtggctcacgcctgtaatcccagcactttgggaggccgaggctggcggatcacctgaggtcaggatttcgagaccagcctgaccaacatggagaaatcccgtctctactgaaagtacaaaattagctgggcgtggtggcacatgcctgtcatcccagctacttgggaggccgaggcaggagaatcgcttgaacccaggaggcggaggttgcagtgagccgagattgcgccattgcactccagcctgggcaacaagagggaaactccgtctccaaaaaaaaaaaaaaaaaaaaaaaaaagaatgacggcagatcccataaggataaggatcatgtccatctctgtcaccacatccccaatcctggcacctagtaagggctcagtaaatgttccttgcatgagctcagctagctcaggggctattataaggatccaatttacagatggcagacagcagacactcccttctttctgcatttcacccactgaattgacaagtgcagtgcccccaggggcttcctcctgggcgagtcaagaggggcatttggtcctcttgtcctgcattctcaggcatgggtagatgggagatgcccccctctgcagccccaggcagtgggcctgaggctgtcctcacagagtgagccacacatcatgggggagcttggaagccccagaaatgcgccctttctgccagtccctttctgccactgagaatgatggcattcgttgaaccagatgaaactgccaaccccagatggttcgtggcctccggaccctaatttcatgcctttgcaaagcacttggcagttgacagagattccccttcctctccatcatcccacctgatctcttcaactgtccctggccgcaggcaagaccaggctggctgtgactgaggcgaagcaaagactcgttcagaatcgtggggctgactagccagggctggggctgtgtgcccctttgccgagaggggctcagctgagagcagagggcagggctaggaggggcagagacctcgtctgcagcctggatccctgcccaccagccaactgtgcctccttaggaaatggagaacttgctgacctacaagcggagagccatagagcacgtgctgcaggtagaggcctcccaggagccctcgcacgtgttcagcctgaagcagctgctgcagaggtgggtgcccggtgtggacggggagctggtggggtccaggggaggacatcccgtgagacgtggagaagcttctttctccctctcacccaacaagcctgtttctccctggggtcacgctgagcaccaggcttcccagggtcttcagggacgttctctctttccctctgcccctgctccagccatgccccttacttccaataccctccccacacctctcacgcacccgcctctctcccaagcacatgctgcttccacgccttctctcccctctgggactccagcctgggctcccttacctggaattctcccctgtgcttgctcactggcttccccactccttggggcctcagctgggaaccctgccctgacacccccaggcaagctgtccctccctgccctgcaggtaaccacaccgtccaataagagcctattgatttcctctgttt

SEQ ID NO: 97131 - DNA, 37636 bp, Homo sapiens
cacccgcctcagcctcccaaagtgctgggattacagccatgagccaccacacccggctgtatctttgttttcaacaaaaaagtttaaaaagtaaaaattaaaagatttaaaaacagcaaaaagcttacagtgtaaggatataaaacatttttgtacagctatacaatgcgtttgttagaagctgagtgttacgacaagagtcaaaaagcttaaaaatatttcaaagtttataaagtaaaaaagttacagcaaactaatgtagcatgactaaagatggcaaaacagttttacaaatttagtgtagcataagtgcgcagtgtttagaaagtctacggtagtacacagtaatgccctagcccttcacattcacacaccactcactcactgactcacccagagaaagaaacttccagttctacaggctccattcatggtaagtgccctatacaggtatgccatctataccatatttatttatttatttatttatttatttatttatttatttttttgagacagagtctcactctgtcacccaggctggagtgtagtggcacagtctcggctcattgcaacctccgcctcccagattcaagcaattctcctgcctcagcctcctgagtagctgggactacaggtgcccaccacaacgcctggctaattttttatatttttagtagagatggggtttcaccatattagccaggatggtcctgatttcctgacctcataatctgcccgccttggcctcccaaagtactgggattacagacgtgagccaccgcacctggctcatctataccatatttttactgtaccttttccatgtttaggtacacaaatgcttaccattgtgttacaattgcctccggtagtcagtacagtcacatgctatacaggtttgctgcctagaggcaataggctataccagcagtccccagcctttttggtaccaggtaccggttttgtggaagaccatttctccgcagacaaaggttgggggaaggggatggtttggggatgttttagatacattatatttattgtgtactttatttctattattattacattgtaatatataatgcagtaattatacaactcaccataatgtaaaatcagtgggagccctgagtttgtcttcctgcaattagacagtcccatctgggggtgatgggagacagtgacagatcatcaggcattagattctcataaggagccctcttgtgctcagttcacaatagggtttgcaataatgtaatgccactgccgatctgacaggaggcggagctcacggggtaacgggagtgatggggagtggctgtaaatacagatgaagcttctctcactggccggcagtccctaacctcctgctgtgtggccatgttcctaataggccacggactggtaccaggggctgaggacccctgggctatactatataggctaggtgtacactctatgatatttatataacaacaaaattgcctaacaacgcatttctcagaatgtatcccagtcatacgcatgactatactacaaaagtactacaattactttttaataatttgttttctttactgagagtgactgcaccagcacacacttgaggtccaagtcccagagtccagagaatgtggcctgtggttacataagattggaaaagcaaatatcagagaaggaactggctacaaagtggacagggcctacatctcacagatccttgtaggcctgaagaagtgtagactgacttaagccactggtggtttaagcaagggagtgtagtggctggtctgctgatctggtgtcacggcagagatgattcctaagaaaagataaggcttctgaggccagggggctgctggaaaaagagcagcccaattcccaggaatgccctcctcaagcagggaaagagagcctgctttgggtgggtaatttttggggtccttagtgcttacgggattcctggaggagtgaaaggaaaccagatattcagagcatgaaagtaaaccaaatcctcttgatggaaaacaaagaaatggaggcaaaggaagtggaattcaacagtgtggtgtcaactaaacaacaaaactgggctttatcatttgcagctgctacaatatttagtgaggctacctatgtagaagtgactttggaaccaggtattgtggaggagaagaggactgaacttaagacttgctagttctaccctgaaatcctggctttccagaggtaggaccctgaacaagacattaaatcagagcaaaacacacattccttctgaatggcaatagtctcattcatagaatatgggcaaaaattcctgtttccacaggtgtattatgacgattaggtgagaatttgaatgtgcaagtttcttatgggtgccatgcttgataaccacagaggactattatcaattcatacaatatcgaaattcacccacttaccttaaatgtctgggtgaaatagggaaaggcaaagaacaagaaagtacacacacctatgagcataaaagggcaacacacttgtgaacattctcagcaagtgtctttaaagacgatcttctaaggcaaatccatgcccccaactgaagggcagcttataaatttgccaaagaatcagagcagccacacagtaaatgcatgtgcggctccttaaaagcttattaaatggtgcaggttaaaggtatcgtagaaaaactctaagtggcatagaaggacaaagaacttctcacagaagctctggactgtgcatcctgattggtctgagtggtatctttttccttggtacaagcaggaacacaaaagccttatgtacaacccccatactgttttgtactctttatttttgtttttgtctttatttttgtctttggtatattgttttataggcagcagtcacagccacaatggagatccttgggtaaaaaattactttgttggctgagcgcagtggctcacgcctgtaatcccagcagtttgggaggtcaaggcggttggatcacctgaggtcaggagttcaagaccagcctggccaacatggtgaaaccccgtctctactaaaaatacaaaaaattagccgggcgtggtggtgggcatctgtaatctcagctactcgggactctgaggcaggagaatcgcttgaacctgggaggcggaggttgcaatgagccgagatcacgccactgccctctagcctgggagggagaaaggaagggaggaagagggagagggagaggagggagagggagaggagggagagggagaggagggagagggagaggagggagagggagaggagggagagggagaggagaggagggagagggagagagaagaaaggaaaggaaggaaaggaaggaaagaagggagggaattactttgtcaattataagtcattaggaagatactaaggtcaatgatgtggtgatgacaaaaataacagtaacaaatattgtgacaaatacaacggtaaaagtccttcaagtgaatgaaaacgtgttgagcacctatgatgtgcatggaaccgagctgcacattatgggggaaatacatcattcctgcccttagaattgaatgaacactcaaaaacatccaacagagtcacagcagaaggcacgttatagtaagtcacccaatggagggaagtataatggcaagaccaaagacagaaaaataatcctgataagacagaatggaagaaacagtgaagagggactctacaaaaaaggtgaggtaggtctaggaagaagggggtggaccctgcatgagttaacaacacagagacagaaaaggaacacgtgcattcagggaaccatcgaggccgcagcatgggtaggctgctgattggggtcgcaagtgggagttgaggtcggagcttgggggtgagctgttttgatgacgttgtaaagggaaattagagcaagatcctggaatgcggtaagtgagccactaacaatatctggccttactcacttgctttctaggcaatgaggagccacagaaagcctttgaacagggagtggcacagcctttgaggaagattcctctggaatctatacgaaaggctggaggataaaaggaggcagaaagcaaagccaaaggggtcagacagaagctagcaaaggcttgttcgaacaaggaagccattagagacaattacaagaaagagaagtttctagtttaaaagaaccgtatgaagctctcgttaaaaagaaaacggagttgcagtagtgaatttccaggttggctgcagaccaagcccagatttaggttcacggtgtaaagagcacagccttcagggtccaggggcaaagggaggcatgccatctttctttctcccaagaaacagctccaggatgtgggtgatgtacaaagaaattctagaatcagctcatgtctacagatgctttggaaatccattgtgtccagtgaggtactgtaaggtgatgagtggaaacaagaatgaaaaaggtgcttgctgattccaaaaaccttacacacagacacacacactgatatcaggcggatttgggtaaggctcatatgaagttaatcaacaaatcaagggaaaagggacatggaatttggaaaatgactaagaaatgttggaagataaaatttgtggtgtaccttagagagaaaaactcctgtatttcaggagactgccatccacacaggcattctgagccccccttttttccccctctacccatgtgtgatggtctctctgcgggacctcattcattcacacaactccctataccacccttaacctgagaagggcccggctgggccaccaaacccaattgcgattcatcactgagcccagcctttggttgcagccaaaacaggaaagagaatgaaggaggctagaaataccacaaaggcaaacttggagctagtgcccaccaaaccaattccctgcttcagaaatggaacgatgctgaactgtcagctgaagaaggctgcacagcttgaaagaggaagcgtcaaaggaagcttggtggagaggagagtgtgaatagggaagtgccaacagggacacgtgcagggggtgggaaggcaggcaggacgcccagtgagagtgacagaggccagcagagcacgagtgtgcaaggaaacacagggaacgagaggctgcgtgggtgacagtgtgccggggtgacaggcggatacggcacatgacgcagagtggaagacaaccacaggtagagaagtgtcagcaaaggaatgcatttttgctgttctcctaacaattcagcacacatcagatgggaagggtgaaggaggagagcatgagacaggggtgaaaagcagagccacagggacaatgaaggactaagtcccataatacaaagaccacgggtctttcttgactggactgatgatgctatgggggtggaggtggaagtgggaatccctggctctcagccacagttctataagggtcaccttcgtgccctcatctgtatgctccagtaggctcattacccaggagagaattatctccagatagagaagggaagagttgatataatgtagaccaaactccacccagccatgcccacaggctatggtacgggagacccattcctcccagaaaatggtgaacaaaggctctgcatgcatttatcaactttgtaacagtcatggtaacttcttctcccttggctcattcatttattcatccattcattcattcggcaattattactgagtgtctgggacaagctgggcacttctaagtgtactgaacatgaccaaccaatcacctgccctcagggagtttacagtccagcgggagaacatagaaaagagacagtctcaacagccagcaaatacagtggaggcatcaggcagtgatcagagttgtgaaggaaataaaggaaggaaaggtggggtgggaggaggagggttctgattctgacttcataaagggccctctctcacaaggtgaagtgtaaacaaagacctgcaggaagtaaaggggctacaagggatccatggaaagagcattcccagaagcggggccagggcagtgcgcacagtgaggagagcaggtgtgtgtgaggtgagtaagagaagacacaagggtgggggccgcgggaggcagagccaggagggcagggctgagtggctctggaagctctggaaaggccagcggtcaggtctgatggtgggtctgagcagagtcgctttgtgacacccttctgctactgcatggggcgagggaagaatcccaggatgtggtctgggaggcaggagcacagaggcgacagggtggtgacctgcccattggcctcggccggtattctgaatgcaagggtcagcagcagcaactgtgcaatagtgcctttcttttcaaagagccagctgctctgattcacagacagtccctcccagttgagggttcatcaggaactagaggaccaaccaacaaggtcatttacctgtcaccactgctgcattcactggtaatcaaaaggggcagggtaggggaggaccacgracccaaagagaaggtctgggagcatgcagacatgcctctcaagcctcacaattgtccttttgctaaatttaggttgaaacaaaacgttcaaagccccctcggaagcccatccacaggtgtgtgactgtgaaccgcatcgtaatctcctagaaagcaagaacatcaggcttacattttccacttgcctctcacggctcagagctctgcagtatatacagtaagcaccaaatgaacacttttcagataaattaaataactgcagaatagtcataatgacagtgttttttttaaaacaatatttaataattgcttactctgtgccagtacttttcakccarrggcaatttgcccccctgccgcggagacatttggcaatgtctggagacacttttggagtcacaaatcaggggagagatgctgctggtacatagtaggttcggaaagctgcaaaatgtcatacagttcacaagacagcctccctgccccccataargaaggattctccagcccccaaaatctagcgcttataaatcactatttattttcacagctactcttttttttttttttttccagttgaggaaactgggccctgagacattaacttgcccaaaagatcacagtgggcaacattctagagcacagtggaagccgacaggtaaataagtagatgggtagagtgcaacagacaggcagacagattgagacaaaaatgggaaaactgggaaatatggaaaagaacagggaatggatgaaaagtagtcctaagccaagctctgccaagaaatgacacatggccctgggccttcccctcctgactctaaacctgagagcacacagctataaaattccaggaggtgtagaagatcactgacttccagctttaacatcttcaggacaagtttttccctgcaactgaaatattagcattatataaatactcgtaaacacgtggcaatattcaccgtacaaatcctaaattccttcccctttactcagcaaaggcaggagatgccaaatgtcttatgatatactcctcccctcctcctttccttgcttctaaaaatatctgtgaacagccacctgtgccaagcactgagccagggctggaaatattctaatgccagatgtgcaaagtcctttttaatatggtgtatttgtgaagcttccattacttggccagccccaaggtgggcaatttccctactgcacagatggggcactacactgggactccagctaactttataagcagcaggcaagactgggggaattggggtgcagggacagaattccctccccactcggatcatgcctcccagtcagtgtcaatatctacctctctgctcaataaatsctgatgatcatcttaatagaaatcattacctactaaatggcaaaggaatgagaaagcaaggcaatatggatgagagaaagaggttttgagatgagawgtgagtagatttggaaaagccgggtagggagaatcagtctgtcatggctagcacggatgggtcaatgccggcagcagaaacaaggctccctgaaggtcaaggtgacagggggaagccaggaggagctggaagacagttatggatgggctccaaattggtccctaaagaaaatgatgttttctatttcttatgacaatattgttatagggctgttaacaagaatcaagaaatgtcagactgtgccaagggatgacatccagtaacagcctgagctggtttgattaagccatttaattagcatctgtttggggctgggcactgaacagagggtgatccattcaccatctgattcaattctctcattaaaggaggtagtaggtattactcttgtatatatcgcaatgaggaaccaagacccataaaggtgctaatattttgctaaaccaaataaagtaaaagagtgtatctaatgccctgtttctctcaccaccctacagcaatgtcagtgaagatggaaaacagaacgtggagagagatgtagcttactagagccctgtggcttcaatccccaccaggaatgtcgtttaagaggaaggtgatctagcacaaattcacatttgcttgaggaagaatacaaatgtatgtctgtttatcttcttggtctggaaagtattattatcatgtccatcttatagatgcagaaagtaagacccagaagaatcacatgatacacgtgatatcacaaatatactggctgataaggctgggacctgaaactagttcctctctctaaatggctaacacagaaarccaaggcaacgacagtcagggaaggcagggacttcctsaggcttggaaaggtcaggggaagcttcttagggcaggtgagatttgagcagagcagggccagcattaaagacatcagcagggaggagaggtgagatcaaaggactggggacaggtaaggggtattcaggggtcaggtagatggatctgcactcacaagccctgatatcaaaggccaagtgtccatataaacagagagaaaacccaagtctgatccagcaatgtcttgctcaaagcccttgaaatgacttcacatcaactgtgctactcaattcatatgatctggctcctgtctacttcagtagccccaactccacttgtagtatcccgtattcatcatctacacctatacacatatgcaggctattcctccagcctacagactctttatcccacaaattaaaaaatttccagaacggccaggctcagtggctcactcctgtaatcccaacactttgagaggccaaggcaggcagatcacttgaggtcaggagttcaagaccagcctggccaacatggtgaaatcccgtctctactaaaaatacaaaaattagccaggcacgggggtgcatgcctgtaatcccagctactcaggaggctgaggcaggagaatcgcttgaacctgggaggcagaggctgcagtgagccaagatcacgccactgcactacagcctgggcaacaaagcgagactccgtctccacccctaccaccaaaaaaaaaaaaaaaaaaaaaaaaaaaaccaacaacagagacacatttccaggggatttcttccaggtaccacctgtgggaagttgtccctgacactccaggacagacacactcccagtaggcaatgcctgttaggcaggtaggatgctatactagactggcctgctgtgtcccacttcctcactagctactagagggcaggacccataggtctacacccatgaggtagacactcaataattatcaagtctacaaacacacggttacggatagaggaagggagtaaatatagtattaggtgagtgagtccttggcctgcggttggcctcagctttctctactttgccaaagaaataatatccagctttctttacttgtctgataatgtttgtaaaaagatccagaagctcaaaggtattaactgtcacccccctccccrcaaaaaaaggcattcttggaatgagcttttatttcagaaaagaaaccaatttatgtagtgtcatcataaaataatgcatagagatgatgaactgacgatgatatagtgataagaattcttgtttcatttataatataaaccttaattcctgccctcccccaaaatgagttaacttacaattaaaacacatgtatatagaacaccaaagtgcagattaagcaaaaggcaatatgcaatggggaaaggaattgggaaggaaataattacatgaagtcacagccaaagatactgactgcaatcaaccatccaattttaaggcagcagcctcagaaggaagagaaaaagacatgagttgaattaggtctctctcctttgacagaagggacattgaacaatgtcatgggaaatgggttaagcttcagcctttcaagggatataaactatcactaatgcattccagaagatgaggaatcaaatttacttgctgtgctcaatatcatgagagataaatatgctaataatatgatcagttagggtataacacaccagacttcctccatccaatgactctggtctgcttcaaagtagccacattaggaggcttttcatttacttccactgaaaatgccaccaatccctcaaagagctgggtgcccttatttaagggcctgcaaagcccattcccaaacaacaggcgctatcaaggacaatgaagatcaacaacaggaacacaggatggacrtggccctagccccttccctaagccttggttcctacagttgcaaagatctttatctctgcttcctgaggaaggctgtcaagagaagcaaatgagttagcgtacacacatgtagaggctctcatgcttacccgttctcccctcatcaagtatttatggaggacctataagatgccaggcatgagtctcattgttggggtatggaaatgacagaagtccctgccctcatgaagtgtgtgtgtgcgtgtgtgcatgcgtgtgtgtgtgcgtgcatgcgtgcgtgtgtgtgttgagggagacagagaccaaaatacagttaacccttgaacaacacgggtttaaagtgcatgagtccacaaatacacagattttctcttgcctctgccacccctgagacagcaagaccaatctctcctcctcctcagcctactcaacatgaagatgaagatgaaaacctctatgatgatctgcttctacttaatacatagtaaatatattttccttttgatgttcttaataacaatttctcctctctagtttacttcactgtaagagtacagtatataatatataacatacatacaaactacatstgaatcaactgttactgttaaagcttctggtcaacagtaggttatcaagagtcaaatgttcaggaagtcaaaagttatatgcatctccacgatgtgcttatttcacattgcatgcctgtaccaaaacaactcatgcacgctgtaaatctatacacctactatgtatccataaaattgtttttgaaagcttacacgaatttttgactgtgcagggggttagtgtccctagttcccatgttgtttaagggtcaactgtaatatgactgtattatacaacatattaaaaagtggtaaggagaaaaattaagtagggatgaatgatgagaagtggagagggggttgcatttctattttattttatttttattataattactttttttttgagacggagttttactcttgttgcccaggatggagtgcaatggtgctatctcggctcactgcaacctccgcgcctccctggttcaagcgattcttttgcctcagcctcccaagtagctgggattacaggcatgcgccaccacacccggctaatttttttctgtatttagtagagacaggatttcaccatgttggtcaggctggtctggaactcctgacctcaggtgatccacccacctccacctcctaaagtgctgggattacaggcgtgarccactgcgcccagcctgcaatttttttttttttttttttttgagacggagtcttgttctgttgcccaggctggagtgcagtggtgtgatcttggctcactgcaagctccgcctcccgggttcacgccattctcctgcctcagccttcccagtagctgggactaccaggcgcctaccaccatgcctggctaattttttgtattttcagtagagacggggtttcaccatgttagccacgatggtctcgatctcctgaacttgtgatccgcccacctcagcctcccaaagtgctcggattacaggcatgagccaccgcacccagcccggcctrcatttctaagtagaatgacccgagagaacttattgagatagtgatattggggcaaaacttggatatctgaggaggttaaattcaggaaagggaatagctagttgtattcgtcagagctgttaaattcaggaaagggaatggctagttgtattcgtcagagctgtagcaggaaaaagatgccatactcaaactgggtaatttgaagagcgtgtaataacagagtagaatggtgcttcctggggctggggggaggaagaaatgtggaggtattattcaaagggtacaatattacagttacacaagatgagtaagtcctacagagctactgcaaaacacagagcctatagttaacaatactgtatcgtagacttcgaagtttgctgggagggtagatttatgttaagccctatcactaataataaataaagagggcagcaggaaacagaggtgatggattatagactgtggtaatgggttcaccagtgtacatttatctgcaaactcatcaagttgtacacattaaatatgtacagctttttgtatgtctttcatcctctataaagtcgttttaaaaacaaacaaggcagctttagatatagtcactgaatcagtaattaatctacttaaaagtccttgtattcagaccatatttcgctacaggaaaataatgattaagcattcaaatgccttgcttttattcagctatactatgtcttctgaaatcaccttatctattatgcagtaaattcatgaaacaaaaaagaaaagcagggcttacggaaacaacaagagcttcggtagccccaggttagtgatagtaggcaccatgtcacctctaggcctgaagtggtcccagaaaggacatcagaaatgagacacaagaacagcacagaaaggtcgtgtgcaggagctgtggtcttcattgcttcgttccttctgcccacagagaagcagcctcggggagcgggcggggctggggaatccctggcctccctcctttccttctggctgatcttctgcagaagacctcacaaaaggragctgaggggccaggaagcctgtggatgccctgaagaagaatgagtagatctgaaagggcagtagaacagaaccagaatccagtgcaaaggccctggggcaggagttcgcaggagaagcggggagaaggaaccagcctatgatccaggaatgcagtgaacaagatttgggaagttgacagagaatatgaggcctcctctccaaacagaaactccaggacgcttggttgagtcactgacacatgcacagtgctgagcatagtaccagacaccagagtctgtgttccagaaatggaagaataggtgagtaatgaaagtctaagtaagcaaattcttcgcaaatggggaaaagattgaatgtatagggctgcatatattagaagccccctggaatctctgcatccagaagattgcagtcacctttgaagcactcaccaccagagtctactcgcacactctcctgtggcagccgttcacctcggcccttttcctagggatttgccttcaagtcccagaatgggcctcagggtctttgcattcgcctttctatgagtctgaaacaccacccaccccctcacctgtgggcaggcaaagcacctcctgtgttcatgtcatctcctgtatcaagcccttcctgatgaccaacttgsagccgggtgccctctatccatgcctccatggccgcctatgataatgtcccccatatcatttaccattctgctcatgaatttggcttcattcatctcgcaacaaccccagagtattaagccactcgagggtggaagctggtgcttttacctccgcacctctcatgcccgacagagtccatggcagaaggccggctctcagattttagctgcattcctgaatgaaggaatcaataaaagccacacagcattaagtggcagactctagtaatttaattcctggtcctgggctctttgatataaaataactcttctatttttaatacaccccacattcctgaagatgacactactgcaaaattaaagaaatgtgatgaacagcttacaacctgcaacacactcggcagctcaaaatgacaacattaatttaatgaacttaaacactggtgaactttttaacacatccagagttatttacactgggaaatgcatacttaagactgcctgccaaagagactcaaatagagatgacacatatatctttcacatgttaatttgcatttgaaactttgagctttgatacaggttggcttttctcttttggaatgaagaaatcaagagactaattttttacccatccatccatctatccatctatccatccatccagccacatctttcctaagtgacaggtaaatcactagttgttgggaatgcaaagagataaaccttgccatcacagtatatttagggagatagacaaacagcagtgaatataatgtaaatttagtataataatcaaacgacaaagtgctgggggacacggcttgttgaatggcttgctggggagaagcagaaagaccatagcattcatggagatggtgggcatttgttttccaaggctaccataacaaacaaagaatcacaacctgggtggcttacacaatagaaatgtactgcctcacagttttagaggctaggagactgagatcaaactgtcaacaggattggttctgaagggtgtcagggagggatacgcttagggctttctccaagcttctagtaacctcaggagtcctcagcttctaaatgacatcctccgtgtgtctcacatcatctgatcctctgtacatgtcattctgtgtccaaatttcccctctgcacaaggacacagtcaaattgaattacagccgccttaatgacctcatcctagtttgattatctgcaaagaccctctttccacataaggtcacgttcacaggcaccagggggttaggacttcaacatcttttgtgggagacacaattctagccatatcatagtgatgtgttggatcttgaaagacgaacatgagcttgcctacaaggacggcagaagagggtactgatgtggtcaaaggaacagagaatgggagaccatgggatgggggagctggtgcagaggtgagggatgacactggtgatgagaggccttgatgctggacttcatcctattagtagtgagagaccactgaagagttttacgagaggaactaaaacaacagtagtattgtgctttgaaacactctttgttcatctgcgggagggctttttgctttctctcttgcttgtttctctttgtcctgggaaattgcatggaagccctgtttagctttcatgtttcaatgagggagaggagtttggggttcatgcttctctttcctaataatcctggcctcagctctggtataggactggtctataaactaagtggaaagtcatcacaaagaccttctcccacctctgtttaaactgggagagtcggtggtcacgccccttcagagtaaggggttcagagacataggcaaaaggaaacatcttccatgctacctctggctaccatggaatgcctcacacctgtttcctggaaacacataatatcgaagttggaaggawccatagaagtcctccaaaacatgttcctggaacttggaaggtgtaggagatcagaatctgccagcccaaaatatgtcactttagcaaaagcattattttgaataagagacaactgagaagaaacagaacaaaagctctctgccctgcctaaaagcaggacatcagtttacaaaggtagcagtgtcccttcactccttcttccaggaaggacaaaggctgatcatgaaagaagctttggcycttctcagccaggagaaggcactggaggaatctgcttaacaaattcccatgtatttgatatttgccttcccacagttgctgcacctagggactcgaagcctttttcctttgttttgttacttacctaaaaacttactgttctttgttgaagatgcaatataagctggatttctaaaccacccctttgagaaccatgcactccctgggtgtcccccctgcatacatgaaatgcacaccttaataaacttctgtttgattttctcctgttaatctatcttttgttacagaggtccgtcctagctaagaacttagagggaaaaattgatttttttttcctccccaacaaaggtatctcagaaaataccccagcagtggaggaaagggagggttgaaagaactggtgaatgaagggatccaagtctcctggtcctgttttgccttcagcagctccatttatcttctttaaataatacgtttattgagatataattcatataccaaataagtcacccttttaatgtgtacatktcagtggtttttagggtattcagagttgtgcagccatcacygctatctaattccrtagcattttaatcacccagaaaacaaaccccaaccctccccatattcccgccttcctcaaaccttcaaaaccaccaatctactttctatctctatggactggccaattctgacatttcatataaatggaatcacatgtacatatgtggcctttggtatctggcttcttccacgtagcgtgttttcaaatttcacccatgttatagcatgtatcagtacttcattccttgtaatagctgaataacattccattgtatggctagaccacattttgtttatccatttattaactgatagacattcaggtagttttcacttcttggttatcatgaataatgctgtcttgaaaaattttgtacatgtttttgtttgagaacctgttttcagttcctttgggcatagatacctggagcggaattgctgggccacatgtcaactccacatttcactttttttggaatcacccaactgttttccaaagtggctgttccattttatattcccaccggcaatgtataagggttccgatttctccatatcctctctaacacttgttatttctttttgataaccgccaccctagtgagtgtgaagtggtataccattgtggttttgatttgcatttccccaataactaatgatgctgagcattttttcatgtgctttttgacaacctgtgtatcttctttggagaaatatctattcaaatccatcactcaattttttaattggcttatttgtcttttcattgttaagttataagagttattcatctattctgtacataagtcccttatcagataaatgactgcaaatattttctcctattttgtgtcttttaattttcttgaaggaaccctctgaaacacaaaagattttaatttgatgaagctcaatttatctatttttttcttttgttggttgtgcttctagtgtcatatctcagaaaccgttgcctaatctaaagtcacaaagatttactcttatgtttccttctaagaatctcacagctttagctctgatcttttggttgatttactttattttcatttttactctttttagaggatagcaatccataaaaaatgtgttttaactcccccgatcccaagccaccatattttagattctagaaaggagataaataacttgccatggtcacaaaaggagtttcaggcatcgatggactcagagcaagttctctgcctcaatgtcaacaratgactctggcttcccacaaaagatgtacaggtcaaacctccctgacatgcacgaagacctggatgctgtgtaggtcagaagggatcctcccctctcttcacagaagactgtggcacccccacgtaaacagtcagattcagatgtgcagcagcctgaaatgaccctgcgtcatttgcttcttatttgtcccataactgtttctgatgaatctcaggccctacattccaccctcgaaacctaccccaggtatacagggaatagaatgtcttcttcaaagcctcccttccccacatgggcttttgtctcattcactcagctgaactcactgagcatttaccaggtactctggctttggctttggggatgcaaaattgaataagacgacacacccctgccctcccagagctgtcagttttgtggaagtaacacacgctaagtcctggcattttaacactttcccaacatttagtcataacaagcgttaactgctaatattaattactacacacctggctctatttttgtgctttaggtgcattacttaagtccataacagcgttatgaggtagtgatatcactgttccattttccaggacatatcacacaccaaccgtgtgcaaagcactctacctaaagatcagcgctaacagaggaataagcagaggcctccaggagcaaagagtgaaaagtctcccaaggattcaagtacgggggaagtgggtggagctttcaccgtagaatctttcctggagaaaaagcaaagagtgggacaacaatgaaggcattaaaaataactgtcaagttgaagaaaaagtgagtagtgatgtggctggattctagggagatggggctgggtaaaggcagagtgtacaagcctctgccagaactcacattcacacaccacagccacaagagccggcaaattacatggggaaaaacyctgcacaagcttgccttgtgctgacatgtactattattatacactctgtgcctttgagacaacctgccacacacacacacaaagccagcaactaaaaggaaactggcattaatacaattcagtgtgagggtatgatctggggstgtggaggtggagatgacgttgttttatttcttacaataatacatgtatttcaggtaatcgaatttggttcttagcgctaatgtcattttctgctaatttaatgtcccaggaatccctccgagtaagaagattgctcgtggaatgcaaataaagcccattctgggaaaaataaccatttccccaacccaggtgtgctcaaaggctgaacaaaggccaatcccacagagtagagggagttaaatagatcctaggaggtggtctggrtatgaaggctgcttgctgggcgaaggggcagtggttatttgagattcttcattgtgaaagcaaactaatcaggctctctagcatcaggcatttggaaagccagcagggcactcaggggcctcagatggctcagatgggaggagaggagggcagggaaatgaggaagggggaatagtgtccatctggctagctctgcttccaaaggagcacgaagcatccctcagcctcctggttgggcagtcgtaagagaccatgccagggccgggcgcggtggctcacgcctgtaatcccagcactttcggaggccgaggcaggtggatcacgaggtcaggagatggagaccacggtgaaaccccgtctctactaaaaataaaaaattagccaggtgcagtggcaggagcctgtagtcccagctacttgggaggctgmggccagagagtggtgtgaacctaggaggcggagcttgcagtaagccaagatcacgccactgcgctccagcctgggtgacagagcgagactccgtctcaaaaaaaaaaaaaaaaagagagaccatgcttcccagtttccatggactggaaactgtatgtccccatgtatgtccctatcccccccgcattcttaacagtgttccagtttggacaagacattatacagtcatcctagatacagtgggcagagtatgacaggaagagtgaagaaagcraagacaaaatttgcaagccgtgtaacctcagcgtasgtacttactctctcaggccttagtttccttattggaaaaatggaataacagtacatgcctcgcaagtttgtcaagattaaaagagataccatgtgtcctttaccgtgccagccctgggctcactgggcacgtgtagaaacttgatgggcgctgagttatcactggctgttggtgcacaccggcaggaccagcctgggatgcctggctttgggaatagctcttttccatcctaatttcttgatgaactctcgagcctccctgtctcctgttcctgcccctgggcatctgacatcctcagttcacagctaactgcagaatcatagcatgaaaaaaggcatacttctccaagggctgaataggatttcataaaccaaaaaacctacagcttycagctgcggtactgtcctggtctaatttaccctgcagccrcgcaagacaatgaagttgggaatttctatttgagggagtatttttccccttctctccctctcctgacagtggtcttcaataacagcctgtgaagctctgggtgcagggaggctaagggagggagtcagagaagtgaactcactgaaacgcatctgcagaagcagatcactaaatgtcccacagacagtggtgcagctgacagtgcctgagctcagtggggcagcctggggagaggagaagagcaggaaaaaattaagctcttccttgggcctgatgaagattaatatctcctccctgatgagatgaggcagtttaatcgctgctattaatacagaatcactgagagccaaagatgagggcatggaaggaggcgggggatgagatgagagcacctcaaggtatgagtacagaagcggagaaggaccccctgaatgtagaaagacacagctgattttcygcagggctcaaaagccaatagagaaatttgagagctgaggcactgtgtggtatgatacagtgtttcagacttgctgtgttgcttttcctactgggatcatctgactgattgggttaaacatgccgatccctaacaccacatctggcatacgatctcagcacacagaccttgaccatcgcttcctggagagcccaacaatggcaggactcaagcgtggtcttctgactcctctccttggcctattcctagtcatgcttcaagattcagcccaggaggcatcttcttccaygaaagctttcttggatgtccccagatacttaggtgcccctttttctggattcctgaacaccggcatacatacttctattatagcaagtatgctaaatggcaatagtgagtccttccctgcaaaagaagattgctctcagccttaaattcttgcttcccacctttctataatttccctttttactcattaatcagtgtttccatcatctcatctcctggtttcctccgaggacctattatcttcagaaaaggtcattatcacctaagactaacaaaagaacaattttcatcaggacagaaactatgtcttaatcttagtgtctttctcggactctagtccagtatcagacgtacacttggtacttaataaatatgtgctcggtatgcaatgatctaagagaaaaagaaggggttagggcataaatggaggcaccaaaaaatcagctggccacctaggggaaacctccacatccaaaaagaaaggtgcaaaccaaaccactatggagaccttgaagtcctgcaacctgctcaaaagccacaagatcattctcaaaggtgcgccattaaataaaagcaaaaacagttcatgccctcccccgccaccgccatcctcactcactcaagctctgtgtgaattttcaactcaaatatgctcaggattcccgactctccaaatcccacaccatctgacatttgggcctgagagtttgagaaatgtgaaagaggcatggaagaatcccagaagagtaggccttgtgcagagcaatgtttaccttcgattgtcacagaatgatctggaaccacttcattaaatagaaggaaaattgcaaatgtgaaggctactagtttgggattcataaaagaaggcaagcctttgtcaaaatatgtctgctgtgtggatgataagcagcactctgagcacgaaggccacacgtgtggaataaacgctgcaacattataagcactgaggcttctggaccccagcatttaattagattacagtcttgacaatagctcacctgatacatcatgcaataacaagctccctygggtaggttaaaaatgcaaattaagtgtcagaaataggaacaccacctcaactactgaatgcactcccactaagtgcaaagcacaggagatggtttaaagaggcccaaaagccagttttaaccttcaaggcacaggttgatagcaatataaatatctatagaaagaccaacaactgaagcatcaaatattagtcacctggattagttgcaaacatttctggtggagggagctgagactctcctacacacccaagtgtgctgcagccaagtgcagaaatgcggagccaacaactgcacccaacaccgctgggcttggagttgcgagaagagcaggcttctggcagcaccaacacagcctgcaaatacccatgaccataatttctcacgatgccacaggcaggatgaggtgaggaccccgtgaaagcgactgcacagaaacagagacactgagaaagcacaggccaagcgcctggaatggcagcgggaagaaagagctctgtcctgcaatcaccttgcragaaatccaacctttccaaagcccagagccaggaggggtgtgcaagagaacgtgagtgggttccatgcccaccctccagatggatggagcctctgttcgggcaaagaactgctccttggctgagggtcccagcagaaccagcttcagataccccacttttaaccactcacaaatgagaacgtaccagttgtcaccaaccggctgtgtttctgcagttcatttaaccatttggggcctcagtttgctcatatgtaagatggggctaacaagggttcctctttacaggctgagacaatacagcctggtaagcaaaatcatggtccctggagacaagacggtgagccctggagtccccccaactctacttcccaggggagtgactttgggaaagtcattgaacctctgtatacttcagtttcctcgcctgtaagcagggataataggaccagcctcatagggtggttgtgaggatggaatgagttaatccaagtaaatcacagagaacagcacctagcatatagcaagtgctccacaagcatcagtgactactcttcatgtgatgatgtagctgttcttttctatcctgttctcataaaggaggcgatcactcactcatcaaccttcgtgcaccgagcacaatgtgtgcaaggaactgtcatgtagtatgagttcccttacttggcataccagcccctaaagcaaggactaggagcccacttggtctgaggttcagaaaggtcaggggacccctccaaggccatgtagccagcaagtcgcagcatcagattcagggcccaggtcttctggtgcaagaacccctgcactttctaccctaccacatggygagagcactgcctaataaaaccacgcagatgcttcagctttacttcaaccagatttttctttataataaaaacaaaagtacaatgtcttttttccactggaaattttaaaaaggcatccctatctttctttccaaataatgtctttttttaattttcctagtaaagatggttgacactggcttctagctcacctcactattggatgtcactggttcaagagttccaacacccagtgataaagtctgtatctttgtcccctccaaatctcatgttgaaatctaatctccaatgttagcagtggagcctggtgggagggtcttggatcatgggggcagatttctcatgaatggtttagcaccattctcttggtgcgatccttgtgagatatggttgtttaaaaagcgtatggcacctccccgtaytctctctcctgcttctcctctggtcatgtgacacacctgctcccactttgcctttcgccctgattgtaagcaccctgaggcctccccagaagccaagcagatgccggtgccatgcctgtatagcctacacaaccgtgagtcaaataagcctcttttctttataaattacccagccttaggtatttccttgtagcaacgcaagaatggcttaatatacccaggtaggagcgtgttggaagttcactgtcagatctttgatcagctatcaatatgtcctgaaccagccatggatcactcgtcccacacagctcttcccaccgacctctctgccagtatccatttgctcaggtcaaaacctggagtcatcactgactctttctttctctctccttcacaacccaaacatcaccaaggcctaaaacctctacctccaaaacctatccccaggcagccacttctgcctcatctccattgccactaccaccatctaagttcaggtcacctcactgcttctctgtaaaagtatgttggctacccagccggtgatctggcctaaattcctgtccaccatagatcattctctatatagaagccaggcttattattgctcttcgatctgacctccaccacaactctttgaggtagtcagggcagatatcaccacccccattttacagatgatgaaagggagtcctcgacttgtcacatggctatttagtgatgaagttcattattctacaatccagtaatttgacttgcacaagacattcaccttccctgggttttaattttctctaagagacagataacgttagcccagcttgactcacaaggctgttgtggagattcaatgagaaagtgagctctttcacataccagctgagtgaccctgagcaatccactcagccactctcagttctcattttgtgctttttccatcatgccccgctggctgtgaatccagtccaastgcgtgcaaattatgcctttgctttatatttactgagcaacaactatgtgccgcaacagatttttttaatactctattttatttgcaatcacagatctgaagtttatcaatacatgatctcctcaaaaacgaaaggaataaaacaagtatctgcaatttgctgagaacttaatatgtgtcagttgcctgcaaaactcatcattctttagactttcaaatacatctgtgaggacggtattgttgtttccacttacacatgagaaggcaagagacaagcccacggtcacccagctggtaagtggaacagacaggtttcaaaccctgagtgttctgactgcaaagcccctgtccgctccagtcctactatccccactcccaggaggtggatgctcctctgtgatgggaatggaatggggatgcctggcgtacctgggagctgctagtcttcctcttgcccaggctatgtggctcctctgtgtcttcctaaatgacaacgtgctttcccatgggtcctcagagcatgcctgctgccgtgatgccctctcctgacctctggccctacagggccctattaggttttatgtactgtgttctcattgcaccggggacacacttggacttctggatggctctgccacgctcacgccctggaaaacacctcattgtccctgtttcctactgactggtacagtgctcagcacagaggaggaactacctacagccaaatgattgtcatagaaaggagggaggagaaggaggaaagacaggcagcaagatgcactgtatatatggtgggtgagaacgtgggctccaggccacacaagtggctctgccactcacaggttgggacytagggcaagtttctcaacatcctgcacctgcctttccctctaaaaggagggtgatgctagtgcctccctgggtgatgtgtcaygaacataaatgcaagtgctttmgagcagcacacacggcaaagccccaccaagtgttaatttctattatcccacactaaggaccgagggaaggaattgcctcaaagcctgaaggagccgagggatttcacccagggaacagaacaagcgaagaagccaagaaaatatgcaatccaagggtctctttctgatgactacctgtcactgaagcatctggaatgcaatacagggactgtttggagcaaaggtgtggaccagagggaaaacagcctcctttctatttgtcagagagccatcagagcagcaagagctattaggaagaagactggtgagagcaaaatgaaaaaattttgtaaatactcactctyggtgatctttgcttatccgccccttcatgccactcacctctgagtgtttatccaaaacatgaaattaagccgtgggtgaggtgctcgtctctgtcagacctgtctccttcagtgctggctcagaaccagtgcgtgtgtgtgccctgacaatctgagcacccagaaggcttatgttcatgtctgcactggggatttgaagagtccaagaaccaatctgcccccaaactgcgctcaagtgagctaagtgcagcattttgagaagcgttaactcacagatacagcttctaggaaaggaaaggcgagggcccggttctcgctactgcttggagcaggctgaccctaatctgccctgaaaggctggatccaatcatccatcagccacagaagccaaggcaactggcacaggatcccaggaggcaaagaaaatgcatggcttgaaaagtgataaaagacacaaccgagcccactgagcctgggtggaagttccgacctagtacatttcctaggatctgtgaggcattattcacacatagggagaggaccaactctacctgatccctgtggagaactaaccaggagggagcgaccttacatagaaaaaaaagagatctagaatcatacccatttaagaaatgaaagaaaccttagagagatcacacaaggcatgcctgcctgggttcaatctcagctttacctattttcaaacttctctgtgcctctgttcccccatctgcacaataagaatatcagcacgaaaattagtcgggtatggtggcatgcgcctgtagtcccagctactcgggaggctgaggtaggagaatggcgtgaacccgggaggcagagcttgcagtgagcagagatcacaccactgcactgcagcctgggcgacagagcaagactccgtctcaaaacaaaataagaatattagcacctacttcataggacagttctgaggaagaaactagttactacaagtcaaggacttggtgcctgatgtacaataaatgctccataaatagtaactaatattatttttatttctggcacttcaagattcattgagcatctactctatttcaggtattttgccaaagactaaggattcggagatgactacggaaaggtgagtcctcactatctggagtgtgtgaaatccaaacaaataataataacaatgacttggccagcggaatgaatgaataaccttggtgatccacccaatggcactggcactttgtgctgggcacttttgtaggcaatgttattagagtccacaggaaagttctaaaaaggaagtatgctatataaatgaagtgcaattcaacataataaatgattaacagaagtacaaacaatatatttgccaggcacttggtgtgaaaactaagatttaagtcagaggagataaaatagggagtgaggctgttgtgcaagacaaacagtaggcactccatcagcgatgttgttaccatgctggttattattaaatccaagtcctggagcccaggagaggaggagggggcgctgagaccaggaacccagaggctgcacttaatccaggtcaaacttctcaagtgggccagaagagaggcacttgttcaaaatacagacacctgggcacctcccctgaggaaccccatttagtagatctagggcaggattctgggctgtcttgttcattaagtgccccggggtggactggaagtctatatattaaacaaatgccccaggtgattcttatcatctagcaaatgctggaaccagagatctaggtgacctccttataggcaagaagaggaaatactctctcaggttcctctgaactttgattagcagctaaaggcaagtccagattgaaaggactaagcttcccgaggagaggagagcaaggaatgagaagccagaggccaaggtgccaagatccactttgcaggcctgtgtgacaggtccctgcctacccttcctgacctcatccaccatgttgcttctcctcctgacctcatccaccatgttgcttctcctctcttctctttctctccagccacccagactcctccttggcatcctacaaaagcaccaagcactctccatctcttgctcttctccctgcctgaaactcttttccttcccctcaccacctggctctgcttaatgtcaccagtaagagaggcctgcccagatcaccctattaacacagcatttccctttccccactcctcaccaagcccattgccctggcactatcatctcactttgctttatttttctttgttgcacttatcaacactcagcagagcatgatgttgttcgatcatcatctctctccatccactaggaaaactaagctccatgagaagaggggacttgcccatgtggctcagggctctatgcccagtgccctagacagtgcctgactgtgtgtgcggaatgaatgaataaccttggtgatccacccaatggcactggcgctcagtgacctcatctgaaatggtaaacccttcttccctaattaggttatggggggattatttcactgtatcaagaaagctcatgtccaagagggccaagcaaatgaatcataattgttatcaacaggtgcaatggagagggttcccagctgggacaccacctcaagcatccatcactggctgtgtgccagaaatggggcactgtgtgccctctgctggagcaaaaaaaaaaaaaaaaaaaaaaaaaaaagccaactatccattatctaaggctccaccccagaaagaaggaatcttggcatggccagggttcttcctatcaatgcaggtttgttttttttttttttttagacagagtctcagtctgtcgccaggctgaggtgcagtggcatgatctcggctcactgcaatctccacctcccgggttcaagcgattcccctgcctcagcctcccgagtagctgggattacaggtgcccgccatcacgcctgcctaattttttgtattttagtagagacggggtttcaccatgttggccaggatggtctcaatctccagacctcgtgatgcacccatctccacttccacctcccatcccgtagctttaaatattcaactctgttgactccttgagcgacctgttgcttccagaagtacagtcaacatatccaaagcagctgctgagacaaaatgactctgcaaacctaattcatgctaggcaccatggactcgttttcatcttgcaaaaaccctcaacagcacccccaatttacgcagagtcaatttgcggtaagagaggttaagtgactcaatgtggacacacagcatttaaaaggaggactgggacttagacagccccatccaacatatctgttaggaaagtgattaaactctgcatcagaggatggccctttcctctttgttctttaaagttctcactacaggtcattttgatgaaataatttaattttctccaaacatggccaatgcattcacaaggaagtgccagtgcatttatgaccacagctgcagtatgttaggaagtctctccctgcccctttctaatgcctgaagaaggctgctgaggctgtgagcttcgttatatcacagttctctaggtttcagttcctcagttgtaaaacaagggtctctctggaccaggtgggtgacgtttttgcatccctcccaggagactttccaggattctagaaaaatatgagaatgaaaggaaaaacaaagatttgttaaatgaccactgtcggatgtaacaggtcatttagtctttataacagcggtgtaagctacaggttgtgctctcctcttttttttgagatggagtttcgctcttgttgcccaggctggagtgcaatggcacaatctcggctcaccgcaacctccgcctcctgggttcaagcgattctcctgtctcaccctccagagtagctgggattacaggcatgtgccaccacgcctggataattttgtattttcagtagagatggggtttctccatgttggtcaggctggtctcgaactcccgacctcaggtacccgccctcctcagcctcccaaagtgctaggattacagctgtgagccacagcgcccagccctgtgctctcctttttatggagaagaaactgacctgcaatgatgttgagtaacttgtctatttcactctgtgatttaaatgatgtctactaaaattcaaactcccatccacttgtccttgggggctatgttcccccaaccatcaacatttgccctataaaaagtccttctgtaattttcaaaagttttatctgtttaggctgtaagccagcctagatgactcctgatgtccgttccttctcttgattatatgagtctatgacagaaacaaaatgcaaactgcattaaaggattaactgaattttttcgttatactggcttataagaatcctgctagccacagaagttcgcatgtcttctctgttgtccaagataccccattttcacttgtctcagggtttgtctcgtccttgtctaaagcttgagcatatcgactttgaaatgtcatctaccagttgtttctatatctgcaagttcttcagtgactgcagaataaaggacctttttagacaaggacaggctcccttgctatcttggtggccttgctcaaacggtacaacgtccctgagccttagtttcctcatctataaaatgggacaaggatgaagttgtttgggggaataaatgagataatatgtgtaaaattcctagcccagcaccaggccaaaaggtggaaactcaaagtctaaatgagccagacagagtcaaccactgccatacgcagataccagaagctcttccctctcaattctgttctatgtaaacgacagtgcagggatgacacaaggatcaacaaggaaggatggagatcgtgacaaaatggatcatccgagcactgtgcacatggacagccagtactcagctccagccagtagctactatgatgaaatgagggtctggttttgcagatcttttcactttttttagggaaagccaaaaatcatgacttcttatgtgcaatctcccaatatttaaccattagcaacaaattcaaaaatggtaaaagcagtaggcgggccaaacccaacacaagtgcaagccagatgcagccaatyttggtttaacatgcgataaatagaaacgattgctacagtttccattattgttatagtttaaatagtacatttccttcttgtgtttctatatcttccacaatacaataataaaaggttttttttttttccatttccaggaataaggattttatgaaaatgcatgtttgttgaataacacaaaggagaatattatctaatgtggcttggggtcaatatcaagcagtaatattgttttagtattaattagagccgtgtcattgcaagagctggtaagaatactggtcttgtttccaactgatgaaaacactcatacagattagggtttttatgagtaaatttcagatcttgaaatcagtgctgtgatccactctcatagggtgaatatctgtccaaatggtatatcagaaaggaaaaaagccaatgtcattacatagaagtgttaaacaatgatctctaaagaaaagtttcattcttaaaaagcatttgaacttcaaagcccaacaatgacatagattcacatatcccaaaggttaagaaaattcctctcatctaaaaacaatgcaaaacctacaaaatcacttcaaattctgctaccatcaagatttgcatagttttttgaaaactaaaataacatattcagaaaaatgaacaagtcctaagtgaaatacttagtgaattatcataaagtgagcccagctatatagtcatcacacaggttaaaattaaaattaaggctgggcgtggtggctcacacctgtaatcctggcactttgggaggccgaggagggcagatcacctgaggtcaggagttcgagaccagcctggccaacatggcgaaaccccatctctactaaaaatacaaaaattagctgggtgtggtggcacacgcctgtaatcccagctacttgggaggctgaggcaggagaatcgcttgaacctggggatggagcagaggtttcagtgagcaaagattgtgccactgcgctccagcctgggagacagattgagactccatctcaaaaaaaaaaaaacaaaaacaaacaaacaaaaattaaaattaaattattagcagcatcccaaagtcttccttggggcctgccccagtctctgttctaccctccctaccagagttaaccaccatctgaattggtaagagcctacattaatttttgcctgtttttgaacttggtataattggaatcctatagtatgtattattttgtgtatgtcttcttttgctcaatactgagagtaatttcattttcatcactctatagtacttcactatataaacgtgccactattctttttttttttttaagacagagtcttgctctgttgcccagtctggagtgcagtggcatgatcttggctcactggaacattcgcctccagggttcaagcgatcctcctacctcagcctccctagtaggtggggctacaagcatgctaattactacctaattactaccaagcccagctattttgtatttttagtagagatgggggttcgccacattggccaggctggtcttgagctcctggcctcaagtaatctgcctgccttggcctcccaaagtgctgggattacaggcgtgagccaccacacccagccccactattctcattttagtgttcatgaacatttcatagtttcctgtctggtgctattataaataacgctgatgtgagcactctagtactagtcttttgtttccacctacatgcatttctcttgggtgtattgctaggggtagagctaagggatcatggggtatgcttggctttgcttggtaatactttgggtaagttttccaaagtagttatataaatggctatcttttacttaaaattaagagacctattcaaacatcaaaaggaccctctgaataaaatcctccctccttttgttaaattggtatccaaaatcaaaaaataaaataaaattgacttaaaaccaggaaacctgcaacaaagagcagacattctgaacttatcttttcagaaaaccttaacgcatcatcagttactgattaaacacctatcatagatgaagtattatggtcttaaatcattcagacaattcagaccaatacatctaaatacagtgcctttctcatgagctgtaaatgaaatgttggatacatatatgtcaaattcaaatgcaagaacccaaaactccaagggaaggatgagatgtccatatgaaaagtgcatggcacaccatctctgctctgtccataaaggacaagaagaggatggagagaatgtgggagcatgggactgtgggaaagtggtatggaaggcggaaaaatgaccccccaaaagatgtccacatcctaatccccatggccaatgaatatgtcatcttccatggccaacagggcttcgccagtaccattaaattaaggattttcagacagggttgttatcttggattttctgggtaggctcaatataattacaagggtctggccaggtggggcagctcacgcctgtaatcccagtactttgggaggccaaggcgggtggatcacgaggtcaggagattgagaccatcctggccaacatgatgaaaacctgtctttacaaaaaatacaaaaattacctgggcgtggtggcacgtgcctgtaatcccagctactcaggaggctgaggcaggagaatcacttgaaccagggagtcggaggttgcagtgaactgagatcacaccactgcactctagcctggtgatagagcaagactccatcacaaaaaaatagtaataataataataatagtcctaataagaggggggtaggagagtcacagtcagagaaggagatataacaacagaagtagaggttagcatcagagagaaagatttgaagatgccacactgctggccttggggatggaggaaggcgtcacaagccaaggaaagcgggcagcctcaagaagcttaaaaagaccaggagatggattctttactggagcctacagaaggaaccagccttgccaacaccttgactttagcccagtgagaatgattttgagcttctgacctctggaactgtaagataataaatgtatggtttttttttaagccactaagtttgtggtggtttgttacagcagccacaggaaactcatacaagttgcatgttgggactcacggcaaccacatttcttgattcctggtccaggcctcttgccatgacctcttaaaggagatgcagccaatggatgcagcaggattatttgttccaccctagcaggatagccaatattattttaagaccaaaggctacgtataagaaaagtagaggtcaggtcaggtgcagtggctcatacctgtaatcccagtactttgggaggccaaggtgggcgggtcacctgaggtcaggagttcaagaccagcctggccaacatggtgaaaccctatctttactaaaaatacaaaaaaaatagctgggcatgggggtgggcacctgtaatcccagctactcaggaggctgagacaggagaattgcttgaacctgggaggcggaggttgcaatgagctgagattgcgccactgcactccatcctgggcaatagagcaagactccatcttaaaaaaaagtaaaaggaaagtagaggtcatctttgtaaccatctcacaagcaaataattgggatagactttactgccctctcagatgccaagaccttaaagagactcttaacagtcccaaggtaagaactacagacacatgcactgggcattctttgggatgcatgtgtcacctgggcactattcagagcagcccacttgcatgctcacattttcatttgttgcaagattttgctcaagctcagcactaacacttattaaacattggctgaaaaagttcttttttttttttttgagacggagtcttgctctgtcacgcaggctggagtgcagggcgccatctcggctcactgcaagctccgccccccaggttcatgccattcacctgccccagcctcccaagtagctgggactacaggcgcccaccaccacgcccggctaatttttttgtatttttagtagagacggggtttcaccgtattcgccaggatggtttcgatctcctgaccttgtgatctgcccgcctcagcctcccaaagtgctgggattacaggcgtgagccaccgtgcccggccagctcttcatttttgatccaattttttaaaaacacaacttttgtattataagtcccatttcattttgcattcggcatcctatgttcttatactccataatatccttactaaatgatacatttggaccactggcaggacagcaaaaataggctttcctgctaaagctgctgcatagcctagacttgggggatactgaaagctccagcagattattcaccaataccatgtacaatctgacttcccagaccttccagcacactctctgggatgaggggctgagggatgggggagcagacacagggctggggaatcagtcatgtctggacaaaccctccttggataaaatgcaccacccccatcccgcctattccaccacacaagtgccctgggattcccccataataataaggcaaagaaaaagctttaacttacaattctttcactctcactgccagtcttcaaaatagcccagtatcggaaccgtatttttttctgttgaaatttactgtgacaacactcaaaaacattcatttcagagggggttcatgttgataaaaatggaagcaacagggaactcaggctttaggaatgacaaaacaggggtgcaggctgatatcagttcagaagtgaagatcctctgccttttcatgacactggttttaagtgttcaggacttcacatcctctgaagacatttgcttttaaataacacccacattgtcccggactgcctccctgacaatgggaaacctttgcaccgagctggttatgaattatcagagggcagcatgtgtgaagagttttctgaacggctgaaaagcaccctttttccacatgctgataagtctctaatagccgaacacatctccttgatggacagaaaagaagaaccacatcccacaataaaacccactgggctctgagaaaaggtgattctgatagaaaataacaggtatgctctaaattcaaatggggctatagttgagcagattcactccagtcccggaattaacatcacgaccaaatgaaaggagccacgtcctcaggtctcaaaaatcacagatgctcacagcaccaagagcccttccctaccagcggttcctgtgtccctcaataccacagtcctacccagggaacattcactaaggacacattaggagcgagtgctcagttagacactgggagtgtaacgacgaataaaacacttccttctctcaagaaactcataggtaagtggttagaaagacatcaaacaagcaaaatatctcttgatgactgctggtcatagatgtttccacatgggatctggcattaggggaaaatgacattgaatatgggcattgaaggtgttggctgggagggagggttacagaaaaaagaactgaatagtgggcagtaagaccgcaagagtgaaaattaagaatcagagaaatagtttcctcaggtagttcaacagggtattataccctgaagacagacagtataggttggggaaaaaacaattgtggaagaccccagagtcatggtaaggagtccacagtggatccaggaggcaatgatgagacctgtcagtactcaaagtcggaggagggcacatgtgttcgttcactcattcattgaacaaacatttggggaccaaatcttctcccggcactacagtaggtgctagaggtggaagggcgagctaaagagacccgctttctccattcccaaagcttgtaaatctgctgtgaaaacaaaagattataaaaacaagaaaaataaagagccctgagtattaagggtacatacaaggagttaggtaaatagggagccaaggaagcctgctagttaagggtcaggagcaattaattgtgtttcagctgagacccaaggatctaggcagccagacaaagaagaggaaggaagtaagagcaatagagggtgtcagggagaagaaagaacaggtgggaagagcagagcccacagagggcgatgtacaccaggacttaaaagaatctggcgtggctgggtagaggatgccagata

SEQ ID NO: 97132 - DNA, 107020 bp, Homo sapiens
cagagagctgattggtccattttgacagggtgctgattggtgcgtttacaatccctgagctagacacgaaagttctccacctccccactagattagctagatacagagtgtctattggtgtatttacaaaccctgagctagacatagagggatgattggtgcatttacaaaccttgagctagatacagagtgccgatttgtgcattccccttagctagacataaagattctccaagtccccaccagactagctagataacagagtatggagtggtgcattcacaaaccctgagctggacacagagtgctgattggtgtgcttacaaaccttgagctagatacagagtgctgattggtgtatttacaatcccttggctagacataaaggttctccaagtccccaccagactcaggagcccagctggcttcacccagtggattctgcaccgtggccgcagatggggctgcctgccagtcccccgccatgcgcctgcactcctcagccgtcggacggtcgatgggactgggcgccctggagcagggagcggcgctcgtcggggaggctccggctgcgcaggagcccacggcggtggcagagaggttcaggcatggcgggctgcaggtcccaagcccttctccgcggaggggcagctaagaccggcgagaaatcgagcacagcagctggtggcccaggtgctaagcccctcactgcccggggcttgccggcgggccggccgctctaagtgcggggcccgctgagcccacgcccacccgcaattcgcgctggcccgcaagcgccgcgcgcagccccagttcttgcccgtgcctctccctctacacctccccgcaagctgagggagccggttccggccgtggccagcccagaaagggactcccacagtgcagcggcgggctgaagggctcctcaagcgcggccagagtgggtgccaaggccgaggaggcaccgagagcgagcgagggctgcgagggctgccagcatgacctcacctctcagtcccagctacgcgggaggctgaggcggagggatcacttgatccagtgaaggtctaggctgagccatgatcttgccactgcactgcagcctgggcgacagagcgagaccttgtctcagaaacaaacaaaaatctctgctctagagcacagtttctttatcttggcactattgacactttgacctggataattctttattgtggggagttgtcctgcgcattgtggaatgttgaacgccatcattggcttttacccttagaggccaggaacatcccccagttgtgacaaccaaaaaagtctccagacattgccaaatgtcccctgtagggcagggaccactatctgagaaacactgatctggaagagcaaagtgtaaatcaggagagatatggatgaaaccactcctagatgcaaattgcagctctaccaatcatggctgtgggtaaattacctcttttcagccttattcagtttcctcagatataaactgaggatattacacctaccaaatgtggttttgaaaaaggtcaaaatagtctgggcgcggtggctcatgtctgtaatcccagcactttgggaagctgaggcgggtggatcacctgaggtcaggagttccagaccagcctgggcaacatggtgaaaccccgtctctactaaaatacaaaaaattatctgggcgtggtggcgcacctgtagtcccacctactctggaggctgaggcaggagaattgcttgggccccagaggcagaggttgcagtgagccgagatcgtgccactgcaccatagcttgggctacagtgcaagactccatgtcaaaaaaaaaaaaaagaagatcaagataaacaaagcatgcaaagcactttgcagagtgctgtatatggtaagcatttaaaatatggtagctactaatattgtccagaccatagttgacaccgtaagtatttctttatgaccgtcactcattcattcaacagatatttattaactggggtctgtgtgccagatcataataagctctatctgaattccccctcagacccttatctggtgcatataattatcatctgtgtttatttatttattattattttttgttttgagatggattttcactcttgttgcccaggctagagtgcaatgacgcgatctcggctcactgcaacctctgcttcctgggtttaagagattctcctgcctcagcctcccgactagctgggattacaggcacccagcaccaagccaggctaagtttttgtatttttagtagagacgggagtttcaccatgttgtccaggctggtcttgaactcctgacctcaggtgatccacccacctcggcctcccaaattgctgggattagaagtgtgagccactgtgcctggccgtatttattctttttttttttttttttttttgagacggagtctcgctctgttgcccaggctggagtgcagtggcgcgatctcggctcactgcaagctccacctcccgggttcacgccattctcctgcctcagcctcccgagtagctgggactacaggcgcccgccaccacgcccggctaattttttgtatttttagtagaggcggggtttcactgtgttagccaggatggtctcgatctcctgacctcatgatccgcccgcctctgcctcccaaagtgctgggattacaggcgtgagccaccgcgcccggcccgtatttattctttatgaatggcattttttggggagctgggggtctcactctgtcacccaggctggtatgcaataacaccatcatggctcatgtggactccaactcctggtctggtgtgaccatcccgcctcagccccactgagtagctgagactgcaggcacactccaccacacaggctaatttttttttctttttttttgagatgaagtcttgttctgtcacctaggctggagtgcaatggcatggtctcagctcactgcaacctctgcctcctgggttcaagcgattttcctctctcagcctctggagtagctgggattacaggcgtgcgccaccacgcccggctaattttttttgtatttttgtagagacggggtttcaccatgttggccaggctagccttgaactcctgatctcaagtgatccacctgcctccgcctcccaaagtgctgggattacaggtgtgagccaccacacctggcacacactggctaaatttttacttttttttgtagagatggggtcttactatgctgcccaggatggtctcgaactcctggcctcatgtgatcctccaaccttggtcttccaaagtgctgtgattacaggtgtaagccactgtgtccagcctgtgaatggcacttttaataccagcataatattctatcacatcgatttttattcctggccctgacctcccttctgggattcaaacccatatgtccagctggatgtcctcccaggaacattaaatttggcatttggggccaattagcccagtgcctagcacctggcaagtcttttcataaaaatgagctattaccaatcatcagtgtcgctttttagtccctgctagctgatccacctccttttgctactcctcactgggttcccagtgtcacgcattttctttttcctttttttttgagacggagtctcgcactctcgcccaggctggagtgcagtggcgccatctcggctcactgcaagctccgcctcccgggttcacgtcattctcctgcctccgcctcccgagtagctgggactacaggcgcccgccaccacgcccggctaattttttgtatttttagtagagacagggtttcaccgtgttagccaggatggtctcgatctcctgaccttgtgatctgcctgcctcccaaagtgctgggattacaggcgtgagccactgggcccggcccggtgtcacgtatttttatcagcagccatttgttgtccctgtggggagcccagaaaacccagcccggttctcccacctgcggggaagaaatgaagcaatgataatgaagacactcccatgccaagcccatactgccctgagcaatcagttttggtggggagaatttgctagcagaaggcaggacataaagtccccacagcagcctcactgggtgtggcagcaaatcattcctgaggcctggccggtgctaccaggcacagcaggggtccgtgcagaagaactagatttattccattaatataccgttacagcaacaatgtctgctgagtactccggaactgtaattcacatttcctgaggctgtagtagggagaatttggaagcagggcagcacagtgctaaccagcaggctctgggtgggacagacctgggtttgagtcctagctttgcctttcactatctgcattatagtcagcgagtggctctatcatatctctcagtatcttcacctgtggagttgggggggtgatgctaatgttagctaacatttatggggtgattattgttgttaaaactcagtacaccgggcgcggtggctcacgcctgtaatcccagcactttgggaggccaaggtgggcagatcacctgaggtcagaagtttgagaccagcctggctaacatggtgaaaccccgtccctactaaaaatacaaaaattagccgggcgtggtggcgggtgcctgtaatcccaactactggggaggctgaggcaggagaattgcttgaacccgggaggcggaggttgcagagagccgagaccgccccattgtactccagcctgggcaacaagagcgaaactctgtctcaaaacaaaaaacaaacgaaaaaacacagtaaattgtccctatttgactactaagagctattttaaaatagaatttattatctaagtacagaaaggtgtaattatcccccctacacccgttagaacccttgatgacactaaataaataatacatgaatacggttcaaaaatgggcatcatagagtataaaataaagaatgctttcattttcaacccaaattcagcaatttcataggatgccaggctcagctctaaagccttatatgtattcagtgcgctgaaattcaacaacctcacgaggtaggtataaccaataataattctaggcggggcgtggtggctcacgcctgtaatcctagcacttcgggaggccgaggcgggcggatcacctgaggttcgagaccagcctgacgaacatggagaaaccccgtctctaataaaaatacaaaattagccgggcgtggtgacgcatacctgtaatcccagctactcgggaggctgacgccggaaaatcgcttgaacccgggaggcggaggttgcagtgagccgagatcgcgccactgcactccagcctgggcaacaagagcgaaactccgtcccaataataataataattaataataataataataacaataataataataattctaaagggaagcagagggatctggcgggaaagtgccagcaaacctaacaggcctccacaagtgtctttaaagtttcataggggtcggtatatgtgattaactgccaaagaagaatattcgccgtgtgtccgaaacgcagtcccctggggcgccacactcggagcctacttgaaccgaagagtccctccctgggccaacgaaggacccaattcccctcgccccggatccagcctctaagtggtttcccgggtaaggtcagcagaggtccgccgcctcaaccagtcttgttagagtaggcacaaaagcattcagagtgactgccactgtagccactcaacgccgagcctaggcctgctttttttgcagttagagtgaaactttccattggtggagtcaccccaaaggaggcgggacggagcgggaaagtcctgcctaccttggccttcccagccaatcgcagcatctatgcgtcagcctccggttcggttgcgctgcgcgtagtggtctgggcgacctgagggcggggccgggagcaggccccgggctgtggggagggtgcgcttcccgcgggcgcgcggagtgaggacggtgacagccacgcgcgcgcgtacgcgcccgatgcagcgcggccccgtgaccctagtcggccgctgagaggcgcgcggagtctgggccgctgccgtctaggggtcccgtcccgaggcgtccccggcatctccggcccgaatcccggagtgccgggtcgcgcctgcaccgaaggtcccggctcctgtgccctccctgcagccgtcagggmccgtcccccaactcccctttccgctcaggcagggtcctcgcggcccatgctggccgctggggacccgcgcagcccagaccgttcccgggccggscagccgsccaccatggtggccctgaggcctgtgcagcaactccaggggggctaaagggctcagagtgcagsccgtggggcgcgagggtcccgggcctgagccccgcgccatggccggggccatcgcttcccgcatgagcttcagctctctcaagaggaagyaacccaagacgttcaccgtgaggatcgtcaccatggacgccgagatggagttcaattgcgaggtaaccggccggcagccccgactgctgcggtgacagtcgaggtggaagctcgagaggttctctttatatcatcttatgggtgtagctagagacgggcagaaccggaagggccaactaggcccaaaacctcatgttaaagatgattgctgctttttttcataggacttttgggttttggcatttcctgaaggttattttcattcattgttattggaagaagctggatgctcctgtgatagaaaattcaggatttcagtgtcaggcttaagttaggcttacgcttaaaagcttgaaagtttattctttcattaggtaatattgttatgtacccaggtattagaagttgcgtcttgtttattggaaagccaatacttgtttcccttttctaaagcttgcatattctgggaaaaaaaaccctttgaagaacgatataacatctcatacttactttccacatagtttccaacatgatgataacagctatcaattgttcagtattttcaaagtgctagacatttgcacatttaatcctcagaacaaacccatttatctagtaaatggcaaggtggggttttgaaccaagctcacagcccgtacagtactgcttctcaagtaatttaagttcttgctgctaaaagtgtggtttgtggaccagcagcattggcagcagtaagcaagggttggcatgctttttctgtacaggaccacatagtaaatattttcaactttgtagactagagaatctctgttggagttattcaactcttcaactctaccattgtaacacaaaagcagccttagataagatcagcttccagcatgacagcttaaggaacccattcctctgtaaaactggtgaaaattcttttttgttttgtttcgttttgagacagaatctcactctgtcaccgaggctggcatgcagtagtgtgatcatggcttactgcaaccctgaccaacctccctggctcaatcagtcctcctgcctcagcctctcgagtagctgggaccacaggcgtgtgccaccacacctggctaattttttttttttttttttttttgagacggagtctcgctctgtcacccagagtgcaccgggctagagtgcaatggcgcgatcttgtctcactgccacctccacttccaggttcaagtgattctcctgcttcagccttccaggtagctgggattacaggcgtgcgccacctcgtctggctaatttttctatttttagtagagacagggtttcaccatattgggcaggctgatctcgaactcctgacctcgtgaccagccgacctgggcctcccaaagtggtgggaaagtggtgcgattacagatgtgagccaccccgcccagcctcacctagctaatttttgtaaagacagggttttgccatgttgcccaggctgatcttgaactcctgagctcaagcaatccactcgccttggcctcccaaagtgatgggattacagatgcagccaccacgcctggcccaaaaattctttttttaaaatcaactatttaaaccctccggcaatggtcctgagggcaaacaacaaatgaaaaaacacctattcaagaaaatctacaaattcggtaagaaagatgagagggtatggtatttgaaccaagatcattccctccttactcactcctagcttagtgaggtggagcttctactccagactattgcaaactgtaataccgggcactgctcccccagctcccaatcaaatgctttcttcccaggaaaagcaggacatcagcatttctcatcctacctagagctacttgttgctgaggttaaaacctgtgtgagtgcaattgaaagttggagctctctttttttttcttttgagacggagttttgctcttgttgctcaaactggagtgcaatggtgtgatctcgcctcaccgcagcctctgcttcccgggttcaagcgattctcccacatcagcctcccaagtagctkggattgcaggcttgcgccaccatgtctggctaattttgtatttttagtagagrcagggtttctccatgttggtcaggctggtcttgaactccctacctcaggtgatccacctgcctcggcctcccaaagtgttgggattataggcgtgagccactgtgccctgcgaaaagttggagctcccttcttccacctagtccctacttgtggaacaggactgtaccttggacatgacatactgaaattactggtgccccaattgctcatcccccagttcttgcaggctgagcctcaggttattgcggtcccctgcctccttccaccaagtgctcagttcctagagtgagggtatttctcagagagaakctttccagggtccttccccacagctccagagccttggctccgggattttgcctcaggagagaagcaggccctaaaacagatagctcctaatctctttccaatggcagtgacttcatttgcaacacagtgtggagaaattcatgcctaagggcaatctggagatgtgaaggttttggtaagaggcaactgggagatctgcggatttaatggagatgcagcctagactgtaggcctcctggtttgctggaaagaattggggaataagacagctggaagaagccattctaggatcagaagaaggatcaaacattgaccgcagcatggtggctcacgcctgtaatcccagcactttgggaggctgaggcaggcagatcatctgaggtcgggagtttgagaccagcttgaccaatatggtgaaccccatctctactaaaaatacaaaaattagctgggcatgggggcatacacttgtaatcccagctacttgggaggctgaagcaggaaaatcacgtgaactgggaggtggaagttgcagtgagccaagatcacgccactgcactccagcctgggtgacagtgaagctctgtcctgtcacaaaacaaaacattgaccacagacctctgaggtggtggatgtccctcctgtcctggttgtatcattatacattgtatattaatgtatcgaaatactacaggtacccccaacatgtgtacaactattatgaatcaataaaaaacaatttgaaaagtaaggtatgtggcagaggtggaaaaaaatgctttcctccaaacagccacaatttgattgyatcagtttgtagagtaagagcaagttatgcctcagtgtgttgttgaaaataatagaacaatatgccacaattagtggagcttcatagctgggtgtggtcaaggagagaatagaagagaaccctaccaaaaccactgtcatcccagggtgactgtgagcatacccaaagctgcacctccctgaagagcaatatcataggccttaacacttttcaggggaaatggatttcactcaaataatccagccagtcgctaaacaaataaataacaattggccctggagagggggtaccaatccccagagttgctacagtatattatctaaaatgtccagtttccaacaagaaattgtgagacgtacaaagaaacaggaaaatatgacacatacactggaaaaaagctggcagcagcaactgcctgtgagacaaggggccaaattaatgaaaaaggcttcaaactggcctatatatatattcacagtactatatatattcacaatactaaaggaaaatatgatgacaaagaagtaaaggatggtatgacactgttgcatcaattaaagaatatccataaagatatagaaattataaaaaaagaatcaaatgaaaattctggagttgaaagtacaataacagctgggcgcggtggctcacacctgtaatcccagcactttgggaggctgaggcgggcggatcacctgaggtcgggagttcgagaccagcctgaccaacatggtaaaaccccgtctctgctaaaaatacaaaaattagccaggcgtggtggccggcacctgtagtcccagctacgcgggaggctgaggcaggagaattccttgaacctgggaggcggaggttgcagtgagccaagatcgagccactgcacaccagcctgggcaacagagcaagactctgtctcaaaaaaaaaaaaaaaaaaaaaaaaagtacaataacaaatttaaaaattaactagagggactcaggactcaataacagatttgaactgggtgaagaaagaattcgttaattttttttttctttttgagacagagtctcgctctgttgcctaggctggagtgcagtggggcaatctcggctcactgcaacctctgcctccctggttcaagcgattctcctgcctcagccaccgcacagtggctttgggagtactctgggaggctgaggtgggtggatcacctgaggtcaggagttcaagaccagcctggccaacatggtgaaaccccatctctacaaaaatacaaaaatttagttgggcatgatggcgggtgcctgtaaccccagctacttgggaggttgaggcgggagaattgcttgaacccgggaggcggaggttgtagtgagcagagatcgtgccactgccctccaacctgggtgacagagcgagactccatccctgccctgaaaaaaaaaaaaaagatgtgaaacacatacaaaaaaaagtaaaatggcagttgaatgccaagtaattagataacttcaataaaatggacaaactcctagaaagatataaaccaccaaaattgacccaagaagagacactatctgaatagacctataacaagtaaagatattaaattagtaattgaggggactcgtggggtaacttgcccttgggaaccagtagtatggcatcgggctgcaagattggcctgtccatcctcaatgytacctggccaatttaggggcccagtgcctctggatgctagactctggggtcgattatctccaccggaatgtaatggrtgaacatgcatgtgatggtgtccaagccagaacagtgggtaaagccaatggctataagaggagccaatcagtacatctttcatctcgaggaaactgagaacccaggggctttgattaaagacattcaggagaatgggatgaaggttggccttgccataaaaccaggaacctcagttcagtatttggcaccatgggctaatcaactaggtatgaccttggttatgacagtggaaccagggtttggagggcataaattcatggaagatatgatgttaaaggttcactggttgaggatccagttcccatctttggctatagaggtcgctggtggaatagatcctgacactgtccataggtgtgcagaggcgaagctaacatgattgtgtctggcagtgctatggtgaggagtgaagaccctagatctgtgatcagcctgttaagaaacatttgctcagaagctgctcagaaagattctcttgattgatgaaaccttaaggagcccaatgtttgtttatgaaatctcctttttactggaaaacaggaatattgactaccaaatcatagtgtagttgaagccattctgcgtttttgagcagttattcgtttcagtgattataattgattgtgcagagtattctaagaagttagaaattggtgtgtataactacattttcagtgatgcaatttaatgattagtgagtgagatactgtttttattgagagccttgatttttataaagagtaaaaatatggctgcattaagggtacaaacagaaaagtgtcttaatgtctaaggagggcatattagctacactataaaaacaatttttttctgtatttctgaaaagaattttgttgtttctcagttgttttccaaaagcaaaggaagtcttaatgtttttttctatttcgtgttatgtgtgatttgtttatatgcttggtaatatgagtctaatggaatttaaaaatataagtttgggtaggatagtatacccttaaaaaataaataaataattrgagagagagagagagagagagagacctgggcacagtggctgttgcctgtaatctcagcactttgggaggtcaaggcaggaggatcctttgaggccaggagcttgagaccaacctgggcaacatagagagaccccaactctaaaatatacatactatatctaaactcagctaggcgtggtggtgtgagcctggagtcccagctactcaggaggttaaggtgtgaggatcacttgatcccaggaggttgaggaggcagtgagctatgattgtgccacagtgcttcagccagggtgacagagtgagaccctgtctcttaaaaaaaagaaaagaggctgggtgcagtggctcatgcctgtaatcccagcactttgggaagccaaggtgggcagatcacgaggtcaggagttcaagaccagcctgtctaatatggtgaaaccccatctctactaaaaatacaaaaattagccgagcatggtggagtgcgcctgtagtcccagctactcgagaggctgaggcaggagaatcgcttgaacccgggaagttggaggttgcagtgagctgagattgcgccactgcactccagcctgggtgacaaagtgagactccatctcaaaaaaaaaaaaaaagaagaaagaaaagcaaagcaaagcccaggcctgtacctactagaggtcctgataacttcaccactgaattctatcaaacatttcaagaaaaattaatacrgttcttcacaaagtcttcaaaaatgaaaaagaggagaaaatacttacaaacgaattttatgagactggtattaccctgttgccaaaaaccaggaaaagacattacaagaaaagaaaaccatagacaaatatatcttacaaatgtggaagcaaaaatcctcaacaaaaatactagcaaactgaatccagtaacatataaaaataattatataccataaacaagcaggatttattccaggagtgcaaggttggtttaacatccaaaaatgaattagtgtaaataatgtaatgcattatatcaatagaataaaaaacaaaaatcaccttgtcatctcagtagacacagaaaaagcatttgacaaaattcagcatgtttttcatgataaaaacactaaataaactaagaagagaagagcagttcctcaacctgatacacagcagttatgaaaaacccacagctaacttcataatagtgagactgaggccaggcacagtggctcacgcctgtaatcctaacactttaggaggccaaggttggagggatcacttgaggtcaggagttcaagaacagcctggccaacatggtgaaaccctgtctctactacaaatacaaaaaaaaattagccaggtgtggtggtgcatacctataattgtagctacttgggaggctgaggtgggaggattgcttgaacctgggaggcagaggttgcagtgagctgagatagcactactgcacacaataggctgggcgacagagctcaaaacaaacaaacaaacaaacaaaatagtgaaagactgtatgcttatccttaagattaggaaaaagagagataagtctactttcactactgctattcagcattgtactggaggttctagccagggcaattaggcaagaaaatgcaataaaatacatctatgttggaagggaacaagtaagatcatctctgcagatgacatgatcttgcatatagaccctgaggaatccactaccaaagtattggaactaataaattattagtttagtaaggttataggatacaagatcattacacaaaactyagttgtaaatgtatccacttggaatgaacaatctgaaaaggaaattaagaaaattccatttacaataacctaaaaaataaaaatacttataacaaaagaggtatctttttttccatcctctgacagtttagtaaaagaaagtataaaacttatactctaaaagctgtaaaacatttttggttttgttttttaaattaattttttttgaaacggagtctcactctgtcgtccaggctggaatgcggtggcgcgatctcggctcactgcaacctctgcctcccaggttaaagcgattctcctgcctcagcctccggagtagctggagctacaggtgtgcaccaccatgcctggctaatttttgtatttttagtatagagggggtttcaccatgttggccaggctggtctcgaactcctgacctcaggtgatccacccgcctcagcctctgaaagtcctgggattacaggcgtgagctagtgcgcccagcctggccttttaaaatatttaattaattgatttttttttttctcggacttgcactgaagtgagaacaagtgcagtggtgcaatcatatctcagtgcagcctagaccttccaggcttaagtgatcctcctatatcagcctcccaagcagctcagaccacaggcatgcrcgatcatccctagctttttttktttgtttgtttgttttttaatttcttgtagagacagagtctccctgtgttacccaggctggtcttgaacctgacctcaagcaacctcccatgttggcccctcaaagtgctgggattacaggtgtgagccaccgtgcctggcctgtaaaacatttttaaaagaaagaagatataaataaataaataaatagaaaatagctcttgttcatggatcataagacataacgttgtcaaattggcagtattttggaaattgatctacacgttygacataatccctgtcagaatcccagtttatttcattgtagaaattgacaagtctccaggcgtagtggctcatgcctgtaatcccagcactttgggaggccgaggcaggcggatcacctgaggtcaggagttcaagaccagcctggccaacatggagaaaccctgtctctactaaaactacaaaattagccgggtgtggtggcacatacctgtaatcccaggtactcgggaggctgaggcagggaatcgcttgaacctgggaggcggagcttgcggtgagctgagatcacgcgccactgcactccagcttgggcaacaagagcgaaactccatctcaaaaaaaaaaaagaaattgacaagtcaattcataaattcctatggaatcgcaagggacccacaatagctaaatcttgaaaaagaacaaagcagaaagactcacgctttgtgatttcaagacatactataaaacaactaatcaagacaacgtcaccaggcaccgtggcttatgcctataatcccaacactttgggaggccaaggcaggcagatcacttgaggacaggagttcgagaccagcctgggcaacatggcgaaatcttgtctctaccaaaaatacaaaaattaaccgggcgtgggggtgcacacttgtagtccaagctgcttgggagggctgaggcacaagaatcccttgaacccaggaggtggaggttgcagtgagtcgagatcgtgctattgcactccagcctgggggacagagcgagattccatttcaaaaaaataaaaataaaaagacagtgtggtactggtataaggataaatgtgtagatcagtggcatagaattgagagtccagaaataaacccagtggaatagagttgagagttcatggtcacctgattcttgacaagggtgcaaagaccattcagtgggggagaactgtcttgtcttgtcttttcttgctacatgccacagactgtgagaaggaatagtcctttcttttcttttttctttttttttttgagatggagtctcgctctgtcatctaggctggagtgcagtggtgcaatcttggctcactgcaacctccgcctcctgggttcaagtgattttcctgcctcagcctcctgagtacctggactacaggcgcctgtcacaacgcccggctaatttttgtatttttagtagagatagggttccactatgttggccaggctagtctcgaactcctgacctcgtgatccacctgcctcagcctcccaaagtgctgggattacaggtgtgagccaccgcacccggccggaatagtcctttcaacaaatggagctgagacaactggatagccacatgcaaaaaaaagaagaaattaaacccttacctcacactacatacaaaaattaactcatggctgggcacggtggctcacacctgtaatcccagcactttgggaggccaaggcaggtggatcatgaggtcaggagttcaagacgaggctggccaacatggtgaaaccccatctctactaaaaatacaaaaagtaggccgggtgcggtggctcaacacctgtaatcccagcacttcgggaggccgaggtgggtggctcacgaggtcaggagatcaagaccatcctggctaacatggtgaaaccctgtctgtactaaaaatacaaaaacaaaattagctgggcgtggtggcgggcgcctgtagtcccagctacttaggaggctgaggcaggagaatggcgtgaatccaggaggtggagcttgcagtaagccgagatcgcactactgcactccggcctgggcgacagagggagactccatctaaaaaaaaaaaaaaaaattagctgggcatggtggcgggcacctgtaatcacagctacttgggaggctgaggcaggagaatcgcttgaacccaggggtgagctgagatcacgccattgcactctagcctgggtgacagggtgagtctccatcccccacccaaaaaaaagcttaaaatggatcaaagggccagttgaggtggctcaccccagtaatctgagcactttaggatgttgaggtggatggatcacttgaggccaggagtttgagaccagtctggccaacatggtgaaaccctgtctatattaaaaatacagaaattaggctgggtgtggtggctcatgcctgtaatcctagcactttgggaggctgaggcaggtggactgcttgaggacaggagttcaagactaccttggccaacatagcaaaaccccatctctactaaaaatacaaaaattagccagccgtggtggcatgctcttgtagtgccatytactctggaggctgagacatgagaatcacttgaactcgggaggtggaggttgcagtgagctcagattgtgctactgcactccaacctgggcaacaaagcaagactctgtctggaaaaaacaaaaacaaaaacaaaaaacaaatgtggagaaatgtgaacccttttacactgctggtaagaccgtaaaatggtgcagccagtttgaaaagcaaactagttagccaggcatggtgggtcatacatgtaattcctgcactttgggagaccaaggtgggaggatcacttgaagccagaattttgagaccagcctgggcaacagagtgagaccttttctctacaaaaaatttaaaaattagccaggcgtggtggcttgcacctgtagtcttagttacttgggaggttgaggtgggaggatcacttgagcctgggagaggctatagtgaggcatgactgcaccactgcacctccagcctggtaatcaaagcgagaccctgtctcaaaaaaaggaagacaattagctgggtgtggtagcgttcctctgtagtcacagctacttgagaggccaaggtggtaggattccttgagcccagaattttgaggttgcagttagctgtgattgtggtgctatactccaggctgggcgacagagtgagacccagtctcaaaaaagataaaaagaaaaacatggtggcagttcctcaaacagttaaacacagagttaccatataaccccacaattcaacttacagatgtcttctcaagagaaatgaaaacatagctttacgagaaaaacttatatgtgaatgtttatagtagtattattcataatagccagaaggtagaaacagttcaaatatacatcagctgatgaatggataaacaaaatgtggtctatccttactatggaattacttggcaataaaatagaatgaagtaccagcacgtgcttcaacatggatggaccttgaaaacactatgctatgtgaaagaaaccagccgcaaaagaacacatatgattccattcatatgcaaatctaggataggcatatctacagagacaaagtagatcagtggttgttcagggctgggaaaaatgggtggggtagagggtgtgatagctgaaatatacaaggttttatttatgaagtgatgaaaatactctaaaactgactggtgatggttgtacacactgaatgtactaaaaactactgaattatacactttaaatgggtgaattttagggtatatgaattatatatcaagatgtttaaaaaaaaccttaggcaaaatgtaaacaatgggcatgactgtgttccaagaaaactttatggacacagaaatttgaatttcacataattttcacaagaaaataaacattaaaaaatgtaacatgctgggcactgtggctcacgcatgtaatcccagcacttcgggaggccgaggtggacggatgacgaggtcaggagtttcataccagcctggccaatatgtaaaaccctgcctctactgaaaatagaaaaattagctgggcgtgatggcacacgcctgtaatcccagctactcgggaggctgaggcaggagaatcacttgaacctggaaggcggaggttgtggtgagctgagatcacgccgttgcactccagcctgggcaacaagagtgaaactccgtctcaagaaaaaaaaaaaaaaaaagtaaaaatcattcttagttctcaggccacacaaaaataggtggtgggttggatttgtcctgtgggccatagtttgctgatctctgatctaagttactatttgatagatgttagatgttgtgagagggtaagagagactagcctataaggaaagggattttagttttttgggggtttttttttttgagacggagtctcgctctgtcgcccaggttggaaagcaatggtgtgatctcagctcactgcaacctctgtcacccaggctcaagcgattcttctgcctcagcctcccaagtagctgggattacaggcatgtgccaccatgcccggctaatttttgtatttttagtagagatgggctttcaccatgttggccaggctgatcttgaactcctgacttcaggtgatccgccctccttggtctcccaaagtgctgggattacaggtgtgaaccactgtgtccatccaggaaagggattttgtatgacatttttcagccgcaattttgccaggaaaagctcttttttcttcattaagtagattccagacccaaagatgttggacagtattatcagctagagcaaggtttttcaaccctggcactattgacattttggctggatgattctttgttgtggggagctgtcttgtatgttctaggatgtttagcaggatctctggcctctacctactagatgccagtagcattcccccaccccatcccagttgttgtgacaaccaaaaatgtcttcagacattgtcaagtgtccctggggtasggaggacaccctccaatctcctctttctccctacccaacctccatgaccacattgagaaccactgatctatagaaaaggataatagtagtgacattcagagaggcaggatggtatagtgcaaagcttgccaaactttaattttacataaatgacctggggaatcttggaaaaatgtaggttctgattcagtagttctgggatggaagtgagaattttgtattaataacaaactctcaggtgatgatacctgtgccaccggcccaaggaccacactttgartagcagagcagtagtagaaagtgcatcggctttgaaagaagacagacctgggcttgaattctagctaaaatacttctactttggacaagttacatagctctctggaccttattttctcattggtaaaatgagactaataatgctgaccctgcagagttcttataaggattcatggaatgcatagtccctggcagaaaggaagatataggagggactataattggcctaaagtaggaggctctggttaccatgggcactgccctgttgtgatttatcaagccattacacctcactgaacctcagatttccagtggaaaaacctgtttgtaaaccatgttcacatattctgttgaaagtaatcatagtttgatttatgatgatagggctcaggtaagtgattagttttattctcctgcctgctttttatgttgtccattaatgagcaaggtgctgatgcaaggagatggcagatgcattttgaaaaaaaaggagagagagagtacttgtagaattcttgactttattgaggtcaaatgtaggtggcttttcaagaaggactcaatttcagaaccggtggcatttaacatatgagtcatgttaccttatgctaataagttcagactttttttctttttactgcagagatagggggaaaaatctcctgcactacttgctgcattgctcaattggctggatgctttggaagatttttccacttgaaagatttgttgtttgtcattttgagaaagtgggtgctgagtgtaatttgccrggaggctaaacggctatgttatttcttatctaggctggaattttactctaataattcaatctatcagtaagaaaagccaaataggaagttgtaagagatcctaatactatcttatattgaaaacaaagcctccttctcctgttgtttggcattctaaatgttttcacatacctaagtgagattatgattgtattaaataccaacattgcagatcattccagcatacaagtggacgtaagttgtccataacagaaggaactttctaaaggggaagacagatagaacaattctggcattttcagtaaaatcttaaatcctaggctccctaggaccaggcaaaccatccccttcaaggatgtaaactctggagggcagtgtagttgtacagggtaatagttctatactctatattagtgcaacaagaaacttctattcctgtttcagaagtaagactgttatctacctttttttttttgagatggagtttcactcttgttgcccagactggagtgcatgatctcagctcaccaaaacctctgcctcctgggttcaagtgattctccagcctcagcctcccgaatagctgggaatacaggcatgtgccaacacgccctgctaatttttagatttttagtaaagacagggtttctccatgttggtcatgctggtctcgaactcctgacctcaggtgatccacctgccttggcctcccaaagtgctgggattacaggcaygagccactacgcctggcctgttatctacctttttaccgctgtgctctcccatgggttttttttgtttgtttgtttgtttgtttgttttgagatggagtctcgctctgttgcccaggctggagtgcagtggcgtgatctcagctcacttcaacctctgtctcctgggttcaagcaattctcctgcctcaacctcctgagtagctggaattacaggtgcctgccatcatgccaggctaatttttgtatttttagtagagatggggtcttaccatgttggtcaggctggtcttgaactcctgacctcatgatctgcctggctcggcctcccaaagtgctgggattacaggcatgagccaccgtgccygacctctcccatgggttttaagtagtgcctatggatggcatgggtgccactactcaggtctaggacaggcaggggtgagtgatgagtgcgtgcgtgctgatgaaggggtgcgaagaaacagatgctggctagtgctgccctccactggaccccattctgcctttgtgtgggacaaagggctagggactagcagttactttgtgctaggtaccatgctaaatgctttaaatgcacactacctcatttgatataacagggactcatttattcattcaagagatattataaaataggctaggcacagtggctgacacctgtaatcccagtgggaggccggggtggccagatcacttgaggccaggagttcgagaccagtttgggcacatggtgaaatcctgtctctactgaaaacacaaaaattagccaggcgtggtagtgggcgcctgtagtcccagctactccggaggttgaggcaggagaattgcttgaacctgggaggtgagggttgcagtgagctgagatcgcgtcactgcactccagcctgggcgacaagagcgagactctgtctcaaaaaaaagacaataattaggcgtggttgtgcgcacctgtagtcctaactacttggtaggctgagacaagaggatcacttgagcccaggagttcgaggctgcagtgagctatgttcgtaccactgcatgaagcctgggtgacagagtgagactctgtctcttttatttatttgttttttaaataatagagacagggttggccgggcatggtggctcattcctgtaatcccagcactttgggaggctgaggcaggtggatccctgaggtcaggagttcaagaccagcctggccaacatgggaaaaactcgtctctactaaaaatagaaaaattagccgggggcaatggcatgtgcctgtaattccagctacttgggaggctgaggcaggataattgcctgaggtggaggttgcctgagattgagccactgcactccagcctggatgacagggagagactccgactccaaaaaaaaaaatagagatgggggtctccctacgttggttgctcaggctggtctcaaactcctgtgctcaagggatcctcctgcctcagcctcccaaagtgctaggattataggtgtgaaccaccacacgcagctctgatttactgggtgcccacgttgaccaggcagggaacacctcctagcagtgatcaaggactactttggacctaggttctgtaactgacttcatctttaagtggggaaacagaggctcagacaggatacatagcatgcttaaaggcttagtscagccactatctattctgaaagaggcagaataggacagggacaggtaggtagtgagagaatagggagaatagatgggcacaccctttaacttaatatcgaccagtaaagcctgcagttgcttatttgaacctcacattgaggctgacatgtaagttgagcaaatcttaactcaagcttcagtttccttgttggggccgctgaggcagcatagcctagagattacaagcatagacttcagagtttgattcctggctctgcctctaaccagctttgcaaccttaaagctccttaaccccctcacatgcctctgttccctaactgtaaaatggtgaatgtaattaattcttcctgcatagtgttacaagaattaaatttgagtaattactggtaaagtacgtagaatagtacctaacacaagataagtgctatatataatggttgttacctaaagaaataacagcctgggcaacatggcgaaaccctatctctacaaaaaatacaaaaattagccggttgtggtggtgtgcacctgtggtcctagcatctcgggaggctgaggtgggaggatcacatgagcctgggaggtcgaggttgccataagcttcctgattgcaccactgcactccagcctgggtgacagagtgagaccttgtctcaaaaaataaataaataaaataaattaaaaaaataaaaaggaaataagttcagtgcctgtcgttagcttgctccctttctcagcctctcctccacttcctcacgcaccctcttgctctgagcctattatcctggtccctccttcacactgccacatctttgcataggctgttctctttgcctggaatgccattctcatttgttgcttggcagaactgaactcattctccttctaggctctgctcaagggtttcctcttctttgtgtccaaagtcaccacatagcttctaagtgatgggactgagatttgaagccaggtcatctgtctttcaggccagccctctttccactaccctatgctacccaaataggaagcgtaaaagagaagtaggagagaaaaagttagaaacctggagagaacttaggtatttggtaaacaggaaaaagaaagtggaaagaagagatcatttgaaggacttcctcaacttaacaactatttgcctatggcattattttattgcatttggtgtatgatactatctcaraagcattttgtaaacttgccagtggcttacatttttgccggatgaatgacatgactaacgatccgtgctacattacctcagtgtctagtttgtcattttgaatcaagtggacattttctgtaagtgaatcattttcacttgctcatgatataatgagaattccttacctttggcttaaaatgaggcttatgttataacagttaagcattgtctagttgcatatttaacatagtcagaatgctcctgcctgtattcagcctggtgtcttataatatttggtatgcccacctagatagcaattggtaacatctttattctgagactctttcatgtatggattttgaaaagttagttaactgttcagacgacattgtttctttgacttttacaatccgcttccctctcactgacagttcagttttggaagaccctgtatttttttttttttttttttttttttttgagacagagactcgctctgtcgcccaggctggagtgcagtggcgtgatctctgctcactgcaacctccacctcccgggttcaagcaattctcttgcctcagcctcctgagtagctgggattatgggtgtgcaccaccacacatggctaatttttgtatttttagtagagacgaagtttcaccatgttggccaggacggtctcgatctcctgaccttgtgatcagcctgcctcggcctcccaaagtgctgggattacaggcgtgaaccaccgtgcccggccttttttttttttttttttttttcgagatggggtctcactcagactggagtgcagtggtgctatcacagctcactacagacttgacctgctgggctcaagtgattctcctgcctaagcctcccaagtagctgggactacaggcacatgccaccaatacctggctaatttttttgaagaaatgggatcccgctatgttgcctaggctggtctggaacttctgggctcaagcgatccttccgcctcagcctctcaaagtgctgggattacaggcatgagccaacatgcccagctagagatgtgtgtgaattggtagcttcaagctagatattggaggctcatgaagcccaggttaaagaggcttgtattcatcagatgcgatgaagagctttgaagtttttactagaagtgtgatttaaagtggttggcatgcaaaatgatttggaacgtttggggtttggggtagggagagagaggttggaagtaggaaacaattagaaggcaaacgctttgggcaaggtatcacattgaaacctgaacagcagtgggacttgctgggggttgggacaaaactaggcagatgtaagcatctagtgaatctagagattagggtgttctgtgaccaagaatgagcagaagacctgctaggctcaagattcaggagattctcaggtccaaagccagtcctcagtctccgaagtcagtcaggcagaagggaagttggatcaagctggccagagttgagctcaggaagtcagtgcactttctcttgtctggttcctgcatygttttacttgtgtaaaatcatcaagatccctaaaccgatgtctgaacaccaggcttctaggcagagctccaccgtgtgaccttgggcgcatcacttatttcccccaggcctcagttcttctgaaagatgaggggaagaactcacattcaaaggccctcagctttagcgtcttattttaggtgatctgggcagaagagtctcactgtgctcctctccctttcatatttcctgctttggtaggaagtcatctcaagacttgagtgtataggcatgaggaagtctgctagaggacaggaagaatattgcttaaagaataagagctacagccctgatggaaggggtaaattggcctgggaaaagccctgcctctgctacctgcttcccaagtgaccttgaacttaactctttaaacctcagttgctgcatctataaaatgagaataatagtatcttttttatagggttttttttgttttgtttgtttgtttttagacggaatctccctctgttgcccaggctggagtgcagtggcacgatctcggctcactgcaacctttgcctcccgggttcaagcgattctcgtgcctcagcctcctgagtagctgggattataggagtgcaccaccacgcctagctaatttttgtatttttagtagagatggggttttgccatgttggctaggctggcctggaactcctaacctcaagtgattctcctgccttgacctccctaagtgctaggattacaggtgtgagccaacgtgcctggccagggttgttttgagacatgaatgaggtggacctttacaggcacttggttcagggcctgacccgtagtgagcatttgataaatgttacctatctatgttgtcatgggctgggagtgtgggaacaggaagtgtctcatgccagaagcactgtgaattttctcctttaatcattgccttcattttctttgaaccttattcagattgtccatgcctttgtaattgtagaccctctaaactataattagtccaaataaaatggactcaccttatgccatgttcttgttgaagggtcctctttctttctttctttctttctttctttctttctttctttctttctttctttctttctttctttctctttctctcctctttctgtctctctcttctttytctctctctctctctctctttctttctttctttctttctttttctttctttctcttttcttgctctattgccaggctggagtgcagtggtgagatctcggctcactgcaacctccgcctctgcctcccaggtttaagcgattctcctttctcagccttccgagaagctgggactacaggcgtgcgccactaatttttgtatttttaggagagacggggtttcaccatgttggccaggatggtctcgatctcttgacctcgtgatccacgctcctcggcctcccaaagtgttgggattacaggcacgagccattgcacccggccagatcttcttttttgtaacatgctaagtaatacaatctctatttagcttgatgtccacggtgatagcaggattcttttcggatttctgccatagttaattattctgcattcttttgtccctagtgtgtcatattgaaatttttcttttttctttgtttttgatgacttctccagttattcatgctagttttgcattcctgtccaagaacatttttgctgcttgtttatttttaatttcataaactaaagcgtttgaggttttaaaaacccagaattgagttttctcagagctgctaatctttctagccagctggtgacgaggcttctcaattcttgttacaggatgatgtgttctgtcctcctgtctgtgctttgtctaatttagattctaaatccacatgtttaggacatttttagcgtgtcaaaatttattaccaaagtagtgctgacttcagggaaaaatttttaatggaatctttagtcactcatgttgacacaaggtgcttgtcctagtgcaggaatctgtgtggcaccactaggtggtgccagactgcatcatttttaaagacagccttttctcttccaactcttttgccactgttctcttttttgcttctttgccaaatttggacygagctttgaaaacttcatataaactttctcttagtgagttatgttgcttatagcttttccctccaccttgcctgttttagtcttcttgtttcaatagttttgatagtttgacattcagataaaacttaaaactgaagcccaaagtaattactaaatgtatctcgactgatctgtggttttaaattcaccaacagtgcatctccctacttgcttaatcatattgattttgagattaaatcagtctcataaatatgttagtcttcagcccacggtagttctcatccatctgcagactttttttttttttttttttgagatggagtctaactctgtcaccaggctggagtacagtggcgccatctcagctcatggcaatctctgcctcctgggttcaagcgattctcttgcctcagcctccygagtagctgggactacaggtgcttgctaccacgcccagctaatttttgtatttttagtagagacagggtttcaccatgttggccaggatggtctcgatctcttgatctcgtgatccacccgcttcggtctcccaaagtgctgggattacatgtgcgagccaccacgcccagccccatctgcagatatttttaccagtcctatccactcatgcctgtaccttctaatgttattaaagtcagttttattatcattgatgaccatgagacttaatcaaaaggtcaagctagaaacagagaatattcaaaatttctttccaggcaaacatctgggttcaatagaagctagttcacatgaatggatcatgctctagctctgttgtgctggagcttttttgaaggaatgcattgttacatactaaccacaatttttacattgtccagggcaggagtaaccagttggttgatacttagtcaggggttgtgtttcgtaatctgctagttgtacttgatgtttaggcatttgaaatttaaccttgtgccttatttgtgctgaatttactattgtttcctatttgtagtgctctgcaaaattattctcagtatatcacacatttgtaatcattgccaatcactgaatatcaataacatgctaggtgataagaacttctrtttttcagcagcattatcattcccaattttactacatcagagagttcatcattatacagtcaactcatgattattaggagtaaggaacgtaatagcagaccctgaatgagggaaaagaatgtgaaaccacacataaactaaaggtgaagtcatttacatccctgaaaatgattttaagatacagaatgagatgttaaaggatcaaaagaaaattatcgtagcaatgaaaaatgctacatggtttatacaaagtcatgtcaagctcatagactcagagagtggtgttaatcctgaagaccacttgatgattatggaagccgagacccaaagaggttaagtgacttacccagcacagcgggtttgggtgttttatagctgtttgactatatgagctatgattgctctcatgttgtgagctaaattccaaagatattgtcgtgtttgcttttgtggggactgtattgctttcatagcatgatggttgtattgtttctttttgctttgtcatctgtcagtcaactttgaagtgaatcttctttgtttacagcatagtaaaatatggtgattgcatggctcataagagatttacaaatgaagaaactgaggcccggttgagctgcatggcacacccaagtcatagacttgtgtgtggttgaggcagagaatctaggatacagacctccctgctgggttcctcccgctcccataactgctctgcacttcagcgggaaagatgccagaaactgcaagcataaggcctttttttcccctaaaaaactgtaattcatttggttttgaaagacttaccagagtttaaaagctccattttgtggcttcccaaggtgctgtgatttgtttcttactagtctcctttgttctgtggaaaattttcttctttggttgtttgagatttagatttccttgccaaggtatttttagagagaggaaatcagtatgtttcaccaaaggggtaaaatatataccttaaggcctaattatgcaattacatttttaataacgagtktcataaattcttgcttcattgcaatcattaattggaagactgttctgctcagaagcctcatctagttatcatgattatcatcaacatcgtcaaccaaccacaagcatcaagcatttatggagtatccacagattatgcagcacttgccagggttctgggagacttaatctgtgtgtgtgtgtgtgtgtgtgtgtgtgtgtgtgtgtgtgtgtgtacaccyttgcyttcaaggagtttgtgatctgcagaactggaggaaagacagaaaacttggggaaagacaagtacctcatttttcaataygtgtaaagcccatactgattcatgtatgtggcattgggggacatggacagcagggagacaaagggatagatcttagaaaggtctagttacaaataaatggaagcacataagtttgctgacatgggaggacataggctgggttgtaataaggtagggtaattggttgaaggagggaggaagaaattggtgaagagttgaaggcagtaattaaatagatttggcataataacagagatgattggagaactgggagaagaaaattacttgctgtagttgattatggcagaaactgacagggcaagagattacagttgggattttttgcaaagaggagctttcaagtttgtgacatcttttttttttttttttttttttgagatagtcttgctytgtcaccctagctggagtgcagtggcgtgatcttggtttactgcaacctctgcctcccaagttcaagcgattctcctgcctcagcttcccaagtagctgggactacaggtatgcgccaccacgcccaactagtttttgtatttttagtagagacggggtttcaccatgttggccaggctggtctcgaactcctgacctcaggtgatccacctgtctcggcctcccaaagtgctggagttacaggcatgagccactgcgcctggcctccaagtttgtgagatcttgcccagatttaaatgaaggatgtggggttcaggattggtacagcagaggaaaaaagtctctctctctccccactcccctctttttgctgtgatctattttttttcccacacttttcacaggtgttgtcctgtgatctatttctatttggtggatctcttttcccctcatgttgagaataatggctgaggtgtggtgtatcctttaattttgaaaggaaacggcatgatggttttgcggtttaatcatgagacacaagaacagcttttgttgtgtggtgataccataccctgaattgagattatcagtgtcagacatatattactgcacttttttatcttcttcgcttaatcaaaatagattttaatggaatttattattcacttactgtacagtaaaattacttttataactttccattgtgtttttcttgtaaattgaggtatttggcctctatttttcaaaacagacaaaagttgtattcaggttaggtttggatctggtatattagcatcttaaattctcaagtctcctataaacctgttctcttaggccagctatggctgcagaagtcagttatagataaacattgagaggggagatcacatcatcctttgttttccatttctgaaataacggcagacacgtggcacatgtcctgagcctggggtggtgccgttccttttgttgctctatctgtatgggagctaaccttttgacaatttttatggcaaatgctagggcagcttgtgagctaattagaagaaactgataagtgaatgctgagtttgtcgattctctttcattttctgcagaggagacagccgttgaaacggcattcttcgtgtggctgataatttagcccaccagacccctatgaaagggaatattgcttctctcttagctttttccacattttagtattctctttaaagccaacatttctccataggttctaatacctaggcatttcatatatagtagccaaattcagttcactttcttcaagaaagttgtccttttcaaactgtggccttttcctgtcatgggtctggtttcttactcaccccgcactgttgtatcagcaggtactaggatttgattgctgatgactgtatgtcccaaagaaaacagtgggagaaatgcagctgtcaaagcaaaaaacaaatagcagttttaaggttgagtctcaacctggccagttgcaagatggctgttcagtagatgttattcctaatgcttccctggttaatagaactcaatcagtcctgcaggttattggtgctggttgcttcctataacagaaaagtactgcattccagctacgttcctgctgtggaacataagtgcttagtgctatttacttaaaacattctaggttgataaattacaagcccttcactctgggtaaagctcataaatccagctcctacaaaaaaaatagcaagctgatagcacttagtcctgtttataaagttcatacacatctatccatgatataggcacaagtatatatctatgaaatagcactgcagcctgttaaagtaatgggtgagcacagccacaaaggcgagaagcatccgacttccagactcctcctattagtctctatgcctgaagggcaccttgaggaggaggtctgtggaagggagcttccaggcattggagtccacatttgtgctcctttctctctttcttcttcccgcaagtcacctttctcacgccctccacctctctctttccttctgcaaaatgagcatctgcctcttagcctccctcttcgtcactaggctgagatgaggcagggaaccgtggtggatccagagcagtttgaacactttggctgcgtggaaagcgatggggttaaatgagcatttaatcagaaccaggagctgttcttttggcaacctgttgaggaaaaatgataaaccctaacaaaaaggccctcaagtggcacgagtgcagggcctgaaagcgttacgtgccatcagttatccaaaaagaacattttttaaccagaaaataaacatgagactcatcccactagtcctaggttcttggagccccacaggtattgttgcaggatgcatcattgcttcgaatcagtgactgaacaacccagttcctaatcagcgtggagagtcagaattgtcacacgcactgggctgaagctgcatattcagtactgcattgaacattcagtactgcagataggataattatgctgtttgtcagatactagaaaagtgcaaagaacattccttcactttgcaacagcttggacccaagtggcagacctgctgttccctcaggctggcgtgacctccctattgtcagccccttcaccacagctcaactacccccctggctttcaagatacagctcaaacagcatctctcctcaggaaagaccttactcccggagacccaggcccgagttgtgttgccactgtaccctgttctgttagcacttaccaggttgcatttttgtgatccatttacctgtcttccctgtcagacatgaacagggacagtgtcttgtcctcaattcatcatttttctcctgttttgagcacaatgaccaggacgtagtggatgctcaataaaggtttgtcaaatgactgatagtatggttagctcagtgagaattgatggtgccctttgtgatctgtcatccatcatccttggtgtgaagcagggctgggaggctttaaacagtgccacttgagaatctaaggagaggtggcagagttacaattaacaataactaccccttactgagtatttatttgctatgggccaagcactctcttagggtttttaaatgaatcaatgcacttaatccttagatcaatctgctaagacgagttctgtttattatcccctttgcaaagcacaaggaagttcagtcacttgcccaaggtcacacagtgacagtgcagagattcataccaatggagacaaccatcacttatctatattccttttagactagttcctggaaagattaagccctcatgtcctgaggcatccatcttaggtaacaatttaacttctctcttgtttctagaatggtattagtgtgttccctacttgggagaatggagaaaatggtcaccagataactttctgtgttttttggttcagatgagataggtagagttagttgacaaagaattgattttatgtatttatttttattttgttttttttgttcttgattttagatggtagtttcggtccttttggaaacatagcattatcctccagccagactgaactatcctactcccatttcctgtaaggacgactgacctcttttttgcctctagacttgtgcatatgctattccctctgcctggaacatacttacctgcttgctcctctttccccaagcccagtcttcacttggttcctcttttctaccatgagccagtttagatgtcatttccctacctgcccaggataggaggttcccacagccgctgggtgtcctgttgtggcactcacaagtgttatagtgctgaaagcccactcctggggtttttatgtgtgcgatgaaggaggtgattatcttttcccagctagttcatatcctagtcctctgagtgtagagacttgtttctttttccccatttgtcccctgcaccttgggcggtgcttggacacaatgtgtgtgttcactaactatttgtggaagaggtgggtgagcgggagttaactggctttaagtctttgagttttgggtttttgaagtagtcaagtccgtccacagtccgtcctgtggacagccattgtttgccatgtcttgtatgtacacacttgcctgggcactgtggggagcagaaagaggactaatactgcccttgtgctgaggcacctacagtctcgggagatgttcagaggacagtgagtcacttcacagcatcagcatggtatagtggatgagtgatgacactgaagatgagcttggtcatattctggcaagttggctgacacctggaagtcccgtccacaccccaagacctcttttcccagggtgtcctgagaaccacccagagcaactgtgaccaatggcgcttgtttttaaagaagtagaaacccaaattaggaagactgagcaaacctcatgcatttggggaagggcttgttggaaagtggaacctgatgtaggtagcaacatgttgaggttagatttaaccaaacagaaagacttcttaattgcttaaagacaaaattttattttataagtggaattagggctttaaatcaaatatgtttgaacgtctttacttggtttcctcaggcaccttcactcatcttgtctaaaacttaattgctggtctatccctgccagatttgctgcttctccttgattccatctctcctttagtggaaccacctggtactcaagccagacacacaggtgtccctcttaattctgtctcctctggtcctgttcaggcacctgttctgtgactctgcctcttttccgtttctcaggctgccttctctcccttctactgccttccttatgtcaggggttggcctactttctggccttcttgatccagggcttcttttgttcaactcatactccaccctgttgtcagagcccatccagattgcagattggagcctatgactcgtctgctcaagggtcttcaaagactttgcagcttttggctgaagttgagccacctggtcccaaatggagccccattcccgccatgccacctcctgtctgtttaagctttacaagatgacttgcagtttcctgtagaaagcatgacttttaaaaaaagacttatttccttctctcctgcatctaactctcacttgctctttaaagccttctctgacctaggtcttgcctgtttctcctgcagaacactgcttccaccattttgtagcatcagtgtctaacattggttggcatgtagggtgtgctctataatccttgttgaaagaataagtgggaggtaacagaggcttaattcacattgagctgtaaacgagcaatatctgactcttctgagaatggattttgtttcaaacactggttacttactggaaaaggtgtctggggagtgctggacagcaagaacaaagggaccccacagaacaggaaaagaggcactctagggtctgcggtttgcctatgttagatcaccgtgaaaaaggccagtgtatgctttggcagctggcaaagaatcctgtgactcagtttccttatttgcacaaaaagggtatgagtctacattaggtaattactcatgctcatttccaactcttgacagtctacgatcctttgtgtcaaagttaaaaatctaagtagggcattctgaattggtgtcagagttgatgcacttctcactgtattgcaagtgccaaggggacaaatacattgtctttttgcattcaacaaagacagttttgcattttaaaaacaaagtagaagggaatacaggaaaactgcattaatacaattttatgctggagaatttaaactcccatgtcaggaaattcactcatcattcccttggcagcttttgtttctctgcactgcacaccccacttacagacagccccttcttgccaaagcccagcccagccatgaccatgagttatggcagattgggaatcgttaccttgatcttctcaacccttgggtgtttaccttttccaagttaatgcctgttctttaatgttacattatcttgtagcaaggtagtcatttataatttatatactagagctgccttaaaatagagacaagaggataatcagcatcctgaaacttctagttttccaaaataacatttcttcagtgaagtctgcctgtaggaattaaaacttttggtgaattaaaaagctttttgtcctattgtcagactgggaaatggatgtgcccattactcagccttaaaaacgaggaaggagatcatctgttaaaaataaaactcatcattttcttttattcttctcaaaataatccctaaagacctcaatctttatagtgttccagtggccccactatagtcagagaggagacagggcagaagttgaaggacagataggagaaacggccctgctaaaagataaaagccagtatgcatctcagctacttgtctgctgtggtcctgatattcttccatctaggttgctgctttgcttgactttgactgcaaacacagagaagggatgggctttcctgttgagtaccttgtagagaacccactgttcattcatatgtgttaaaaatgaaaagcctacttgaaaactcccctgtagaatcaggttttagcaaaaaccaatcaggtatcagaggtctaacttatttttcccttcttggttttatagcaagtctctaaaccctaagattttttgtttgtttgtttgagatggagtcttgctttgtcgccaggctggagtgcagtggcatgatctcggctcactgcaacctccgcctcccggtttcgagtgattcccctgcctcagcctcccgagtagctgggactacaggcatgcgctaccacacctggctaattttttagtattttactagagacagggtttcaccatgttggccaggatggtctcgatctcctgacctcatgattcgcctgcctcagcctcccaaagtgctgggattacaggtgtgaaccaccacgcccggctgcctaagaatttttttcattccttttcattatatacatcttcagtgtgccaagactttgagtggagatttctaatgagggcaggaagggacggatgcttctgcaattgagtggtctcatttttcccatgtctgtcgaaagattactctttcatgaccaccatttctatgatgcatctcatatgatcctaatgcactcgagtttgtatttgaatgtccatctgatatttaggggtggttggggcaaggagggggcaagcagcaactaaggggttgtatgggaacatcctggtggtttaacttgaaagccactaggtggcaacatttactaagttgccagccattctcttcccttaagacattgaacttgcttttccacatagcagatggaatagctgagaaaagagattgccattgcttcaggttcttttgaaagtgaggctataggataaacacactacagtatattgatatctattcgtcacctgggtttagataccaggagtttgaatttgctctgggtgactgggtgagtagcttcccctttggcctcagttaggcatccttgacaggacagacctgtgattggactgtctggtctctcatggttctttttctccrtgatttatgactttgattatgatttctttatattaaaaaaaaacttgtagtaaaaccagtcttatttaaaggaatactagccttttatcaaagrgcaaagtaatgatttaaaaaaaaaatcaacaacaaaatttcaagggaatgaatgtccctagaagctagccatctccccgagttaacttaagaggctagactctcctaaatgaggatgcttatttaccagctttcctaaattagcagctttggagmtgttaaaatccgtaaggaactgtccaagggatgtattgtgtatgctttgcagtgattaagccattaagctctaattggtattttcccactcatgggtttgtaaaggaagctttaaaattatttaggaattcagtcctcatcagctgtcttagtgtcatccccacgttttggaacctgagagtggagagtgcagagaaaaggttttattaatgatttttgctcacagtgtccttccccattggtttgttattgcagatgaagtggaaagggaaggacctctttgatttggtgtgccggactctggggctcygagaaacctrgttctytggactgcagtacacaatcaaggacacagtggcctgrctcaaartggacaagaaggttgggctagaactcgatgaaactggtggggctgacgtgagctttccagtttttccctgagcaggcgcctagctcatcactggggcgctgtagctgtatagtagagaagggggcacattcctgaattaagtcatgcagaaagcaggacgtagagatgctaccagtttcctwctcctcacaggctctcctgggcaagcagaagttaccaggattagactgctgctggccctggcttctttacccattgttaccagcctgattgcttctggctttatgcctttcagtttatgaataaaaacttcatgaataaaaattactgttatcttcatatacttaaaaataaccaatttgtgtcttttagagagtattggggcttgtgttctttagggaattttttaaagtctttttgaggaacaccatagtctgacatgaagtaatcattaatatgatctaaggaatagagagtgcctggtccccagggtgaaagaatgtccattttgtcctcaggattctctggggcttctgacacatggccaagaaagctgggctcctggcaattttaatgtggcttggaaatgaatattgcctaaaggaactgccctctgcatgggttcatatgttcacacaaggatacacttgcttactgacctgcctacctagccatgaaaggcaggcggggagcaggaccatatgcttttgtcagtaactcctaaaagacacctgaacttcaaagtaagtcaatgtctaattcttaccccaaatgatgccccctccagttgcctacctgagcataataaataatgaaagcttcctattttttttttttttaccagtttgactcaaagcttaagtgttcgaattgtgttcacatatgtacacagtaatctaaataatcacatgggaatccctgctggttgtaagttcaatggtaattcccaatgatcatgagcatctaagtgccactgggggccactgtcagtgagggtgtcgtagaccagattttgaatctccttggcattgccatctagaatttgggcaggagcatggagagttatgtgtcaaagacagcaaaactttttgtatgtttttcatgattcttagcaaagtgaattttaatgatagctgagtgtaggccaaatggatattagactgggggcatcaggagccgtggaacttgctgctcaagggaaatacatcatgacacatgttaatggagccttgtagcctgtcacatggcgtgtttatgtcttgaaattcactctggagagcagatggttcaagctttacaggggtgaatggaattgttagaagatttaaaggcagtggtttacagactgtgcttcaagtattttgtggggcatctctggaggttccttgaaacaaagggttgccatgatggacacattttattctgttgctcagttaatgtttagatgacttcataatgatctagttcatcatctctaagctgtattttttttttttttttttaagacagagttttgctcttgttgcccaggctgcagtacaatgacgcagtctcggctcactgcaacctctacctcctgggttcaagagattctcctgcctcagcctcccgagtagctggaattacaggtgtccaccaccacacctggctaattttttgtatttttagtagagatggggtttcaccatgttggccaggctggtcttgaactcctgacctcaggtgatccacccgctgtggcctcccagcgtgctgggattataggtgtgagccaccacgcccagcgctctaagccgtattctatcacggacctaaatattggcagtaggcaccaagaaaaaagaaataaaggaagattccactacttcagataattaaaaaaccttccacctaccataaaggacagtgtccaagactgctgagtgatacatttctagtttttaactattctgtggccctgagaacatttatgccttaatcctagctctgctcacttcttggggctattgattaatttgtttcagaaacaccataggaagtgaatattacctcttgctataggtgactttgtgaatacttcaaactgtaaaatcacaactttcaggaaatgtgataaatttagtgggaaaaaaatttaatkcacgccttgcaaaggcttctttgaggrtagcacaggaggaagtgccaatatagtgtgtttgtcttttgctctgcaattctgcaggtactggatcatgatgtttcaaaggaagaaccagtcacctttcacttcttggccwaattttatcctgagaatgctgragaggagctggttcaggagatcacacaacatttattcttcttacaggtacatcagtcaaggctaccccccagttctgagagaacttgcccaggagtggttgcagagttggcctcagagttgaccacaaacacctttgtattgcaaaaatattctacctctggaaggtcagcccctttggttctgtaatggaaaaaaggcttcagaacagaactatacttgagtgatgaaaattggtgtcagatgaaattgtgaaggtgtgatggtgaagaatggatacaagtagctacctaacttaaaacctccttgaaaatgggtcctattttcttctagctaacttaaaagtactcaatagtttcaaaggaaggctaaagagagagtcttataaagcagtagttcttccaaaagtttaaaatctgctctcattaagagaggactggccgggcatggtggctcaggcctgtaatcccagcactttaggaggccgaggcgggcagatcacaaggtcaggagatcgagaccatctggctaacatggtgaaaccccgtctctactaaatatacaaaaattagccgggtgtggtggcaggtgcctgtagtcccagctactcgggaggctgaggcaggagaatcacttgaacctggaagatggaggttgcagtgagccaagatcgcgccactgcactccagcttgggcaacagagtgaggttccgtctcaaaaaaaaaaaaaaaaaaaaaaaaaaggacttcagccgggcgggttggctcacccctgtaatcccagcactttgggaggctgaggcgggcagatcacgaggtcaggagttcaagaccagcctgaccaacatggtgaaactccatgtctactaaaaatacaaaaattagccaggcatggtgatgcatgcctgtaatcccagctactcaggaggctgaggcaggagaatcacttgaacccaggaggcggaggttgcagtgagccaaaattgagtcacttcactctagcctgggtgacagagtgagactctgtcttaaaaaaaaaaaaaaaaaaaaaaaaagaggacttcagagctctagtgacacttggtttgtcccccatatgtggtacttcagacatcrtgcttcatgctatgctgtgtctctaattgtcctatttcttccttaattcctcattagattgtaagccccttaaaggcaagcctcattaagtacacagtaggcattccataagtaattgtcccaccgaattgaagaaattaagaaattcacaattacaggttgaccatccagaggcacagggaggggaactggtctgaggatgaaaaccttatcagtttcacttatgttcttactgcaggtcagagtggctccccagtttcatggccagttgcagtgattggcactggggctatttgtgtgctcaaaggtttcagtaatgtaaaagatggcagtaggggcattaattacatgatttcccagagatagttgggtagtctgtcacatagccctcctgtaattaatttcagcctcagtatattgtggtcagcaaatattaagttaaatataataaaaccccctaaattctttttaaaaaaggtctggggggcgtgtgtgtgtgtgtgtgtgtgcacgcgcaaaagaggtgacaaatttatttctgatgtttgcagatcaaagggacactcttaggctgggcgtggtggctcatgcctgtaatcccagcaatttgggaggccgaggcgggtggatcacctgaggtcaggagtttgagaccaccctgaccaacatggagaaaccccgtccctactaaaaatacaaaattagccgggcatggtggcacatgcctgtaatcccagctacttgggagactgaggcaggggaatcacttgaacccgggaggtggaggttgcagtgagccgagattgcgccattgcactccagcctgggcaaccagagygaaactccttctcaaaagaaaagggatgttcttgcagtttttctatagcgttgctttttcccccctctctttggaaatgaaaccaagggattagaaagttgcactgcttgagaaacatctcaggtttcattttctctctaagaatgtaaaatcacttttaaaacctaagaagaatttttgtgtttgaacgtaaacacctaacaatstcctaggtcccagaatgtcctaatgttatagaaatggctttcttgtaagtacttggaagcactgcctgtctcttgtgtgactgacttgattttccccatactgaaatgttaaggcatttttatgactgagcaaggcaaaatttactgcttttatgaatccggtgactgttgacatctgtgagaggagagctggctttcctgctgtgtttatttcagtgtccccctgccacgtcatgcagttgtcttgcttctgtgtctggaacatcccaagttgcaccattctaagaaaattaagtgcaatgaaatatgttaattcaacattatggcttaagaattatatttcctggacctcacgtgtacttaaaagttgaatcgatcaaattttattgcttccttttcccttagagcagcacgttgagagtgatggttttttctgcaatcataactcagtggccttggtgacttttgtcttgtgttaatacttaaaagtagatccatttcctctggggccatgcatattcaaaggggctgaggctgtagtcatccccagagctgctcttgacacttcttgagttcatagcgctstgtcacacagcctctgttgtaactacagagaccgtttttactcttcagcattgatcatgaagagaagagataaggggtttttatgcatagccgtcataccagtaacttctgtgactgaactctccacctgtctgcatcagtaaaaaaaaaattgtaccctttgtcagaaaattattaacaggctgctctggcagccctcattagaacgccgtgaggccatctgttgtgatcagcctacacacctcacttccmctcacagagtatcatgtctcccttgttgctcctttcaggtaaagaagcagattttagatgaaaagatctactgccctcctgaggcttctgtgctcctggcttcttacgccgtccaggccaaggtaggctcaaagaagaaaaatgtatttttcctgggcgttaatttgggtcatgggatcactcctatcttctctttctttgggttttctgtacttcagagagacttgccccagaaagtgagatgttatgggacttgtggacttgaagaaccactgtcactgttccagtgtttgtataatcttgtgtgtgtatgtgtgtgtgtgtgtatgtgtgtgtgtggtgtgcagaaattataagtatcgttctaatgaattagaattcattctaagtgaattcattcagaaagatgaatttcctgtgtaatctcattatgtacatgtggtttatgacatttactggaaaaaccttttttcttttttttttttaaaccataaactcaaccatgtggtacaacctttctattagccaggaaaaatgaatttatggtctccaattttagccaaacatggcctttaggtcagaaaggcccaggtcctcactccaaactcatttgcaaacaagctgccttgtgtgtggacactacactacaccttcagagaatgccctgcttcatctgcccctgattgacatgctagctgttcatgtggctaagcactgcaggtgctgtggcccaccaagcccacttgagctgtctggttagctgaaaatcgttcacttccgttaaatcactatagaccttttttttttttttacaagaccgatgagagggttagccacggagtttcatgtccctcagatttttcacttcagtcatatatcaccttctcttggttcccctgatccctgcctttcaccagagcacaagatgttgtccccagaattggggctccttgattacttgtgtgattttattttatttatgttttatttgtatttttatagagatggggtctcactatgttgtccaggctggtcttgaactcctgagctcaagtgatccttccaccttggcctcccaaagtgctgggattacaggtctgagtcaccatgcctggtcttacttgtgtgatttttttttttttttttattgatcattcttgggtgtttctcacagagggggctttggcagggtcataggacaatagtggagggaaggtcagcagataaacaagtgaacaaaggtctctggttttcctaggcagaggaccctgcggacttccgcagcgtttgtgtccctgggtacttgagattagggagtggtgatgactcttaatgagcatgctgccttcaagcatctgtttaacaaagcacatcttgcaccgcccttaatccatttaaccctgagtggacatagcacatgtttcagagagcacagggttgggggtaaggtcacagatcaacaggatcccaaggcagaagaatttttcttagtacagaacaaaatgaaaagtctcccgtgtctacttctttctacacagacacggcaaccatccgatttctcaatcttttccccacctttcccccctttctattccacaaagccgccattgtcatcctggcccgttctcaatgagctgttgggcacacctcccagacggggtggtggccgggcagaggggctccttacttcccagtaggggcggccgggcagaggcgcccctcacctcccggatggggcggctggccgggcggggggctgaccccccaacctccctcccggacggggcggctggcctggcggggggctgacccccccacctccctcccggacggggcggctggcctggccggggggctgacccccccacctccctcccggacggggtggctgccgggcggagacgctcctcacttcccagacggggtggctgccgggcggaggggctcctcacttctcatacggggcggctgccrggcggaggagctcctcacttcacagacggggcggttgccaggcagagggtctcctcacttctcagacggggcggccgggcagagatgctcctcacctcccagacggggtggcggcsgggcagaggcgctcctcacatcccagacggggcggcggggcagaggcgctccccacatcccagacgatgggcggccgggcagagacgctcctcacttcctagatgtgatggcggccgggaagaggcgctcctcacttcccagatgggatggcggctgggcagagacgctcctcactttccagactgggcagccaggcagaggggctcctcacatcccagacgatgggcggccaggcagagacgctcctcacttcccagacggggtggcggccgggcagaggctgcaatctcggcactttgggaggccaaggcaggcggctgggaggtggaggttgtagcgagccgagatcacgccactgcactccagcctgggcaccattgagcactgagtgaacgagactccgtctgcaatcccggcacctcgggaggccgaggctggcggatcactcgcggttaggagctggagaccggcccggccaacacagcgaaaccccgtctccaccaaaaaaatacgaaaacccgtcaggcgtggtggcgcgcgcctgcaattgcaggcactcggcaggctgaggcaggagaatcaggcagggaggttgcagtgagccgagatggcagcagtatagtccagcttyrgctcggcatgagagggagaccgtggaaagagagggagagggagaccatggggagagggagaccatggggagagggagagggagagggcacttgtgtgattttaaaacataatcttttcacttatttttctttttaattaaaggtgttcatgaagccatttcccttaaggttagaaaaaataataaaatactcttaactcactttttggggtagattaatgcaatttcagatcaaagccaggaagtaactgtcatttgtggggaaaaaaggctatacatgctagtcagaccaatagaagcaccaaagtcaatttaatcatttgatggctcatgtaatatttgctgagtattcatcaggcccagggtggggagagagcatgagagttgttgaccatctcatagttgcaggcactaaagcaagtatctgccctcagtgatttgcccaagatcattcagacaatcttgggcaaagctaagagcagaagggtagaattcatggctttgagattgcattttgtgcctccaatattctactttcctgaaaaattagtaattgagaaaacagaaaatgggccctcattcaactaaaacatatgcttcmttttatgctttgatcaagaatattagtaagaggaaaaatgtgtcctttcaatcagtatcaccccgacagtgatgaagcagtcattggcactttgattaaatccgagcacttcctggcctggagttgagttccttttcgcacgctttctccccagcgagagcagacccagcctctcaaggacaccacctctctttgaagggcttccatctcaaaggctacattttctttccatggatttttgggccacaaattcaaaggccacctgtagaaaaaaattacttttcagtgaaccagcagatgtttgcttaaacaggtttcactgtaggaaagccctgctaatttggatcgtactaatttggagatgaaagtgattcacagacgacatatgtggctcacatggaggaggatgttctagctattttttctggtgtaaattttaaggatcttacaaataaaggtaatctatggcttaaagtcttcatttgggaaactaaggcttactatgacatacttccagtttctaggactgctggttaatagttaaaggatatctgattataatattaataagatcttacatgcccatagtgttttctagttttaccaaagcaatacaaatgaatattttgtgcgacactcagtgtagtctttccagaagccaaggcttgagagtattatgcctgttttgcagatgaggaatttaaggctcagaaagggatttgtgacttgtgcaaactcacaatacttttatgttaagcctatttttatgaaatttttagcccacttctcgatggagaggatttcaggccaaatagaatgagtggagctgggatgggaaccctagtgtccaggctgcctaagttagcacattgcacttgcctgtcactgtctagcttgagggaggtctttgggtagcaaccactgcctttcactaaaggctagtttcatttatatgatcacatttgtctaagttcttcagtaagtcatactggttccttccattatattcagcttgttttcttccacaacctttctgaaacagaaaggaactttagaagtgtggaagggaaagcgaattgagctcattaacacatggaatgtaattatgcacaaatgtattcattacagtatttcagctgttggaatgatatagacacagttaattccaaagcataaagaaacaattaccctcaaagtataaatacaatactaatcacatggttcagttaacaagaaccatatatgagttatacttgaatcaaaagtgtaggcagggactgggcacagtggctcacacctgtaatcctagcactttgggaggccaaggaggatggatcacctgaggtcaggagttctagaccagcctgaccaatgtggtgaaacctaatctctactaaaaatacaaaaattagccaggcgtggtggtgtagtcccagctacttgggaggctgagacaggaggattgcttgaacctgggaggtggaggttacagtgagctgagattgagccattgcactccagcctgggtgacaaagtgagactccatctcaaaaaaaaaaaaaaaaatgtagtcagggtttttttggtgcagtcacatgacacactaaaccatcttgcaatgtttaagtcacctgttggattgtatattgaccatttggtgttggaaatgtgttcttattgaaaatgactttgggagagaatggcatataatttatgaatctcatgttgctgtgtgcagactcctagtgatcagaagagagaaaagaattgtgggaagrgaagcttagtttcttagtactctttaatgcaaatcagggacagagtgccaaagtacaattgagttagaaaattgagtgtgtaaagtgtaggtagagagtggcaagagttgaggctggagaggtatgcaaaaaatcagatcttaaaaggtcttaactttatcctgtaggcgatgcagtgaagggtttatattttagatagagcctgtagtggctgtgtgatggacagattggagtgagacaactttggaaacagggagacctattagaaggctgtgatagttgccctggtgagagaatattaggttcacayttcaggtggttggttggatgggggctgactgatttaaaaatatccaggagataaaargttgattagatggtgctatactctgcatatccctttttttcatatccttttacagaatggtatttttcttcccactcagcatctactttgagatgtatccatgttgtgtgtatagatgtagctcactgattttaattgatttaatatggtaaccactgataaataaacctagtttatttatctgttcctcttctgagggagaggtagtttgtttccactttttccttattatctaaacagtgctcaaatgaagatccttttatgtgattccttatgtacatgtgcaaatgctttttccccttaaggtaggtgcctacgaaaataaataaataaatacatacatacaaaaaatagctgggtgcagtggtgggcgcctgtagtcccagctacttgggagactgaggcagaagaatcgcttgaatccgggaggcagaagttgcagagagccaagatcacaccactgcactccagcctggacgacagagtgagactccatctcawaataaataaataaataaataaataartaaagtaaaaaaattaaaaaaggtaggtgtctagaagaagaattgcatagaattgacagaagaggtgaaccccaatrtaaaaaaaatcttaagttgataaaaagacaaatgctataaacagggcatgaaacatgcactttatagaagagaaaacaagaatggtcataaatacaaaaagatgtttcatctcacaggtaatcaagaaaaagaaaaaacaacaataaggcaacatttcaaacccataagattggcagggattactagattgggtaactgcattgttggtgctcatttacctgccaaagggattgtgaaattggcataacctctgtagagcaccaagtgtggaagggacgggtggaagtgaggagacacaccgctggctgttccaggtggctactccagaggaatctctgcacacacatccttttcacttaaaactgtcacaacagatagacccacttcattttctttttctttttgagacagcagtctctctctgtcacccaggtggcacratctccacccactacaacttctgcctcccaggctcaagggatcctcccacctcagcctcagcgtatgccctgctaatttttgtgttttttgtagagacagggtttccccttgttgcccaggcaggtcccaaactccagggcacaaactctatacccgcctcagcctcccaaagtgcagggattacaggcatgaatcactgcacctgaccccagctcattttcatttaactgccgaactatgtttcatagaaaggagggactggattatttaaatatatctttattggtagatatttaggtttgtttttctttctgttgtttttctattggtgaaacagatgcaatggacatccttgaatatgcatctttgggcatatatggataatatctctctataatagatatcaagacatggtataactgggttaaagaataagaacatttaaaatgtaagtaatgtgaagcaaaaaaaaaagccagacacaaaaggccacatattttatgcttccacttacctgtagatgaaatgtccagaacaggcaaatccatagagacagaaagtagatttagtggttgccagggaaagggagaaggaggaaattaggagtgactgatactggccaggcacggtggctcacacctgtaatcccaacactttgggaggctgaagtgggtggatcactggaggccaggagcttgagaccagcttggccacatggcaaaaccctgtctctacttggccgggtgcggtggctcacgcctgtaatcccaactctcagggaggcaagaggtgggaggatagcttgagcccaggagttcgagacctgcctgggcaatatagcgagacccctttctccagaaaaaggcaaaaacaaaacaaaacaaaacaaaacaaaagacaaaaaatatataaaagccagctgtggtggcatatgcctgtaatcccagctactcaggaggctgaggcacgagaatcacttgaacccaggaggcagaggttgcagtgagctgagattgcacccctgcactctagcctggggtgacagagtgagactctgtctgaaaaataaaataaaaataaaaaaggagccactggtacaaaaaaaaaaaagaaaaaatgagtaagacctactatttgatagcacaacagggtgactatagtcaataataattatacacttaaaaataactacaagaacataattggattgtttgtaaaacaaaggataaatgcttgaggggatggacaccccattctccatgatgtgattatttcacattgcacaccgtatcaaaacatctcaggtaccacacaaatatatatatacctactatgtacccacaaacattaaaaattaaaaataaatataacttacaaagattaaaaatgaaattagaagtgatggctagtgggtacaggacttctttttggggtgatggaaatgttctggaattagatagtggtgatggttgcacaagattctgaatatactaaaaaacactgaattgtacacttaatgtaaattttatgtatataaattttatctcaataaaaaatttaaatagatatagccaaatcaccctccaaaactgatgtcataatttaactttcaataacagtgtgtgagaatacctgtttttccacattcttgcgaacagtagatactatcagtctttaaaatttttgctaattgatagaaaaagattttttaaaatttgcatttccttgattgctattgggactgaacgtcttttcataaacttactgtccatttgtatttctttgttctgtgaatcaaccgtttatgacttgcctactactgtattgtttgtttgtttctttctttttctttctttctctttctctttctttctctctctctctccttcctccctccccttccttttctttcctttttcttttctttctcccttcccttcccttctctcccctttgctcccctcccctccccttctgtttctttttcttttctttcttcctttcttcctttcccaggttcaagtgatccatccgcctcagcctccagaggagccgggactataggcatgcgccaccatgccaagctaatttttgtatttttagtacagatgaggtttcaccatgttggccagactggtctggaactcctgacctcaggtgatccatccgcctcggcctctcaaagtgctgggattacaggcatgagccactgcacccaacctgttcatctttttccgattgatttgtagatgctccatgtattatgagttatcaaccttttgtctattttacgtataggactggtcaatctttttctttgtatgttttgagtgacttttagaatgcgtttaccaaccattattatatccatactctgttatgttttgttctggtatttttatggattttcatttataggtttaagaatttattgactggtgtgtgggtatagtagggagggggtctgtcttttttctatatatgtagtaatctaacctttatgtttttgtgaaatcctactcagagcattttatctcatttctcatagttatagacaggaaattatttcatatccagatagagcctccgtttaacctaagtattggctccacaagtcttttaaatggtaaactccttgaatttaaattcaattagtttatgtcacgagtaggtccaggttttctgggtctgaattttaataatttaggggattgtctttaatgcaagagtaccaaattaggtacaggcatatgaaggtgcagagacctgaaatccaagcttccttagcttcccagtaaattcaccctggttacattatcagaatgcatctgttacataaaacgatgaggagcagccatctccatccctggagtggtatgactttcttttgtattcaccagctaccacaacttcaggatttttttcttcccttgttgtttaaagagacatttaagagcagacacatacatcaaggtggctttaatgttggaagcagagttagtccagtggagaagttctttcagcagggtctttgccacctctgcattgctcaaatgtgatgyatttgatcagtggactagctgagaacttggtataataatgggggttgttaatcttgcatgcctttggaacctgaatttacagctttaactttgcatatctgcttgcttttgcattagagcttggtcagcactgttgagagatttgcaaatgcaactaasagggctttcttttagcatcctaccctttcaaaaatccaggaggcaaacaatgatcaatgttgtcataagtaatgcagaggatggcaataataataatacctgactttcaccataagccatgtgctgtgcgaaatgcttacctgtattgttttacttcatcctcatcatcccctataaggcagatgctattatgaccctcactctacagatgaggaagttgaggcttagagagaggatgccttactcaaggcctcagaaggggtacttcagcacccccccacttcccttcargatcctctaaggccagtgctctcatttgacaaatgaaagacagatttggagagacctgagatcttttggacatcaggtttatgtgtcaagcatagttttatttattttattttattttgttattttttgagatggagttttgctcttgttgcccaggctgtagtgcaatggcatgatcttggctcactgcaacctccgcctcccgggttcaagcgattctcctgcctcagcctcccgaatagctgggattacaggcatgtaccaccacgcctggctgattttgtatttttagtagagacgggtttctccatttggtcaggctgctctcaaactctcaacttcaggtgatctgcccgcctaggcctcccaaaagtgctgggattacaggygtgagccaccacgcccagccaagcatagttttaaaaactttgctggtcttatttaattaaatccctgtaagagtcctgcaagataaatactattattattcctgttttacagatgagaaagctgagacacaaaaatttccaaggccacatagctactatgtgaaagatgtaggataaaaccttaggcagcctgcctccagagccaggctcctaccctcactctacagctgccttgcagggagtactgttaaagcttagtacagttacgacttactgcatcacatctctgagcctcccagaaatagagagataccaaggcctttcatttataatttctaagttattttttatttttatagacagggtcttccactgtcactcaggctggagtgtagtggcacaatcacagctcactgtagccttaacccgtgggctcaagtgaccctcccattttggcctcccaaagtcctaggattacaggcatgagccatggtgcccaccctatttttttaaatgaagaaatgcctaaactgtgttacaaaaactgtggcatgtttaaaatgtttaaatttgacaaattaggccaggcgcggtggctgacgcctgtaatctcagcactttgggaggctgaggcgggcagatcacaacatcagaagtccgagaccagcctggccaacatggtgaaaccctgtctctactaaaaatacagaaattagcccggggtggtggcgtgcacctgtaatcccagttgctcaggatactgaggcaggagaattgcttgaacctgggaggtggaggttgcggtgagctgagatcacgccattgcactccagcctgggtgacagagcgagactctgtctcaaaaaaaaaaaaaaaaaaattgacaaattaattctcttaagattcaaaaaaaacaatgcaatacaattctgctatttgaaagataattatgagattcaaaagaaatatgaattcatggggcttttacagttaaggtgatatgggaatgagrcatgatttaaagttaatgatgaatatcttctttcactcctgtgtctgtagttttaggccgcttcatttggagaacacaccagaagtcttaacttgaggctctttgagaatgagagaacataacgaaataatgagatttggtggtatatagaaacagcagccttgtgcctgacctttgttttttcactgttggtggctaaaagaataaatgtttatagattatactgaagtactgagctttgttgtttttggtaaaatgaagagccactgtacgctgattgataagagataggctttgattttatattctactgtatgtttcagttagtttctttttaaacattctttaacttttgattatttccttatcagacttgagttttctaggraaggagtttttttttttaatcagagaataaatttccaagtcattgtccccggagggataaattaaaatgcagggcctatttccaaccgcattagtgacttctctgtagctttaggaagatcaattaaccttttactcacttctttgtctgtacaataggaatggcagtgttgacatcagatttttccaaagtatttttcagaaacttgggtgaaaggtattaaaactactgcctgcattattcctggatccccctagtaatgggctccaattaccagtcacttataagaatttataggtaagactcttatcatatgttgytaatcacaactttcacagttgtgatttggtgttttaattcaaaagctactgttttggaagtgactgctttctttgagggttagaaaacatgcccacatttccatacaagtgtcacattcttgttagcacatcacccatccatctcttacaggattatgcaactcagttcatagatataatcagctttgtattttcattcaaggataacaaactagcaaggttgaaatcttgacttgtcatcggaattgaattgctccctggagctgggagggaatgagattggtccagctctgttcagaaatggcagttatctttagaatctcaatcgcctgctctccctttcttctttccagtatggtgactacgaccccagtgttcacaagcggggatttttggcccaagaggaattgcttccaaaaagggtaagagattaaattcccttttcaggaagacatagcagatatgtggtctaaaagaaagctaaccaaaggacttgaaggaatattggaagtacatagcaatttaattttaataaatattttgtaatctccagtaaacagtgtgggatctctgttaagaatattaaaaagcaaaggtttttggagttagtttggggtcaccaggactagcatggcctgtaaatgttttttctagcgtggttgttttttcagatgcagttgmgcatcattgattcccaaagaggaggctggagcagagtgtattcagcttggggaattgagctgtttgcagtggcgaggggcggatagaggagatgaggtaggggtgggcattgtggtttttaatcctcagtgttgttcatcttattcattagccacagaagcaggcccgccctcccttttgctcctgccgattttacagccctcactcatctgtcactgggtaataaaggcccgtttctcacctctcactctctttacctgtccctcgatggcttctgagcatgtgaaggcctgagatgagtgagcattgcttctgactgagctccgctgtcagaggtggtctctgtgatgtatcgcccaggcagggacaggggcactgccagatgagggttgcacctaggtctgagttatcatgcagctttctgagttgctcctccaatagaatggtgccttatttacaygccctctctctgtgtgactatctccctgggtgtagctttttaaaaatagctttactgttttgtaaaaatgatgcataattataaaagtggcaaacaataccaaatttacttcatgtgtaggttttttattttgctctattttttggtaggtaataaatctgtawcagatgactccggaaatgtgggaggagagaattactgcttggtacgcagagcacygakgcygagccaggtgaggcccattcattgttggtttacattcctttatgggcttttttttttttttttgccttaaagaactgcaaaactaggacatgcttgttaaacaaaatgcagtactgaagtctataaaagaaaaggggagagctggggagctgggagtaacgttggtcttcagttttgtgtgtgtccttttctagtacgtatgacataaagtaggtatgtgtactgcctgtcaagatatatagacctgtactcactggtaattaagtttaagatttttttttttttttgagacagagtcttgctctgttgtccaggctgaaatgcagtggcgccatctcagctcactgcagccttgacctcctgggttcaagcaaacctcctgcctcagcacccccagtagctggcactacaggcacacgccaccatgcccagctartttttctatttttagtagagatggggtttcaacatgttacccaggctggtcttcaactcctgggctcaaagcaatctgcccacctcggcctcccaaagtgttgggattagaggcgtgagctgagccactgtgcctagcctgaattttaagaattctattgtatggctatcccattgcttttgcatccatccctttattgatggcatttgagtatctgtaggtttttcacttttacaaaaatttctgcagtgcacaatcttttatttttatacaattgtatgagtagttctggggatatattcttttttttttttttttttttttgagacggagtctcactcagtcacccaggctggagtgcagtggcgcgatctcggctcactgcatctccgcctcccaggttcacgccattctcctgcctcagcctcccgagtagctgggactacaggcacccgccaccacgcctaggctaattttttgtgtttttagtagagatggggtttcactgtgttagccgggatggtctcgatctcctgacctcgtgatctgcctgcctcggcctcccaaagtgctgggattacaggcatgagccaccgcgcccagccaatatattctttaaaacaagagttgttgggacaaaggatgtgagcattttgcattttgccaggtaccaccaaattgttctccaaaaaggctgtacctgtttatacatgcctgtcgacaagtgttatgagagtgtcccaccccccacccccagtctatcctcaacaattgtttttatcagtctaatttttgtaatctaaaaagtgaaaagttgtattatgttagaattccattcccttgattaggaattggtcatgttttcattagcctttaacatttttttctcttcttcaaatcagtttcctaacacttttttttttaaacttaagtgcaacatgcatatggaaaagtagacaaattataagtatacaacttgatcaattattgtaaggtgaaaacaccagaggaagaaataacctrtgtctccctacccccaattcccctttcttcctccccaaaggcaaccagtctcctgatttttaattccagattggcgttgcccatcttaaactttgcattctgttttttgtgtctccttttactcagcatcatgttgtcagattggggtttgtggcatgtggcaatagttttctcattttcattgctgtatagacttccactgtattagtatattaaaaattatttattcattctactaatgatggacagttaggttgttgggttgtcccctgagttttgctattacaataatgtcaaacaatttcccaaagtaattgtaccaatttacgtcaatgtgcatgatttctgatttctccaccttttcaccaacacttggcgttctctcaggctgggtttttaaaaattcattgagagcatttggagattggagagagaaggaagaggacaaggtcatagggagacttgagttaaaatatttcagtatgatacctgtttgggagttttctgcaagttattgctacttcaagagcttactttaaattataacttagatgaaggtgatctgacttgggttttacaacccagataactcttgccctaacctccaacaatactcaggaagcttgcagagagagctgtttcatttccagaaccttccaggtaaagaaagtacacaaaggaaaagcaagaacttaaataaaattccaacacccaaatctgtttgagggtagaagataacataccacacactcttgttgaattacttgagatgagtttactgtttaccaagggcaaggtgggaaactaaggccaagaaactccgtgatgagtctgttctctgactrtcttttgatggggatgggaarttctgcttgacctcagtgtgtttaatagactcagggccgrgcagagctttgctggtgtctgctgtggcttttgtcttctggcagcgacgtggctctagaggaatggcagggtcagaatgcttgatttggtgcccacccgctctccacccatctcacttagctccaatgacagtgtcttccgttctccccacagggatgaagctgaaatggaatatctgaagatagctcaggacctggagatgtacggtrtgwactastttgcaatccgggtgtgttgaaacctctctgagctccttgtgtagtagacagagactgagtgagggccagactgctaaaatggttacttcttcattccaaggcgatagactcttttatggttctgtggtaaagaaggaaagaggaaggaaagagaggtcttagtgcctaactttctatttttggacttcaattagatcataggtaattaagtgtcacttgagccttgggggacttggacctggttctgctctcagcagaaacctgtttgaatgctctgagtgtaagatttgattatttctggctctgtgagatctccgtccacagggagcacttgtaagtacttctccccccaacacacaccccacccccatccccacccccacccccaccccaggcactagtagagtagatctgcctttatagattactgatttgtttgggattctcactatgaggctaattggttttctattcagactattaatagtctgctgtctgctgggaacccactgcttctgcagggagaggcatttgtgtgcagcccagatctgggcctttagaatgtctttctcctgtgggtcagtatctggatgcagtgtataggcagcttcttacaaagggatgcatgcgatttgccaaagcatttcactacggactccaaactgcagatgagtagatgttaaaacaatgaggcgggtccacctttattttcatagtcatgctttgctttcccttattgggttcctacagttgttgtattaaattcaggtaaattgaaacatattttaaatattctaggatagctttctacttcatttgtattttgtaaatacagatttgtatggattacactgcataagaaaataaggcacacttaaagtgcctaaaagatgctccataatagtacaggaagttcttttctaaagttctgtcagtttgtatttgctaattgcttggtttctttaaggtcaaactaatgtaacacatttctgtggttttgtcaactcaactcctcttgccccatgttctggccacctagattctagaaaactaaagttttataatcctcagaaaacagtttttttggtttttaaaaatcttttttgttttttagaggtggagttttgctatatcgcccaggcctgctaggctcaagtgatccttccaccccagccttccaagtagctggggagtatcactgtgcctggctgaaaaggtttcttattagggaatatttctacatcagtcagactaatggatactgttttttgtgtgtgtttcctatattgagcaatagacaaagctactggctatcttagtgtcttttatgttaaatttcctgaaatctcaccattaactaaggaagatgtatgcttaaaacagtttaaaaggggctgcttgagtcctcacctctctctctgtttaatctctrggagtgttggagtcataatggtaggaggcagaaggctgaatctttttttaaaaatttaaactaaatagtcagaaactattttctgactattgaaacacaatgaaacatctcattttccaaaatgtactgcagatgtaaaagtacaaagcctcacttctattaatgcagtagctttcatggctttgctgacgagcagaagagtctctcatggtttggtgatagcacctgacttcaggatgttaggagtaaaaagatttatgctggagtactcactcctcagtctgatatctgctgttagatgggtacttctcttcacagtcccagtaccttctcagtttgcagacctgtttttctgcccttgagtcttggttcagtttccattatcgtcaaggggtcaggagctgtagtatccttgtgcagcgagtttccttccactccaaatgagggctagaccacagcactggcgggtggacctgcacgtgaagatacagccactcagtccgtcgcaggktcagtgctgtgggagcccagggcacccgccgcgggctgctctgactgctggccaggaccgctgtcaggggcagagcataagtacggcttttagacaactttgttgatgaatagaattctttttgatatgtatttcccatcatgcaattattaaaaatttcaaacttacaggaaaactgaaagaatttttcagtgaatacccatatatatgcacaatctagattctacagttaacattttaccagacttgctttatcacatgaagactacattttatcataaaatgagaccatccagccccaggcactgaaaattttcttcctagtagtccaacaatggtttctttaaatataagaaatcattaaacctatgggttttttttgttttgttttttaacgaagtctctctttgtcgaccaggctggagtgccggggcaccatctcagctcactgcagccttctgggttcaaccagttctcctgctcagcctcctgagtagctgggattacaggcgcgtgccaccatgcccggctaatttttttgtgtgtatttttagtagagatggggtttcaccatgctggccaggctggtcttgaactcctgacctcgtgaaccgcccgcctcggcctcccaaagtgctgggattacaggcatgagccactgctccccgcctaaacctatgggctttaattctatacctatgatagcctgcttatttaaccagagggaacaacacttatgttactcttcctttagccatcragccagtgacagaagccctcagtgattgttctgggggacccagaagtcacaagaatggaacagttttgcttctacctgccccaattcagaaagctgaaatcttcttggtttataagacagctgtgacttctgttgggacctgctgaaacttgtcacatgtgacagtgtgtgccagattctttggaaggttgaataaaattttgagcctcagctggcgcttacagtagctgttcttattggatccacagaataaaaagggcacagagctgctgcttggagtggatgccctggggcttcacatttatgaccctgagaacagactgacccccaagatctccttcccgtggaatgaaatccgaaacatctcgtacagtgacwaggaggtaggacatgtgtgtactgcagatgggtccagcagatctttccctgtctgcccccctcactggagcctccccagccagggcatctccttgttattcatagagtcctttaattcccaggctttgagggtgtggttgttgattttcgaagtctttacagaacagtattggcatcaataaccccactatgactaataggaaactgggaagctcaactggccagggagaaaccccaaagaatagtgaacraaaacagtaacattttcttattacttggctttctatttttgtcgatacattctctttgtatgttttcttttcttttttagagacaggatttcattatgcatgcccagactggatttgaatcctgggctcaagcaatccttccacctcagcctcctgagtagctactacaggtgtgcgccacagcacctggcttaaattctcttcgtattttaagtgtggtctttattgagctttctttctgtgtcyggtgcttgatacatgtggcagagaaatacatatacacacatatacacatatggacatatatgtgttttgtgtgtgtatctctcagtaattatataaataagtatattaggttaatatgcttacaagaattccaaaataattaaggtggaataacttagataaatgctcttagaatttaaatatttccatatagggtggtgacttttaccaaaaaggtcccataatgtataatcttatgtttactcatccatccattcattcattcactcatccattcattcattcttcattcattttattttattattatcattttttgagacaggctctcattctgtcaccgaggctggaatgcagtggcacatgatcacggctcactgcagccttgacctccctgggctcaggtgatcctctcacctcagcctcccaggtaacagactacaggcgtgtgccaccacatctggctaattttttgtagagatggggttttgccacattgcccaccaggctggtcttgaacttctgggcttgagcaatcctcccacctcagcctcccaaagtgctggaattacaggtgtgagccactgtgctcagcagttcttcattaattttaaaggaattattgagcatctgctttgtgttagatttcatgggggaaacaaagatgtagaaaatccagtcttagcattcaaggaagtcaagtaactactcacctgctataataaataagtgccgtggaagagacatgatgacaacaaatgtagtcttccacatacaagcacattcaccctgaccgtctgaatttaatctctataagaacactgctgtaaaggcaggggctgtgttgtcaatatctctgtgtcacatcaggaagcagagacacagaaggatcaagtgacctgtgtctgagtgaagtagcagagattaggagccagagttgctgatgccacagcccccgcctttcagggaggcccagaggctgagtcctgagagcacaggggcactggggagagggaggctccactcagtgacctcctggtacctgcacagccaggacacagactagagagtgaagaacaggaacagcttatgttgctgcctgcagagccccaaacctgagcatatttcctgttttctctttttcatggcaactcaaggaagggaacaccaggcccctggtttccagtatatggttgggatctactcagccatgcttgataagacagactgagccccttaattcaaaacattctgactttgaagtttttgttagtagttagcccaggagataagcagttaggtatttcttttttaaagtacttaaattgaaagttccacatgacataaagctgtatgtgtgccaccgtatggtagtttttcatctcccaatttcataaagtctgtttattgcacgtccacacatttgtgtgctaaaggctccctaaacacccgttcttcaaagaagccaaggattgaaatctcccatactatggcctgacacagtaaactctaatatgccctctccgggggacaggcgccatcatgttccatcatgtcaataactcatgcagtaagcagaccccaagctgacttgacataaaagaagtagtcttggtagttatgcatgacagccatgctgtcaaaacagaaatgttagtttattttaaatgatccattgattctttgtgtacgccctggcatggtgcagagcctgcggtttccccactacttgtggtttcccaatgacagctccagggtttgacagcaaagccaaaaataagctcacaaaattcatgaatagcagcctacacaagagcaacactgcttctaagttaacttggctgaaagctaaacaaaggatcattttctgtcctcagtgtactaaccccttcttgggcaatataacgtgtgaaagaaatatatcttcccaaacatatttatctgcttagcaagtctttcttgggaatggatatccattttgtaagtgcatcttggaaatctaggatctgtttggtcttatcgggagtggttgagagcagcagccatttgttccttgcaggctttcctgctagtggtctaaccctaggttctcctaccaagccaccaccctgtctttatcattcatctttctctccattttgatttcagcatcaagaactgttttcccttctactatagtccattttttccccatttgattctattaacagcttttaccaaattattcccatgttcagaaacctgtggtgagckcaggtatcctgtcacatcaaacctaaacccttcttttttttgagataggggtctgctctgttgcccagcctggagtgcagttgtgcaattacagctcactgcagcctcaaactcttggcctcaagcgatcctcctgctttggccttccaaagtgttgggattacgggtgtgagccaccatatctggccgcctctgacttttattctcactgccagcccctacacccaccccttcctccctctcaggctaaacctattatatcatcttagtcaccaaaaagctaataccacacacacacacacacacacacacacayacacacagctcatttccctgtctctaccttatttctggttttgccctgtgcagaatgccccttcacctgccttttagctaccctgttggattgttcttctaagatcagcttcactctctcttgcttatggtggatctactctgaacctccacatatttgtgatttgtaccacccagtgaagcactaatatttgatgtgatttcttgagtaattggctgttgttagcctagttccaactagatggtgagcttcatgaaggtgggcccatgccctcgactacagtagccctccagtgttggcctcagggttgggcccattaaggatgcttattttaggttgtcaagaatcccttcccacactcatgcctaagatggtctagagagcgtacctttagggtcctgagcttccacagcccgagacttggtgctcctaattccctgaggtttagtgcctggatactgggaagccaggacaaggcataacttcatgctggtctgtggccagtgtggttgcgcatttgtggaatttccaattgctggtaacattccaggctgtcggactgaaactgtgttctgcttcattcttccagtttactattaaaccactggataagaaaattgatgtcttcaagtttaactcctcaaagcttcgtgttaataagctggtaagttgagatcctggttttcattactgataatggtagcttttctgagaattgaatacttctttttaaaggatatcagagtgacatcttgtgaagtatagaatggtatctcacttggcgcatactttctgtttagcttaaagagttaaaactaaattatatcatgaagaagtttttttttttgttttttttttgagacagagtctcgctctgtcgcccaggctggagtgcagtggcagtgccatctcggctcactgcaacgtccgcctcccagattcaagagattctcctggctcagcctcccaagtagctgggattacaggcatgagacaccatgcccagctaatttttgtattttcagtagagacggggtttcaccatattggtaaggctggtctcgaactcctgacctcaggtgacccatccgcctgggcttcccaaagtgctgggattacagtcatgacccactgcgcccagccgatgaggaatttttaaaaaggatttttaatgcagtatttcatacatataaaaggataagtgtaacatatgaattataaagaataacaaaagtgaatagctgtgtacccacaaccccactttaagaaatagcacagtcctggccgggtgcggtggcttacgcctgtaatcccagcactttgggtggccgagacgggtggatcacaaggtcaggaaaaaaaaaaaaaaagaaaaagaaaaaggaaaaaagaaatagcacagtcccaatactgttgagacccttcatgttaacaccctgctggtctctcctttccctctccccaagggtgatcactgttttgagttgagtattcatcatcctcttgcttttcaacagaattttatttcatatatggcaaaagaaaaataccattcaatgtcatrtgtttatgaaatttatctaaatgctgtcaagtatatatattcttttgtcattttccttttcctttttcattatttttttgagatatatctttgttgatgcttaaagatagtctgttcattctcacctctgtagcactctgttatatatttttctgattcttctgttaatggataattaagtgctttttacttctatacttttttttttgaaatggggtctcactctgttgcccaggcacaatctcggctcactgcaacctccgcctcccggatttaagcaattctcctgcctcagcctcctgagtagctgggattacaggcggccactaccacgcccggctaatttttgtatttttagtagagatggtgtttcaccatgttggtcaggctggtctcgaactcctgaccttgtgatctgcccrccttggcctcccaaagtgctgggattacaggcgtgagccactgcacccagccacttctatactgttttaacaggctgttatgaaaacttttgtatctgcctcctggtgcacataggcaatagtttctttggagtcttgagtatactgggctaggtggggtggctcacgcctgtaatctcagcacttggagaggtcaaggcaggataactgtttgaggccaggagttcgagaccaacctgggcaacatagcaagaccctgtctccaaaaaaatgaaaataaataaaatttttaaataataaaaaagagggccaggcacagtggctcaactcctgtaatcccagcactttgggaggctgaggcaggcggatcacctgaggtcaggagttcaagaccagcctgaccaacatggagaaatcctgtctctactaaaaatacaaaattagctgggcgtggtggcgcatgcctataaatcccagctacttaggaggctgaggcaggagatcgcttgaacccaggaggtggaggttgcagtgagccgagatcatgccattgcactccagcctgggcaacaagagtaaaacttcgtctccaaaaaaaaaataaatacataaaaataaatcaaaaatagagcttagagtatatacacaggagtagaagtacagggcttggtatatgtttaaatttcaaaattatgacacattgttttctaaagaaggtgaatcgatttttacagacccaacagtagtgggtgaagtttgttttttgctatccttaatacttgtattatcagccttttaaaatttttgccaatcttgtgcatctaaaatggtatctcattatcaaatgaactttttttttttgagattttgagatagggtctcactctgttgcccaggctgaaatgtaatgacacgatcatgtctcactgcagcatggacctgcccaggctcagtgatcctcccacctcaccctccccagtagctgggactacagacacacaccaccatgcccagctaattttttgtattttttttatagagacaaagttttgccatgttgtccaggcttgtcttaaactcctgggctcaagcaatctgcctgcctccccttcccaaagtgctaggattacacttcccaaagtgctgagccaccaggtctggccaaatgttttgakttttttgtggagatggcgtctcactatgtcacccaggctggtcttgaactcctgggctcaaggatcctctcaccttggcctccgaaagtgctgggattacaggtgtgagctactgcacctagcctgttttctttattggctatatcttccagtttgttgctctttttctttttttatgtcttgacaataagaatttttaattttaatgtagacaaatatatacattttttccttaatcactttttgtgtcttacttggcatcttctcttatcctatgatcataaagatattcttctatattgtcttctaaaagtttcaagggcttaatctttgcatttaagtatttaatccttctggagttgatttttgtgtarggtgtaagggagggatacaacttatttttttccacatgcataacctgttgcctcagcccagcttactgaacgagctttcctatcctccctggtctgcagaaccacatcttgatgtaggagagtaaggtgcacccagaagacatggtgaaktgtcctccagtcctctcttgatttatgatttttacctcctggyatatctgaggcgccttcattttgcatgtttccagagctgacggcactagaggccactagtagggctttggtgtttcactctatgcattcatcttcacgtttactgctacctgcaagagctcaaactgctatggcactagtgggccagtaggcagtgaagtaaatttgtggatattaacctttttgtctgcttctgtggccacagattctccagctatgtatcgggaaccatgatctatttatgaggagaaggaaagccgattctttgkaagttcagyagatgaaagcccaggccagggaggagaaggctagaaagyaggtgagcacaaccttgttttaactgatgatgtcactgtgtggtcagtcctggcctgggaggcgaggagtggtcatgggctggcaggagtcttttggccgtggacatacctgctcttgttttataccttttggatcktcatttgccgatgcctacctggtgggatgtcatctctggaaatgaggaataaaccctaatagcatatctaaaagaaacatctctagtaatttctacgcttggagaaattaagtgtgattaacaccagtttgggatgaaatagccaagagtgcatgcatctrtccgtccggctagctagcttgctttctttttttgcctgtctgcctccttgtgcagccttctccttttctaattagatggtgatagaatgccaggtggcatttcagtgcttgcggctggaatgctaatttgactctggctgcaattccccactgcaggtcaggccttatggcatgtcacctgccccaggaggtgccaggagcatctatcagcagactggatgatctgcatcattgttttctactcataaaccttctctgctcatggaaatccacacaactaatttgggccttactgctgagaatatcaattgtgtttttggataaactactagatagagtagcagcagctgcagttggctgcccgcaggacttgcaagctcagaagtgtaataattagtctgtgtgcacctttctgatttggatacattggagaggctggtcccagccctaggatttagaatgaaatgcccagtgtgctttcagctctctatctctttgctttctgaggtagtgggccacaaatgtgttctttgggatgctttcagggtgatgggatggatttgttggacaaagaaatcctactgagccagcatggggtcatagtggcagtttcatgaagagctcgtggcagtggctcatccctataactccagcactttgggaggccaaggcaggaggatcacttgcctaggaatttgaggctgcagtgagctatgattgcaccactacattccagcctgggtgaccaagcaagaccctgttttaaaacagaagcagaaacaaaataccaaaataaataaataaataagtaaataaataagaaggaggaggagagctttctttgacctttttcttagcagagcaaagcttagaagtaagaaatctgaaagtgtcagggaatatgcagtctgtgggccctggcagagaatagcaggaacactgcagatcggcactgcttacagcacagcagagccacaaacctggcatctgggcaaccacagatcaggtggacagacactgaccttggagccagatctgaaatttagaatgtgagtaagtcaatgacttaccttccagacctyagttttctcatccatcaggtgaaactaatgatataccttctccatctcagatgaagggacgtatattacaccttacagtctttgtatgcagtaaacttcttttgtgaataggaggtcttttatattggggtagaggtctcagggaaagtacagkgccaggaactgaaggagattacctggcttttttttttaataaaagggtcttgttctgtcactgaggctggagtgcagtggtgccatcatagctcactgtaacctcaagctcctgggcttgagcaatccttctgcctcagcccctcaagtagctgggactacaagtgcatgctaccacacctagttaattttaattgtttcgtagagatcaggtcttgctatgttacccaggctgatctcaaactcctgggctcaaacattcctcctacttcagccccccaaagtgctagggttacaggcatgagctgctatgcctgcctggcctgactgggctttttctttctttctttcttagtttctttttttttaaaagaattrtagatatgtagtaagccaccttatggaaattgtaatatgatggaaattagagaacaaattggccaagcttttcattgacttacaaggagaaaattggagaagaactttcactgttttattgcttgtctttgcattatctttttgagcttgtgtgtgtgtgtgtgtgtgtgtgtgtgtgtgtgtatttggcttaggatttagaaaaagcagcagtcttagaaacsttgtatgaccagagtgtgggataagattgaagcaagaagtaattaaatgtgctttaattatttaaggcagaaaatagtgcagtggtcacttctgggttctgctttttgaactcagttagtaccctgggatcacagaggaatggcactgtcttgtgcttgttccccttattaagctcagcatgtggcccaattaatgcagtgatccagaaggcaagggaggtagtggtggctttgtgctgttgccttaaggacacggggctgtgtttcccgcctggctccctcctgtcctaggcctggctcaggagttgtctccacatgaggctgtgcaagtctgtgctgtggctgttgcagctcccccctgtgaaatacaatgtgtgaactattgatgcatcacgtagaatgattccatcttctctgtgggtcagaggcaagagtggagctattgttgatgaaatcagagatgtgagaggggtccatgtggattagaaatggtgagatggcttgcctgcccagatgagaaagctgcttatttctggggctctatctgagggaggaggtcctgcattgcatcccatcggccatggggcagagccacctggggtttcccaacaaaaagcaacattggcaaggtagccatttcagtgcaccgtgtataagaatgcctccttctgccaggcgcggyggctcatgcctgtaatcccagcactttgggaggccaaggtgggtggatcataaggtcaggagttcaagaccagcctggccaatatggtgaaacctgatctctactaaaaatacaaaaattagccaggcatggtggcgggtgcctatagtcccagctactcgggaggctgaggcaggagaattgattgaacctgggaggcggaggttgcagtgagccgagatcgcgccactgcactccagcctgggtgacagagcaaaactctgtcccctccaccaaaaaaaaagaatgcctttttctatccgggtcaagactcaacaggtttttattgtttgttcatttgttcattcaccactasactgtttttcaagtggcacagctttcaactctgcaactggtttagaaggacggggtggggggcaataagaatgaccctggctacctaaaggaaagggaaggaaaaaggtcccaaaaggggagactggagatggggcatctttgggcccttgtggcaccctaggtctcgagccctgtgattcaatgactgtttttcttcacccctcgcagatggagcggcagcgcctcgctcgagagaagcagatgagggaggaggctgaacgcaygagggatgagttgkagaggaggcygctgcagatgaaagaagaagcaacaatggccaackaagcactggtgatttctgaggggctggggttccaggaggctacttggggacttccttggcttttctggagcttggtctcctgaaaaccatgagttagcagcgtttgctttgaaatacttaatttcagctttgaaaawatcagtgccttttcttttcacctgtgttggcagaagcagatttaggttgagcttatgtgcagccaaactccactttcaccacgaggttgcctttatagcagggcttctcagcctgggcactactgacatttggggctgaccatcctttgctgtaggaactagatcccagtagcagcacctcaccctccatttgtaacaatccaaaacatcttcagacattgccacatgtctcttttttttttttttttttttgagacggagtctcgctctgttgcctaggctggagtgtacagtggcacgatctcagcttactgcaatcttcacctcccaggttcaagcaattctcctgcctcagcctcctgagcagctgggattacaggcatgcatcaccatgcccagctaatttttgtatttttagtagagatggggtttccccatgttggtcaggctggtttcgaactcctgacctcgtgatctgcccgcctcagcctcccaaagtgctgkgattataggtgttagccaccgtgcccagctgtacttttattttttttttttgagatggagtttcactcttgttgcccaagctggagtgcaatggcatgatcttggctcactgcaacctccgcctcctgggttcaagcgattctcctgcctcagcctcccaagtagctgggattacaggtgcgcgccaacacatccagcttttttttttttgtatttttagtagaaatgggttttcaccatgttagccaggctggtcttgaactcctgacctcaggtgatcygcccgcctcagcctcccaaaaggctgggattataggcgtgagccaccgtgccccacctgccacatgtctcttgcaggggacaaaaaactcctctggttctaaccactgatttaaagggaaagaacagagtttaagttgtttttctccacgtgaagcataagcctgagctgaggtgggtactcagagaaggtgctcttgttactccccatgggtgcagcccgaagggcccttctgaaaagttggggaatgtggcttgtcatttcttgtcagagggtcatggagggcactcagcagcagggccccaggagtccgagactctggtttgtcccatctcagtgttcaaggcagatctgggygggagaacagcacatgatcccacttcagctaagagcactgtgccytccagatgcggtctgaggagacagctgacctgttggctgaaaaggccyagatcaccgaggaggaggcaaaacttctggccyagaaggccgcagaggctgagyaggaaatgcagcgcatcraggccacagcgattcgcacggaggaggagaagcgcctgatgkagyagaaggtgctggaagccgaggtgctggcactgaagatggctgaggagtcagagaggaggtgagggggcaccgggcaccagactggcraggaggctggcgaagggccgcagaccagcctgccctgaggctgagctctacagcagttgtcctcaagctgcttgcccatcttctgggccgtggggaggctcctccttggctgatggtgactggtgctttatccattttggggctggcgctactggttgggcacaggaactcagttccccctccaggggggcctctctggtcatacttgtgtctctttgataagcccctgtccctctgatggccgtgtgtgcaggaaaacccctgagcatatccacagaccgctttcagctgaagagatgtgaggaggctctttgtgcatttaaaaaaagtgtggttcttttctgctttcattcagtggggctgcaggagaacagcagctgcctacctttaaagggaagctagtgcctgcatcccccagcctttcttggcacatgggggaggagggctaggatgatctctgtgactgggatgtcccactcatggccaggttgaaggatggaactgttgtctgtacttttgaaagactattctaggcctgcaaccttcagataaacactgacacattccccacagcttttggctctgttgatttagagcacttgaatttggcttttagctaccaaggtgcattcactacagttttcctcaccacgctttgcatgtcgttctgggaatatggttcctttttgcctgccctgcttcaggccccttactgtatwcgggggtcactccctgtgcatgatgcaggttgggccaggtccctgcaccaggcctcacatgccgtgaccacctgagccccataggatgaggatctgcaccagggtgcgggtgccctcagtgactgggctcatctttctgctggagaaagtgggcacaaggcccactggtgttttatccgggggctgtgaagacgcagttcttgcacattctgccctttgcgatccaatataagaactttgatcctccaggttcttcctttgcccagctcactctcacccaaaaataaagcagagaaagctgctggtgccctctccagctcctctgtctcctggctgcagaaggtctggtttctctcattccccaccagttttcctgctcttccagtttagatttaccaactcaaacaaaagtcctcaggaatgttgtccttgcttggaagttctgatttcatgtaaatatccctgtctcactgtcctttttcacctctttgggtgccatcctcagggttagcccaggtccctcctctgcaggggtggggtggtgtcttttcctgctacctgccctcttctgtgaagctgacatctcatcctttccttgcagggccaaagaggcagatyagctgaagcaggacctgcaggaagcacgckaggcggagygaagagccaagcagaagctcctggagattgccaccaagcccacgtasccggtgagcctgggggccaccagctggggctgccttagtcctggtgatgttctctttcctcccggcccttcagttcatctggcggtgccttcagggtgaccattcaggcaaacacatggctggatgagaggtgcagagagcctgcagttagggactgggtagaacatcctggtctgccatttggctttggactagttagttgtctctttggttgcctggataacaggcaacagggccttttccagctctggaatgtttttctttttctaagtaatatagtcccaaattatcctcaagagaatttgctctcttgcctcttaatgctgagctgaatgtaatcttcaactatcagtatataccatatatcataattatagttctgggaagggattggctgtacacctcagagtgaattactgccgtgcaagaaygagcagccactctcagtttggggacagagagtcagacttccattaaatggggtcacaaaatgaatagaagcctctttccttcctttcttctgtgcattcagtttggcatttttttttttttcatatttgttcagtgtccacatagtgccatgcagttggaagtctctatcctgacaggtgttctcagggtgcacaggtgcctagaggaggaggacacagcccaccctggaggagcaggagaggctcagtgtggtgtctacactgatgcttgaagggggagcaggaagtagccaggtggagaagagaacatagggtattcagggtgagggcacagatgcacacatggcccagactcacacacagcacagtcatctacatggcacagacacacacacgtacccatacatacattgatgcacatagcacatccacacacacagcacggacacacacgcacccatacttacattcatgcacatggcacaggcacatacatgacccagatgcacaaagggcaccagaggcacaagctgcccagggtttgaggtggggaaaatgtaagcagtttgctgttgccgtatatccyggttctccgttactgtgtaacaacccacccaagccagctgtgtggctttgttagtacctctggtggcttgttgggttgactgggccagacagagatccttgctggggatctctctggtggtcacagtcagatggtagctgggactggagtcgtctgagcagtcaactgggctgaacacctgagatgtgttatgtttttattttttattttatttattatttttttttttagagagagagagttttatttactctgtcacccaggctggaatgcggtggcagaatctcggctcactgcaaccttagcctcataggctcaagcgatcttcccgccccagtctcctgagtagctgggaccacagacatgcaccaccacgcccagctaatttttttttttatttggtagggacagggttttgccatgttgccacagctggtctcaaactcccgagctcaagtgatctgcctgcctcagcttcccaaagtgctgggattataggcatgagccactgtgcccagcctatatgtgttgtttttaaaatatacactggagcaaagcttatacactgctgtaactgctctttcctcttagcagtcaatcctgaaggagatcatccatatcagctttttaatcatgtttkgttgtgtggatggattgtaatttatttaaccagtccctcatggatgagtatttagtctgttttcttttgcaattttgaacaaaatgacactgaacatccckgaacacaaatcttgacacacacacgtggatatattggtagaataaattcttataatagaactgtggggtcaaaytttcgattytgatactctccaaagaagtcataccrgttcatgctctcactagtggtgcagcaactagtacgcgtttttgctgaaaatttttatgatgtgtaacatacacatagagaagtgcccaaattacaactgtacagtttgaagaattttcacaaactgaacatacccatgtacccagcacccagatcagaaaacaggacatccctggcacccaaggagccttctctcagcacccttgcagacggtctgcctcaggccttgagaatgtctcaaatgaatgttccaagcctctgctctttcccagacactgtcctagactcaatacgggatccaaggatgaaaaagaggcagattgtttgcaggaaacttgcaaatagtagaaagaagatacagccaaaaagaaatcttttacagggtggaatcgcagaagaaccattagagaaccgtaaacacagcgttaagggacagcaaagaaaagggttgccggctggctgggaggggctagaaaggctttggtgagagatcgtggtgtttgagaagggccttgaaagagggatggagcatagggaggagaaatgggataggcaggggtacagagatgggaaggcagtagtccaggggataataaacaatactgtctgtgacttagtagggcaaatagtaggagaagccgggaagctagattggggtcctctttagatgaccctttgtgctgggatgaaagtccaaaaaaaaaaaaaactacaccacccctgcttcaggccctactccggttccattgtccaagcccaagcccctcggtgggcmggtggggagccctttgtggtggtgcccatctcccaccccacctctccacactgcatggcagactcctggcaccctcactgggcactgccccacccattgccatacttcccgyccggcagaccttctcctggcactgccttggatcccagcaaaagcagcatctcttctagcctctgttcgctccctggctacagtgtttaccttttttaacagtgatgatctgtgaacacatctatttcctgaacaagactttcagctgctcaaagccaaggatgctgtcttgttttctgcatctccagccccttgcacagggcctgggagtttcctaaatgaaaragcgagtgggagtttgtgtttgattcagctgagcatgaagaacggttagagatttgagggatgattttcctggatttgtagtctttgatattgtttacctggcagtggcaaatgtggagggagtgaagtggagggatggggactcgtggtggcattgggaggtgggacccgagttgtgcccattgcctctgtggctgctggaggatcggttgtcaacacagtagtgtccttctgtgcttgtatgacccaagctcctaatccgaaatttctcattaacagcccatgaacccaattccagcaccgttgcctcctgacataccaagcttcaacctcattggtgacagcctgtctttcgacttcaaagatactgacatgaagcggctttccatggagatagagaaagaaaagtatgtagccccctgtgccctgctgtgggcagctgtgaactagactgagtgattggggccttgggaagctggggcagaggtgagaggtcgctgcagcagcctgtcattactcctgcaaaggtttgctctgctcttacaccctggaggaagaatttccttaatcagaaattaaggacaacagatcagcattcattctgaacgaataaaaataacaatttttatccaggataaaaataacacttgactggtgagctggagtttttggtggctctaagcctcacctaaagtgtaggactgggttgttagcatctctgagtcagttcaactgctgttatactactggactgtagtcacctcctagttgtgttctccagcaactgggatctgtggtggttcccatgtctagaacaaacaaaggtgagagaagagactcaggctcgaggctaaggaaagctgacagctgktggggccactttgctgcagtgggtggcrctgggcagggccccagcatggcctgatcatggcagcaattgctgagctgccctccgtcttccctttattgtgggtagaagtggatcagagatggaaaggaaaggatccccactgcagaggaaatctaagcgagggcccctagttcccagagctagcggtaagttggttaactgctgctgcttgctagaggacaaccacagtagctaccatgcattgagtgcctgtgtgtcaggggttttggcttttgyctcatttaattcctgctaacttacaaacatcaaamtgacatcaaaggtaggttttcatgttcccattttataagtgagaactcagatttagagagtttagtgaactccaccagcatcccacagctgatgcagaggggttgaaacccctcacccatctgactctgcagcccatgtgcttttaccatgggtggtatcctcaggaaaaccctttggggaaagtgtctccatggagtccagtatgggcaaccagaacccaggctgtttttctttgggctctcacactgagggtatagctaagtagccaatgaaccagagcctctagctgtcatatctgctgtccatgttcctttcaccattatccagacatatacatttatgtggttgggatccgggatcagggtgaagctgttctgtgtctgctattttatagtttgtattttgttactatcttagtttgttttggctactgtaacaaaataccagaggctgggtagcttataaacaacagaaatttatttcttggccaggcacagtggctcatgcctgtaattccagcactttgggagtccaaggggggcagatctcttgagccaggagttcaagaccagcctgggcaacatggcaaaaccccatttctactaagaatacaaaaattagctgggtgtggtggcacatgcctgtggtcccagctactcgggaggctgaggtgggaggattgcttgagcctgggaggcagaggttgcagtgagcccagattgcaccactgcactccagcctgggcaacagagagacaccctgtctcaaaaaaaaaaaaaagaaaagaaagaaattgatttctcacagtttgggaggctgagaaggccaagatcaaggcacgggcagaggtggagtctagtgagggcattcttgctggttcataatcagcccctttttgctgcatgctcacccagtggaagggatgaggggtctctctggagtctcttttataagggcactaatcccattcatgaggctctaccctcatgactgcccaaaggccccacctcctgacactttttttttttttgagatggagtctcactccatcgcccaggctggagtgcagtggtgcgatctcggctcactgtaacctccacctcctgggtgcaagcgattctcctgcctcagcctcctgagtagctgggattacaggcrcatgctatcacgcccagctaacttttgtatttttagtagagatggggtttcaccatgttggtcaggctggtctcgaactcctgacctcatgatccgcccaccttggcctcccaaagtgttgggattacaggcrtgagccaccacacccagccggtgattaggtttccacatatgaattttgaagacacgaacattcagaccatagcacttcttacccttgcacatattggcagagtctctatactaaccatggcaatccctatggagtgtttttggtatttgtattgcatggtttttctggccatgccttgtagttggacactttgtgggtggtttccagattttcaccatcatagatgctgtcactcagtgttatctgttctcaggtgagggtggggatcttttcttccttgcgttgggtgagcttctgagtgagcttctgtcatctttagatgaagtctcagaacaagtggraatgtggatgtggcctatcaaaagagatcacgtgaagctgggcgctgtggcttatgcctataatcccagccctttgagaccaggggttcaaagccagcctgggcagcatagcaagatcctataaaaaaaaaaaagagtttacttgaattactgctccaagaagggttgagacaaggagattgttctgggttcccaggaagcttgtttcacgtatgttttttttttgtacagaacgaaaagctgtccatgagagctggtatttgtagagccccctatgagaatttaccaagggcttttctactctttctttttctttccttttctttttttttttttaaaaatagagacagggtcttgctatgtttcccaagctggtctccaactcctgggctcaagcaatcctcctgcctcagccacccaaagtactgggattacaggtggagccaccgtgcctggcctcctacactgttttatttaatcctaaccacggccctgtgatcattatcccaattttaatgatgaggaaacattcatagcatttaagtgaccagcccaagctcccatggcctgtgagtggccaagtagagacgtgaaccccaggcctcaaaccctagatcgcacaccaagcagcttgtgggccrcagagcacctgagccgtgtctcactgtctgcccaagccctgatgcatgataccctcttgccggcagagtgkaatacatggaaaagagcaagcatctgcaggagcagcwcaatgaactcaagacagaaatcgaggccttgaaactgaaagagagggagacagctctggatattctgcacaatgagaactccgacaggggtggcagcagcaagcacaataccattaaaaaggtacccagggtctctttcttgtattttgctgatcaggaccatcattaatgaaatgtgcggttggcatctggtttcctcagtagccaagtcactagactattggcatcttttgtatgtacttagttgaggaaattytttaacttatgccagaaagggaatttaatctgccaatgactatgaacccattggctggatggaagttgagcttgtgttaaaagctctgatgtaatgaacccctgttacagggtggattttgagccctcatttagcagtaaagcataatgcccttttaagccaaggggtgttatacccagggagctgccttactttatgagaaagcagaatgaaatggaggctattgagaatggactttccctctagtcttgtggtgtctttaagtggcaaggactataaaaccaaactgaatttttaacttttttcatacttaaaaggaagtgtctaggaaagaacctctttgttttaaaagagaagactttattactttgcaaatggtttcatatctttctctactggtattttgagctttcagcattgtcgagattcagaagctaaattccatactaattatcagcccaagagcatacctctctcatttgggccaagcagaagggtcctctcataccaaataatgctctgctcttaactgatagcccaggaccaggttaacacctataaaataggtgttattaagataagactgtccattgagtttaggtgatactgatacagttaattttttattctttacctcagtctttaaaataggcttccagttttatggactgtctctgtttttagtggttaagctgtatctgaaaactccaggggatctgtttctgcctgccttcgttgttgggtacagtaggcagccctgacttctacctctcgactccagtcacaactggcaccgggtagagaattccttttaatagtgcaacctagaaggaaaggcatttccacattccacattcttctttcctctggcttctgtaatttactgggcttcccttccaaaacaaaattattaaacagtaaaggggagttcaagggaggcctcggtcattaaggaaagaggtaaaacgatggctgagccagtgagccagtcagcccttaaatgaactgcctcagacaccccatctcaccccttacccccagccttgtcatctgggtcccaggaacagtctcaccatttccactgctgctgcaatgagcagtgccctcagccacagaaacctgcagtgtgagagctggagagaccccgttccaagccattaaaacaaacaaaatcactcatcacgatttcaggcctatccaagcattttgcagatggcacttatggcattgttgatatcacagggtatgtttttgtttttcttcattttattttgctggtttagcctcaagcccaaggcagaagacctatctgcatttgagccctcaaagtaggttgttcccaggtactctctatgtggtgatggtgctgccctctgtgatactaacccgtgcatgagcttgcctgtctctgtcctcgggccacactgagcccttacgagggcaggtggtgcctgggtactggccgcagcatgctttgagtctaaaagyaggcacccaccctgtgaagccagaccagcctccagggccccagaagactgcctcgttccgaagagcatgtcatggggctgtaggaccagccattcttcccatctcgggtcattgttgggctggggaaggttatggcttcttgtccagtcaggtgtgtctaaaagtcctttgtcttggtggcatactcctagcatggaaatggggtcaatctgggcactttggagactggtgtgtttaactcaagatcaagaccttttatgcgttgacagcctctcaagacccatggtcacacctggcagcttctggtagtggggcaaaagggttgcttgtgctggctcattttcctttagagctttccctttctgcacacatcccttttcttttcaaataaagcaaacccagagcacagggtctgatatgtgagtccacggggagtggactgtctgttcatctgtgctcagccacctctgcttcagcttcctctccataggctgagcagagatgtggtcagagtgaactcacattggaacagtacactcacggcaccctggagaggagcggtcactggttgctgagtgaattaaccgaatgtttgctgcttttctcctgcaacagttcattattcctccagcatgcctaggcagtggagagaatgtattttgcccaataataaaatgacatcctgcctctacttctcacctaatccccagtagtacccatgccaacaagccccacaccacctgacagcagcataggatgtgtcctttggagtcttccctgcagtttctgctcatagagtggaataagctcattggaacctttctaacaaaaagagatctggcataagatagatcctacttgtggtcgttatcccatcaagagaggtcagctgttaaagtccctgatagatcttattaaaaggtacacttgagctgtcagtggttccaagaatccatgacatgaaccctgttttgtatgcgacactttcatttagcgggctcctgtttcttcagctttcatatccttgttggcattgataccctgatacagaacagtccgcgctctgagcagggcagttatggccagcattgtcacgggcaggccagctcatggcacccagagcagccaggtggacccaccttggtttactgaactttttgtaaccatgggggcaagcagaaaaccccgctgcatttcagccagtgctgccaggtgttccctccatgggaaggtgctgctcaacctgaatgtgacttcctctttcttctttctataatgatgcagaatgctgaaattcttcagggtcctgattttgactgtcatttctcactgagcttttactgcagacaaaagaagtttcatttttagttaaatttgcactgctcctgggacatacatggatgcatttatttattcatccattttaatgtctcgatgtgaacttgtttttaaagcaggctaccaggcagttaatcaaacactcgggttaatcaagggttaataaaagcagggacttgatgtttaatgggacaggcattctctcagcatcactagattcaataatgctgcactattaaattttgctgcacatgaagttcagtgcatgttccattttctagactttggcagtgcctgtggtcagtgaccgggactgatgagcagccacatgcctgcactagggtggctctggggtggtgcatgctgcagtctggctggcacaagcctagctgaagagaagtactgctttaggcttggatgtggggatacctagatgtcaagggcagaactccatctagaatgcctggggatgagatgcaaaagctgatagtgaatggaacagtttccaatgtccaaaagcttgctaatctgggatcaaaccagcctgtgttgatgttagttttgctttgttttgagacacggtctccctctgtcacccaggctggtacattctcggctcactgcaacctccacctcacaggctcaagtgatcctcctgcctcagcctcccaagtagctgagactagaggtactagccamcacactcaactaatttttgtattttttatagagatggggtttcgccatgttgcccaggctggtctcgaactcctgagctcaaccaatctgcccgcctctgcctcccagagtgctgggattataaaagtgagccactgtgcctggcctgttttgtttttaataaggttttttgtttgttttgttttgtttgagacaggatctcactctgtcacccaccttggtgacagcctcgacctcctgggctcaagcgatcctcccacgtcagcctcccaagtagctgggactacaggcatttgccaccatgcctgactgatttttttatttttatttttgtaaagatgggtttcgccatgtttccaggctggtctcgaactcctgagctcaagtgatcttcctgccacagcctcccaaaatgctgggattacagacatgagccatcttgcctggccattgtatttgtcctcrttttcagtactcttctgcctcactgagaggtctcagagtctgctgtgtggtttcagcagtacccatgggggctgtgtaacattgaagctgattcaaggagtttgcccttaggttaccaggggttaccgcattccctgaggaatgctgagcggccatccagtctgattaaccgaggttcctacttctctgccacttcctttctctataattcttactcgctcgctctctctttttttttttttattatactttaagttctagggtacatgtgcacaacgtgcaggtttgttacatatgtatacatgcagctataaaaaaggatgaattcttactctctcttgaggcacagtgtcctcacctgcaaaaggtggataaaaatagtctttgcccccaggagtgttgtgaggaataaatgagagaatgtgtgtgcaacactcagtgcacagtcagagctcagtaaggggttaaaactctgaaaagggaaaatctgcttgtgatcctgcagcaaagggcgaaggacggcatgtgggccacaccgccacatctaggtacactgcttgtgctgggcatattcattcattgtattaattgctacgtggctgaaagtaaaaacttttaaaaagccataattggccgggcacagtggctcatgcctataatcccagcacgttgggaggccgaggcaggtgaatcacctgaggtcaggagttcgagaccagcctgaccaacatggagaaaccccgtctctaccaaaaatacaaaatttgccaggtgtggtggcgcatgcctgtaaacccagctacttgggaggctgaggcaggagaattgcttgaacctgggaggtgggggttgcrgtgagccaagatcgtgccattgcactccagcctgggcaacaagagcaagattccatctcataaataaataaataaatagccataattaacttcactgtttccttgtaatatttcacttgggtttgcaaggatgtatttttctcctcttgctaatcttaacttcctgtatttccatttttcccaattgatgatcagtacaactagtttgccatttgcatctgagtcagagcagtgctagcgatcaaaagccgccctggggaacctggaattgtttcattctcagtgggagcgacacgtgtcctggcatctgagccttccgagtgaggggagtgagtctggccatcaggctggkgttgagggacacagggtgccttgagcctggctttcgtgccttcagagccacagtgccaatgatgggagtggtggcttggtgtggcgtaactgtaccaccataccttgatggtagaatgcagtcctggaatatatacattcagggtctttctttcatcgcttctcaagagaggggtttcagtctcccgatcctgagctggtctgagtgccagcaaacaaagtcatcacttttgtgcctgtggtctcccaaggagcacaggatttccaaggaaattgacggatgagaaatcatgggggtggtggagcttagaaagcttatttcattagtaaatggtttgaaccgtcaaggtccagctgtggtttccactgatggaggaacaggaagaagaggagccttgacatttatctcaagcgccagcagcttctcttggatcaggaagacataaaagtccaatgtcatcttcaatttgtgcaggctccccttggagttgcagagccagtgaagkgaagtagaacagttaaaaaaacacccggggaagtgataaatcacagagagagattgcatatgcgggaaaggtgtctcccacaattaaaacaagtggccagagcctccctggcracctctggtctgcattgccagccctgaagatggctcctaaattacttaagtttaataggtagttaatatagccaaccctccttatgaccccagtgggctgaatggctctgcttgctttaggaactgggcgttgtatggtagagcatcttggccttgacataaaaggtagcatactggctccccagccctgaaccttccctgctagagcaaggcaggggtgagagggggaaggaaagaaaaaggagtggggagtggggtggggagcaaggattaacagggagcagtagcagcaccagatgtgggcatagcacactgggaagaaattgcagtggcgatctgaactcttcctctccgcctcctggctctgtggaagcccagggaaggcattaggaactgcaggctgctcttagtgctcctcccggatgggacaccttgggctcatccctgaaggccactcctaccactctcacacactgagttcctggtgtctcgtaactgttgagagcttagttttcttgcttgtttctggtagctctagatagaagactgtatcggcctcttctaaaagtcaacaagccaatcctgtttttggttaagagactttacctggtcaagcagttgttctttgggaggtgttgaagagcctacaaacctgccttgcctgcctaggtactttaccaccatttggagatgcctgaggatattaccaggccttatttgaggcagtaaaacaccctgttcggcccctcggcactgaagatgtgtttcagtgcagctctcctcggcaccggattcgttgctgcaacagtgggagggaagagccagatgcaaactcgttctgcgagcccgaggttctgttctcatgatccttgctgtgatttctcttttgatgttggcaattttaaaatgacatcagtctatctggacctttttcctaaggctcttgctcagaccactcagtagatagccgccacctgcccagtgaggtgaatcaggcccattaggccatttgtcaggggaaggaacagaggagcagcggagggccccgccggccagtgccacagggcagcctgcaaagcaggtagacaggttttcaggcagcttttgctgctttgggtccctcagggattaatacacaaaaagggccccttgggtattcagtggcagatttctcttgagagcagataaagtcgctaatawcaaattggatttgttcattggggtggacttggcctttcgttccacctctgtgtaggataagtgtgtggatagtgctcccactgtgcacatcaccatatggcatttgggtgcagctgtccctagccagactgcagaaaagcttgatctgggccggacgcggtggcttatgcctgtaatcccagcactttgggaggccgaggcaggcggatcacgaagtcaagagattgagaccatccyggccaacatggtgaaaccctgtctctactaaaaatacaaaaattagctgggcgtggtggcatgcgcctgtagttccagctactcaggaggctgaggcaggagaatcacttaaacccaggaggcagaggctgcagtgagcggagatcgcgccactgcagttcagcctggcaacggagtgagactccgtctcaaaaaaaaaaaaaaaaaaaaaagagaaagwaaagaaaagcttgatctggccacttagtacagccatccccctttactggcccttcctctttgcttatttggaagggggaaggtttcccacaccccaaaccaaagattcttttggaatttgctgctgctggattcagctgtcacctttctgctctgagtctgctttctccctgtggatccggtgccagaggatctgcacgtccttttgtgtctacaccctcccccgctccttcgttttcaatatgtagtagtggagaggaagtgtaacatgattttagggctcacatttcaattccactgcatttttatgggacaagcagagacccagcgcctggagttattaggttagtatctaaaatgggttcagtactgtgagtcttattgtttaaaatgaatgagatggtcccctcctaccttcttttctcctcycctgggatgagtggattgaggcaaggcccscagagactagttgaaggaatcctggtgctctgattagttttgttccccagcttaattgtacagcttcctttctctcaccactgatagccaaagtagctctgtgtctcccccaaccttcccttgctttaggaacaagatgatcacaatgcagycttgtgaatcaattttctgtctgtgctgatgaaagtgtaattcattcttaatcaagcagccttgctgctgcaggctccgtgccggaatacatttagttaccctcccatcactttgggaaacgatcccccaaaagggcttttagaggagagctggaaggagagttggccgtgcgcctcatgctgtggttttccagcagggggcactcaggaacgatgctggcggaggctttgtagctggaagccgtctgctgctggcagggcagcaggagaatgtttgtcacaggtgccttccaggcttgctttctccagaccctggggccatttctcagaagtaccytaatgggccacccaaaatcctcaggtagcagtgaggaggaacagttgaagatgcagattgcatgcctgggttagagagtgccggctgggtaccaggttcttttagccagcctcttctgtctttttaagtagacagatgtgtctcctgaatctgaacttgtttagattgggtggatgtgtctgtttttgtcacaccacacacaatttggggagcgtaaggaggcccagctctgccagaatggaactctcctaagttctcccctgccgtctcacagcctgctggctgtcacaaacagctggcagttttatggacaagtgggcaggggaaaagggaccctgccggggctgagtctcgatgttgggcaggaagtaaaagccaggacccaacaagtggatcagaggggggatgtgaagatgaacagtcagatagcaataaagcctcatagatctgccccagagaaagaaaaggaagttcgtctcctcagaatggaattggattagtgacagacttgagcagccggttcagtcgagagagaacttaattcctcctgtgttattcacacggctgattctaatcagatgtgaagagacagctggaggagagcagcgggtcagcccatgcctggtgcggaggcttcatgttcttgtaggcatcttcagggaactggcaggagcgctttgggttggagactctgagcagggcccttgggtttatagcctgcccaaggaactgggcctggctgcgggactcccatggttggaccttgtctagattcagtgaaagttttgaaggacagtgcatgacagacgtcactggtcaggttcaccagagcttggctcacttgtcttcagaaggattcaaaggcagttgaccagacttggcaagtcccagactggtgcagccactgtcctcgagaccctggttgtacaccctgaggtgcttctgcttcattacctgctgaaatttggagacctcttcttcctggataaccttcaagatactcattgtgcatgcgaggaattccccgccctcctggggggactccactccccaggcaggcaaggttgggcaaggggagggctgttgctggattgccaaagggagcatggacatttttgtttggaattcagggtgggaatgggactcaccagagtggcttcagtgctcaactcacagtgcaacataggacaaggtgaaggccttcttgggaggcctcttctggctctagcaagcaggtgttgctgggcagtgtagagggacccaggccggttgctgagcaggaagatgtacctaacactgatgggcctgcacaccttagggtatgagagcatcgcaggggaaccaggaaacttgttagctggttttcatgtgtttaaaaagaagactcggaggcagagtttattttatgaagggctagctttttgccatttcttctgagcttttgccttttcctttatgaatacttcctgcctatgggtgtactgtaaatgtaacagccagtgagctttctagaagcagcagatggtgaaagatccacaggtgaggagcctgcccactggaggggcgagacagtgcccaggcagggcgtgcaggtggcagagctgtttgcatgctccgcggggtggcttcccaagctctctgtagaaaaactgcctgagggcaaatggctccactgagctgctacctgcaggaaagaagctcaagggctctcctcgtctcactgcctgccttcttcacctgctgggaggagggcattgtggtgtctgagataaaggatacccccaaggtggaagcagagccatgggggtggcctccagcagcagggaggagcattgtgcagtaaattctgactccggggctcctgtggggattggaacccataggaattgcacaakgagggtaaaggatggggcggcagcagccaggtctgtctaaggggcgagcagcagtggccgaaggctcccagggccctcgggcagcagcccttgctgaccagtgcagccaggtcgtggctgcctccagctggtgggtctgccttyccctctgaccgcctcagtgccttctggaggactgtggctctctctcctgcccagtggctgtggtgccttcctayttctgtgtgggcagactgatttccctctctacctttacttgtggctgaggcgaagctcctgctcttgcaagataagaggtggggctgaggcgctgcagtgcagctcaggtggggctcaggaagcaccccacccaccccagagcactctgcatcctaataagcacatgctcgagtcactggaatcyggtgctgctggcagtgccagaaccctcccctagcacctcgaggggacagccagcatgctcctcgggtggaggatccaggaattcttggagccaacattgcacaaatgggcaggagcctctcaaggcccccacagcctgggctccctgcctggggaagtggccaggcttcataggggcatcacttggcccgcctggtaggcatggaggccagtgccatacgtgaccttgytgttgcctgcaccccttcctaacgagcaccctgctccccactggaaggagaggggccagggctcctccctccccagggaggggagaaacgtgatgttgctattagcaataacagctgccgagttcccaccatgcgccaggtgcagtgttgagtgcatcacacgcggttcccaattcctctgcctgtcaccccacgaggaaggggctgccatcacgcccgcttcacagtgaggaactgaggctagaggggagcaagtgacctgcccagggccacacagctggtcagtggcccagctgggccttgcaccaggcagctgactgtgcctgtatctgactcaaagtggctgttcttttcagaaacctgagcggagatactgggctcacatgctttcatttaaaccctctctcatttttgccccagtagttatctggcagctaaatctcttcctcctttcttccccagtgaccattctggttcccatcatcacagggcacataactcctggcccttctcctctgattacatttagggagaagcccatcctgatgcagctcccttctagagggagttccatttaggcaaaaaagcgctctccattcccatcagaaccgggctttccaaagggctctgaaattggttccactgaagaaggcagctgagctgcctccccacattccgcttgttagtcgggaacttcaaggccaaaagatttggcaggatttaaagagttgctctcaagctgtctcattctgagcacactaatgctgtctgtcttctgatggtgaagtggtgggtttggagtctccctcccctgccctttatggagccgccgatagtacsgaggactcttcacatgcagactcgaggggtccagagaatgggccagaccatcttgcctgccccatggcaacctccagaggaaagaggctcagagaggtcaggggtgtctgcagtgagctgctgatggcagagagtgagctctcggaccttctcagccsggtgtggagctcttgcctctcccgcgaacctcagtttagttatcttcatagcccacgtcctggtcgcttaacaaacattgagctcctgatcggcacataacactaagccagatatttgggggatatgaagatgaatggtacagactccctcccctccacccccgcactcctgtgggaagtcccggagctggaaatggaacacagtcacacccaaggcattgatttcaggagtcagcagagagcagggagtagggagagtgctggctccagatgcttctatccagggagatgctgggaagtggcccagagtcaagggcttaggaggttgcaaacctcactatgccaagagctcggtccctgatccaccccatccccttccacatctccctgactgtccttctttacatttgctgggcagagtgccacctgtgtgcaccagccctccctgcctgcacaagccacactgagaaagccgttgcctccagctcatggagagaaacaccttctcagctgccacgtcatgagcaagtttgcttcgggaccacctgggaaaccaggagtagaaggggtaaactcttcctcatctgccacaggcctgccttgcctcaggccacgtcaccttaccccagccatgttgccagggcatgaggactaagatgcttgccctgccaagcccggaggggatgagcagcctcagctggtgccgccacagacagcacaccacagaggtggctcagggaccttggtagatgggaatgtgagaatctattaaaataggcagggatctccggtcctctgtcaagaggcaatgctgacggctttttcctgctggcgtgcctctgcccaccagccttccccttgcacatcctcatttgtcacctcctaatttgaattattgggcaaatctggccgcttatttgggactgacagccaacttcttgagcatctatttgaacagccttccctttcgctcccagccacctttgaggtgagtccaagtggcaggacaggaccctgtgtgacagagcggaggtcttgtgccctctcagcttcttctctgctttcttacagctcaccttgcagagcgccaagtcccgagtggccttctttgaagagctctagcaggtgacccagccaccccaggacctgccacttctcctgctaccgggaccgmgggatggaccagatatcaagagagccatccatagggagctggctgggggtttccgtgggagctccagaactttccccagmtgagtgaagagcccagcccctcttatgtgcaattgccttgaactacgaccctgtagagatttctctcatggcgttctagttctctgacctgagtctttgttttaagaagtatttgtcttcctttgtctaatgtgggattcctgactcccttcgtccaaggcaccggtgtgtgtgtgtcttgcactccagagctgacctccaccgcccagcctgggaagtcaytgtagggagtgagacactgaagccctgagaagccagtgccatcatccccaccccgcccagggttccggaacattcattcccccaccggtgaggacctggcatgcagcgaagcagcccagcccggcggatcccaggccagcacgcctgccggcttctcatcgtcagggagcccgcccagagctcgtgacgagcaagtgctgggtccccgccaggcaccccgaggcggcgctctggctggcagctggtggggaataggcagggcagctgtggctggggagagactttaggcagaagctgtgatgcaggctgactgccagccgaggggctgggtagtgccgtgcgggagctgatggtacagggcactcgctgtccccctccggccaccctagaccagggtccgagaggcaggcaggagccactcatgtcttccccattgcccgacgcccatagacgctccttcctgtgtggggctggggtactccctggtcgtactgcagtcagcacccgtaacccggctatgaccagggatctgtaagccctgtggctccacaggtgctgcttctcactggcccagactctgagctccaccggcccagtctgcacggcccatctgcttcaccttccctcccagccacgtgccagtggccacagcccacttcccaacccactgttgtacccaggcctcactttgctgttgcccttgtccctcttcgggccctgaattttctgttccctgggggccagccagggccctttgtgcccctcccagcacaggcctgatgcaggtgtccactcacaggtggcgctcacctaggctgtcacaggacccacctccatgccaggcaacagagggycacagaaccacccccacggctcactccttggtctggggccaccttcttgccctttctttttttttttttttttttttttccgagatggagtctctctctgtcacccaggtgggagtgtggtggcacaatctcggctcactgcaacctccacctcctgagttcaagcaattctcctgcctcagcctcccaagtagctgggactacaggcatgcaccaccacacttggccaatgttctgtatttttaatagggacggggttttgccatgttagctaggctggtctcaaactcacacctgggattacaggcatgagccactgcacccagccccttcttgccctttcttttctccatggctgatgctgctgtggccagccagggcccttgagatccttccagtttggctgttatgcaaagcaggtgatttgtcttaatcagataaaagatagaggctatgggggcctcaagatttttggagagcagaggtggtctctggcaattccatctggttttgagaaacttagcagctcacagagcacagagatcctgccttcttcctactatcaggctgacctaatggggttgggctgctcggcaactgcttgggtcaccttgccccaaggaaaccagccctgggtgccacccagccacttagggtctacagggtgggactccagacctagagcgtaagtatggatgttgtggccctgtgtcttcctagtgtgacccagccaggagcggaagcttcaggcgtttgtaaagtgaggtctggctctgcctcctccgttttttttttttttctgtttctgtttctgttttttttttgagatggagtctcgctctgtcgcccaggctggagtgcagtgtcacgatctcagctcactgcaacctccgcctcccaggtacaagagattctcctgcctcagcctcccgagtagctgggactacaggcgtgtgccaccatgcctggctaatttttgtatttttagtagagatggggtttcgccatgttagccagactggtctcgaactcctgacctcaggtgatcctcccaccccggcttcccaaagttctgggattataggcgtgagccaccatgcccggtctcttctcagtcttgaagcccatccctggatttccaccaggagttactttcctcctgacctgtaaatttgttctttaacaatggctgcaggtgggagcatatggtggtttataaaaacgctgtcgggctttgtttccttctttagctgccgtgtstacttctgaagtctgggaagtgccaagccacgcggcctcaagggagctggctggtgtttgagctgtggcagaagcacctggggctccagggagcaggctgggaactgcaggaccttgctcagccaggagcacttccccctccttgaggcaggaatactgaggtgcctccccacagatggagaaggtggagaggaggatgggcctcaggagcatctcaagccccagtagcaggagaaagaaagaaagagatgcctggttttcacagactggttcctgtggctgggatgactgcatccttttttttttttttttgagacggagtttttgcctttgtcgcccaggctggagtgcaatggcgtgatctcggctcaccgcaacctccgcctcccggattcaagcaattctcctgcctcagcctcccgagtagctgggattacaggcacgcacctccacgtccggctaattttgtatttttagtggagacggggtttctccatgtcggtcaggctggtctcgaactcccgacctcaggtgatctgcccacctcggcctcccaaagtgctgggattacaggcatgagccaccgcgcttggccagactgcgtcctttttaagcgaacattttagggcctgggagtttgtcaagtaaggaagtctcaagcccaaagagcagcgtcctgaccatggtggtttcattacgagcccttctgctggctctcaggcagaagccccacagcaccgggaccattcatgaggtcactgcccagctcatgatgtccgtgaggctgtccttttggccagtagccgtgtgcagctgtgtggcacagatggcttcgttcatcctgatcaaggccccacctcagccacagcagtccccccaacctgtgttgtccaccctattattcatgtacctgccaggccctgctagatagcaccccgtggcattacataacacttcatgagtggctgtgtcttgtaattttggggacaggtttctctctttccctctcttttttttgtcaaaagcccagagactgacaaccagctgcagtgtctaagtgttcctcactgacagggtggggcctcaccacccctggagggagcagcgttggcagggagacagcctggcccagtgaccctgggcccaagccagcccctccagggctttcagggaagcgccatccattttcaaagatgtcaaacgtcacttcttcctgtagggcccgagtcctgcctcctatcagggccagatcatagaaggctattttctattctggggaacgattataacttaaatgattgttttaataaaaattctaagctggaaaatacttgccttgggcttcctcagtttgcctgttgctcaggccattgaggcgtcaagaacacggctgggtggtggggctgtcttgtggttctgtggagaaacgagccctctgctgtctctcactgcttgggccttcacctctggccccttgtctttggtggcaaaagaatcacctccttccacagacctctaatgacaccttcgccagggaactgcctccctcttcctggggcacttggggggtggcaagggccctgcatggcgtcccagcactccatttcctctctgtggtccctgcccatccgtgatttcagaccagagaactagggagctgggctgggtgatccttccagacatttctgttttcggcgttccaggctctgggggtgcatgcagagcccctggggcccaggcgctgtctgcagagtaaatgaggcgcagccactgtcagggctatgtgacatttgcacttgaagttggaaatcaccactgcagagcttatagtttgggttttgcttctgttttcttaagcaacaaaagtcctttattaagaccaaaacttctataggataactctgtcccgaagcactgcagccccagttggagagtcagacagcacagtgtggctgccgggacttctaagggacccactcgacacacttgtcaggacatacttcaggtttccattgcacaagccagtgaggaaaacagcctatcaaaatacacaacgtctttccaaaatgttttgagttatacataacttgtgtttgtttttttttttagaaagatgtttgaagtggataaactaaagaatatgaaaagttttttcttttttcttttttttttgagacagagtctcactgtgtcacccaggctggagtgcagtggcctgatctcaggtcactgcaacctctgcctccccggttcaagtgattctgctgcctcagcgtcctgagtagctgggattacaggcacctgccaccatgccaagctaatttttttgtatttttagtagagacggggtttcaccatgttggccaggctggtctcgaactcctgacctcaagcaatctgcccgcctcggcctcccaaagtgctgggattacaggcgtgagccaccgtgtccggcaagaatatgaaaagttttaacaatttgttgttagctttgaatatatagaattggtcaacctgggccacatagagagaccccgtgtctacaaaaaaatttaaaaattagccaggtgtggctgcacctataggcccagctttttgggaggctgaggtgggaagatcacttaaacctgggagtgtgaggctgtagtgagtcaagatcatgccactaccctccagcctgggtaacagcgagactgtctcaaaaaaaaaaaaaagtgacagagtgagaccatctcaaaaaaaaaaggtaactaattagactttttattagatgaataatataaactcattttgcaaatgtagattgttatttttagtaattggaagcagtttgatttcctccgtagtctaagccaaagaaagcactttgaaaaatattggtcatttaaagccgtccaggcaatatttttacctaacctttctattaaagacaacccgacgcccccccacccccaccaaaatagtaaatgggacctgaggtcagaggtccccgctaagtagagttagaattactaataccagagttccaatgactgattctaatggtattttggtatcgaggagatcagttgaattctttgctgttttttctagtctgtagtgaccctgctgtaaatgcaaagcgggggggccagacctcagtgcttcactgtggcatttgccgccagtcccatcggagccccaagtggctcattctggcctccctgctagcacttcattctttgcctttggtcctcgcctgagtggggagttcctgacagctgttccccagggctgcctaccccagaagccttcgtgtggcagagaggataaggagccacccacatataatgaagagttggcagtgaaactctggggggaaaggtattggcgagaagactgctgtgactgtatctagtccaatttcttagccgtctggggaagagaaagtcgggcacccgcatgttctccgtctccctttcagacagcccaggcagcgtcatctccagcagagagagggaggccaagggctcctctccccctcccctgccaggccgtgtggggctccctggcagcctgtcattactgcattatggcaggatcctagccacagccccagctccggtagggagaccgcagctcgcttccagagagatggctctggacctctgcgccgtgatgggagcacctggggaaaattacagggccgttaatctgcccagcaaggactcgagctgactcggagaggaacccccgccgtgtcctctcctggtttccacttgatgcccatttctcaccaacttggccccagaatagcacctggcattttgcctctgagctgaaatcaagacttctcttgaagggctccgcagtgggagcagccagaggcatctcgcccctcccctaagccacacttgcccagggcagagaggtggagggcacctggctcttccttccccacaagggccagaccttccaccccctgtgaagacagttgacagtgaggcctctgggtacccgggggatgttgtcaggataacgtgaaaaacaggaacaaaatgcactcaggtttctaagaaaaggggtgtggacctgtcgcagtgttaccgtaacttacaagtaatagacgcagctggcctgaagaaaggtgaaatctctaccattagctgcagggggagctggggaaacggcacagctgagaggctaagagccctccctgcctcagaacacagacaaacctgcgttcctgctaggccactgaccagccatgtgagcctacgtaaattgtccagtctattgggcactgcagttttcttcacctgtaaaatgggaattttatagggttttgtggggattacgaatgcccagaaagctctaagcaccttgcctagatgtgagtcaccacttggtacacggtggctttttttctgatacttcttttgggggcagagggcaagaggaagcaaaggaaagagccatagtgactcaggggatgtcacagctcagagggatcaggcccactcacggctcccctgtggcctccatcccctccacctgcaccctgagcttaatgagcctgcagctggtctgtttgtccaagcccatgtttgcccagtgccagctgcaaagcccgggaaatgatagataactccgggctggagctgcctgcgaaggatgttctcattttgtcccattaatactggctgctcaggtcaataattgactggaggctcagggtgggagagaaccaggtgggccacactgtgcacatgagctcttccctgagcctgtgagtacctgggctgtaaaaacccaactgcagacgccagggaggcacgggagtgacctaattttctcttatcaggcataaggaagaagtcccatggagccttgcccatttctgatataaataatgtcattccccatctgcctgctcagggaggaaggggcagcctttgatctgaaggaattaagtcggtaaacaaagcaaagaaggctgctgaggtgtcccaggcaggcacctgctgtgccatttaccctgagagagagagagagaggagttaaatttggaggagtggagtggaccgacagggacagcccagcctcaggccagccctccccggatctctgaagtctccctttatccccagctgagccaggcagcgcctccccaggaaccctggcacacccctgctgtggcaagctgcgcatggtgtctccatcctccccagcaggggccctccttgggccctggggattttcagcagaggataattcccagggaatatatctgagaaagtcaagtgctctgggatgagcagattagcctggagcccggggctggagaggagctccactctgggaggacagggccctgtctgtcccagcagaaggcagctcaatggtccagcctgcgcttcaggccagctggctgtgggctctgatcccctgcagctctccgcctgttgctgtgtggccttgagtaagtcccttccactctctgggcttccatgccttggctatagaaggtcaggtttggaccagcagaactcgaggcccccttaggttccaactccacagactggtcccccgaggtcctccaaggccatgtcaagccagcttcaccttccaaggagccaaaatgggagtgactggcccaggataccgcaggagtggctatggctacagccatggccgggagccggagtggaaccaggtgccctgcagggaccccagcctggggcctgtgttagagctcccaccacatccctcctttctcttggacccactatcctctggcacaaattcgggaggggccaccatgctgccagcccccgagctcaagtgaaaggcagcaggcgccagggcggggattggcatggccactctgggttttcctcttgagcaaccaggcccagcgcctgtcagcccgggtggcagaggggggtggcaggagccgcagcgtcggccgggcctgctgtgacagttgctctgccccgaaacccatgggacctcccttctttgcccacgccttcatccttccccctcctcactcgccagccttccgcacccagcccgagttcctgagttcctgaggctgaatctattaagtccttcatattaaccagcaaagggggaaacaaccctctttcatcttaactggagtgaatttgcattaacacctggggagttttgtttgccttgagaaggcgcattgctattctgagccgcacatgctgtggggttagtgcagtatcctattcttttattaatacggctttcctctcctccctcctcttttcccatggaagggggagagcggctggggatgccagggctccccacatcacgtaggaagggcccctggaaatgccaagttgggagagcagctcccagctggggcagattcttcccctcagaaggtggtgggggcagctcccagccccagtccagagtcccctccctgctgtgtccagtgcatgctgtgtgtagggtggagaaccctgcaaggcagggctcagggaaacaccccaccctcaggagctcctcagggcagggaaggtatggggagggggacaccagggggccaagagctgtggatactcaaggatgacctccactgggctcaggggccccgcgaggtctctcccccagcgttacaggggagcctgacttggtggctgctgtgtgtctgccccaagcgtgctgcttctgaccctccggtgacaggactggtattagccaccttcggtcctgtccaggctggagcacatggatgcaatttaggatgctcgagagtgcctgggaaatgctgagtctaggatgggggtgggttgggcaaaccttggttttcaggcctcagacctggagatcaagatcaaggttctagaaagagagaagtttaaggcaggggagggaacatgaagagtgaatgcctccccaggacccctcacccccgaactcctgaccaccccgccaccctcccctcccctcccctcccacctcctaaccacctcgccccccctcccctcccctcccacctcctgaccaccccgccaccctcccctcccctccccccacctcctgaccaccccgccaccctcccctcccctcccccaccacctcctgaccaccccgccaccctcccctcccctcccccaccacctcctgaccaccccaccaccctcccctcaacccccacctcctgaccatcccatgagatggcgaaggggagaaaggtgcagggcagatgggggtggggagctggggcagagaaggggtcccatgaggaccgtgggtgaactggggatgggggtgtccgggccccccagtgctgctcagagttaagaacttggc

SEQ ID NO: 97133 - DNA, 14518 bp, Homo sapiens
ccagctgggagcaggtggataaacaggacacagaggtacaggctcagcccctgctctgagtgccatccatttaactgttttgtggttcttctccacccccattcccaccccatacccctggccaaggaagcacctcccagcacagctagccctgagcctctggcaccttagctcctgggaacccacatgaagcctaggatttctgagccagggagactcagcaagctggccctccctcttcattgcctctatgaactggagccttgccagctctcacagtgacccagggtgctgctgcctgctactttatctcaggggagattggagtcccctccagggaaacgatttggacgcctttcttgtactgttgacatcagatctgctgggctggtgccactggagctgatgtggtccttgtgactcttgctgcccccagcatggctctgctggctccagctggatggcccatctcctgtcagtaacctggtcccatctgttttgcagatgacccgttggcttcctgaccacctggccgcccactgctatgcgtgcgacagtgccttctggcttgccagcaggaagcaccactgcaggtaccattgaggggctgtggtagggtgggctgtgtgtggaggttgagggtcggcccacagagcctgcagagtagagggttgtgggtatctcagtgttctgtctgaggcagagccatggtctcatcttcctgtgcctctgaaattggtgtttgcaaaactgcatttggcatctttgttcaaattcagagtaatcactgttaaattctgaaatgtgcaaatggtagcattttgttgtttcccagattggtgaaacaacagccaccactgaaaccaccatttcttattctcagcataacatttcttcccattcaacatggctactatgagcaaaaccagttttcctgcgatggggagggaactattttcctattcctttcctgctccctgaccccacacttgttttcccttgtgccattggtgagcagctgtagcttgggaagtagtagagacagctgaggacagtcttccaatcattaaggttcctgacttctttttccttctgggttagggtagtgagtttactagggaccctttgccccagctagggtgttgactgtctggtggatgttcagtgttcttagaagaggaagtttatctgaatcatgccatagctcacccacacgagtgggtggattgaaaatggaacagtctctttgcctagtaatgatgcttctaggacatgtatctccccaccctgcaccccaagcccagatatctttggttggcttctcttctgagctctttctcccctccttgcagggacactgaccgtgttgatcaaacgtggtgagcatttgcaacaacctgcctgtgatgtctgcacatctacaataacttctccacactaactcttatcatttccccctctctgcacttactagggtgaagcctggggccttgggtgcacaggcagataggtgggcttgaggggattcaaagcagctgaggagaggccatcgagggtgggtcaggctgcagccatgtgctcccctcctgatcacagaggtcagccaggccgtcttgcttgtgacgagaagtagtgcttcttgtcttctggtcttgtaggggaaccagttgggttttcagagctatttattttgggtcagtgattcattgagatgccagaataatgctagtaatttccaggtcaaacagcatcactgcttcttttttccctttttttttttttttaagagaccaggactgaacagaggtgatctttccagagaattgttttagcttggaagacttcaaggaaagattccacttagtgtctttcagggtcctctgaaagaagtcagatagaaaagcatcagccaggtgcggtggcttacgcctataatcctagcactttgggaggccgaggatggcagatcacctgaggtcaggagttcaagaccagcccgaccaacattgtgtaactccatctttactaaaaatacaaaattagctgggcatggtggtgcacgcctgtaatcccagctccttgggaggctgaggcaggagaagagaatctcttgaacctgggaggcggaggttgcagtgagccaagatcgcaccattgcactccagcctgggcaataagagcaaaactcccatctcgaaaaagtaaagaaaagaaagaaaagcatcaaattcatgtcaggcttttgagctgaactccagcaggaatgttaaagaagtgtagatgttcagaaatttttctgtgtaactacaggtttttgctgactcacgctttttagaactagttacgaagtacagcattctagaagatgaattttgtgtttttcttttctgtctttccattgccccatgtcccaccttttccttttgtggtattcttttgttcccaactggtcttagtcttctctcctcctgtgcctaagtgatccttaatccagcagtgggtttgcattccgaacagcataaatgaaaagttagaaggctaagaagctgccctcccccagtctttggtgggctgtgtcaggctccttggagcttcttgttcttaggctcattaggattgatttgtacctcagggcccagcaaaagtagagttgtaaggtgggcagaaactcattctttgccaattccctttcctgttggctctgatgggcatccatctgggggtgcagaactgtgctgcacagatgcctcagaacccagctttcaggggaggaggagagggatgcctggggcctgagtgcattctggccttctggtagaactctggttttccctggagatgcatgggtcggggagtgagccataattgactgacacctatctaataagggggtgtgtgtgcacgtgtgttcatcctgtgttcttgtcctcccacctctcctctttcaccctctgagcatgcatcacaggctgcttgtccctggctttgcatgctgccagcagagcagtccaaaatggcagcagtctatctgccatgttgctgcctttgatcctctggagaagtggccgttgggcaaggctccttactccccagtgaggctgggtagttgtttctctcgtttgaggagcctggcctctgtgatcacaagctacacagagggcattgcctaggtgggtgtggccactgggttttcctggatcaggactaacccattgttaggaccatgtattcttacagatctctcttgagcagcattcttttgtatacctgagcagcattcttttgagtcagtggtgaggcagccaagaatccttggccccaaagtgaaaatgacatgtgactctgctaggtagggacaccctccctacccagcttgttcctgggctagagagatgaaagggtttgatctcaaggagctccagcacatgcaaattacacacggcaaagtttgtcttttgaagttggtttccctccgcatacctgctggccaaaactaacattgttctgtttcttctcatctcaaggaattgtgggaacgtattctgctccagttgttgtaaccagaaggttccagttcccagccagcagctctttgaacccagtcgagtatgcaagtcttgctatagcagcctacatcccacaagctccagcattgaccttgaactggataagcccattgctgccacttccaactgaagctcagtgacctgggtgggcagtggccaagctgctgttcctatgacaggcccactcaacctgggcagaccgagaggcccgtgcactttggaatgggagcgtggaaccacctgtacagagtgacagatttgggatgcaccactggattgtagattgatttttctttcctgtccccctactccctccctaccttttccatcctcctcctctgccttcaaaaaaggaaactttcccttggttgtcttaattttttttttttttgatggaagaccaagggttgccaggcccactgtaactgccgagctgcctgctgtcaggtgacactgagggatggcttgtttcttccgggtgggaggatggtggtcagagccaggagtatggagatctgagaccgtgagcagggaagaaagccagtgctaacatgcaaccattcctcacgccaccgccacatcagagctggttgggaaccctttgctgctggggaggctggaagcatattccccaagagcactgccctgggcatcatctccctcctgcgaggagctgagccagtcccctcacagatggataaatgaggctgatgtttggagggagaggcacacggtaaatggcatccccttaggcgcctctttgggaaaggaaagtggatgctcctttgaggcaggcgaggggctgggagtgggtagccgtcatgttgtcccccgtgggatcccatttttaacttgacccagattgtcttgggctccttttactttcagggggctgctttcctgggccaggctgtgtagcacttcccaccctcaggcatgagtacagactggtcaaaatgtttatgcagtcaaggccaaagcctgccctgagcccagacacacctgggtccccattctggggcctggtcccctaaacaatctcttcctcagccagcacagggaaatccagactcagggttccagaaatcccccgttcccaaaccaaaccaatcatggatcttccctttaaggggtagaatcagcctttagagttacaagcccctggaaaagggagcaggtcccatacaatcagcctttctcctcttctcttcttgggacaggaataactgctgagcagtccccctttgccactcctggctgtctgagtgggcacttgtctggctgctggccagcagtgaagggccacttggtgacttcgtagggttccttagagaagtgacatggccttgaggagattcagggcacctttcctcagtgagctttgatatggtccaaaaacagccttaaatcaagaatatttgtggaggtaggtgtggggaaggttggagaagagttaggtttgtgctttgtaatcttggcatccatgttttgtgcctgccctccctcttggggaggccatgcttgactctgctgaaagctgctaactggtgacagggtggatcatggtgaggactaggggtaaggtcagggaatgcttaagctctggccctgccctgtattcctcttccccttggtagcagttccctgaccaagggcaaggtgtgtctcaggaaggtggttctgtgcatgcctgggtgtggttaaggcgtggcccagaaggcttccctggtgctctcagtccaggcaaagcccagagcatctgagcacgtctctgacttccagtggcaacacagtttgaacgtggtgaaacagggtgtagttcttttccacattctgtgtcatctagtcgtgcaggtagggaaaaagttggtctaattgaagattgtgcatttcctagtgacaggtgccaagaggttatgatacgggtttcttgggtctgatgtacagtgtgaataaatgcttgcagctcttagctcttttttgatcgatgaagcacttttttattaatattttcctttgttaaaggaggaaccgtaactctccatagctgtacatataacccttttctcctaaagaggagtcagtcagtgctcctatatttttcattttttgtcaaagcaagaagtaaatactttagaattgttaaatatataaataaagcaaataaagttgagtgttccacatggtagcatttgctaacacttcctaattctttgccctgtggtttatcccctcttcgtcccttttccctctcacacagaagtgtttgagggcctgctgggaaactgacctttggcaaaggaaagctacagatagccttccgactctagaccttggcaaggagcctcaccatgatgttcaagcactgaacgcatttcctcagtgattttgctcctaaaatctcccaggctaaaagagggcaaagcagtcagggatctgacctggcagctattcctccttctctgaagagttcccatcagtagtcattacaactacctctcgcctcaaggctccatttttagctgctgctctgatttcagggcagccagtactctggccccttcagtcggggagtggaaggagatgtggggtgggggtgagaaaatgcttctgcctgttgttcttgaaggatagactatgggtgggcagagagaactgggggcagaaatggaattagatgtgattgggttatgcagtcaactagaggtctccttcccgccctctctccacacagagaggaacctctgctccttagctcttacagcaggactgtggcatctagtcacttcaatactagttcttgctcttcacagaggtagatttttctttaccctacagcactgttgggcatccctcccatcacatgggtctgtgggtgagatatgttatgctgttcctccctcgggaaggttggtattgaggggtgccttgctccagaggcgccagcccagcatctgtggtgagttggctaagatccagagtgacctgctcagagctccccagaggccttcactctttggggcagtctctctagggtcactttctgaatgtaccttctacctaaagtatacaaacacaaagagccagctgagctggttctagtgtgaaagccgtaagtgccacccagcaggcgtttgaaaacaagaaatcattcttctgtggaaggagaatgtgccatctcagctaccctcagtccgccaggsagcccagtctgtgtattcatatgaagttgtgaaaaccatgagtgtgtgccatggccatcgtgtctacacacagccactattgttcctgtgggctagtctccagcaaattaaaacactggcatggcctaggaagggcgttgcgagctcctaaatggaaagcttctctgggggtagggagatgaagagccaagatgctggtgaagcaggtgcagtgaggatccaaggcaaggaattgccctgagggaggtggctgcatatggagaaaggcagttckctgtgggcaaggccagcttgcttcaggctgtagagggaatttggtctgaagcaacagggcatgaactgtgactttgagctgccaggttgtcttcatctcagaactttcctatcctggcactctcgttacctttcttctataccttggcctctgtaactgcagtccaaaacaagttacagctgccttaatccactgagattctctatgaggatgtacagaaaagttttcctgtaataattttgcttatatgctaactcttttcatgttagcaaagaatattctatgaattagaatgttactgtggtagatctaaaggagaatgaacagaaggtgctggaggacctgttaaacaatctctggctattaaaaaacatcaagatgagaattaaaggcatatcctgatatacttgcctgcttgcacatgaggctgggagatcccatgcctgttgaagttaactctagccctgacctctattgatcttttgggaatgagggctgatttgaaggtgctgttgcaggatttcatttagctgctgccagttcaagtgacctgtccccagggctgcagctgtatccacctgattgcagtaggtgagggctaacagcagaatttaaagtggaccctgggctgtggagcaaagtgactatccatttggacttttggataatgtggcaggagtcccagctgtttaatttctagtcacattttccagaaagttgttctaagttgagattactgacaagatttctcaagggcaggaccagatatgtgagagacttctagttcagagctgacccctctaagcctctgacacttaaacacgagtcctgctgtccccagcacacaactgcactgaagccttgttcctctcggctggtgtagagctcatctgcatgttgtgtgcagataccagtagcctccctgcttgaayaggcctctcctaggctaggcaggtgttcagaggcatgaaggtctgggcaggggaagggcgtcttctgaaatgggagttaccaggtttttaaatgctgctattgttttatttaccatttaaggtcttttctattatatctgagtaactagtcagtttttcttacagtgctcatagcagttgtatttgaattgtattttcagtgaaatttgttttacattgccatttaaaattggcctttaacagcttcccaamtrgcttatwdttttttttaatgaaaacataacccatgaggctcagatgctgttgaagaaataaatggtatgttgctgctgacagtagtgcttgcctattgtaacagcattggttctgctgtagcctcggtgaccatttaagttgaataaatctgtcattttcacccacaaacagttgttgagcccctggatttgggttgtcactgtggttctcctgccagtgctataatccagtgtcgtaggtgcagggtatgaatcagctcagcctcttaggagagaggggctctcagcgaggagggggcggggggggggtcactatttatcttccagaggcagggttcatggattcctgatgtttagaggcggaagggaccttaggtcacctacttccacggttttcatactgttctctggggcctcgtggagagggagcctccaggcccattcaaagctttattagatttaaaagtaagatctggtatgaagaaaggttttgtttgtttcttaaaataaaaagtctgaaaatcactaatccaatctcctcctttttcattgaggaaactgagactcagagagggccaaagacatccagattaccaatgagttaacagcaaaatttgaataaaagtcattcttggccaggcacagtggttcatgcctgtaatcccagcactttgggaggccgaggtgggaggatcacttgagcccaagagttcaagaccagcctgggcaatatgttgagacccatctctacgaaaaatataaataaacctgtctctacaaaaaatatgaataaactagtcaggaatggtggtgcacacctgtagtcccagctacttgggagcctaaggtgggaggatctcttgagcctaggagtttcaggctgtggtgagccatgatcacgccactgcactccagcctgggcaacagagggagaccctgtcccataaaaaaaggaaaatactttcccgactcctaaccctcttcttgtgctcttgggcctccagaaagcctgatgtaaatagctgtattggttctcgttgaaatctcagcgaggagcttaggcaattgccatcacaaggcttgaattatgagcccttctctccctcttaaccaaaatcaaaatgttgtgatagtctaatccagtgtttttgtttttaacttttcaaatacataaaaacaaatgatatgttattagcatgaatcatcacagtttaagtcataacatcttaaaatcagtgggcttggggagggagcatttttcattagtgcagatgataggttcactgtgaactgtcccagcatccaatttctggattttgttttagttgttatataatatgggggagtttaattttaaaaaatttgagttttataggtaagcggttgcaaatggtagtagtcacagcttgcctgcaatctcttgttgacaaaactgaagtacatgcctgaaaaaagggattaatagaagaatatccaaaacctgctttcagtctttatcatccatatatcagatgagagacacccaaagatttataagcactaaaattactttatgctcagggccaccaggtctgagttggccctgggcctaatgatcacagcactaagctggtgccctcccagtcagtgacccctgcaaaggccacacacacacacacagcaatacagactgtacagtgaagtctcaagcagcctcactgaatgtgttttaaacctttgggtgtatatagtttaaaagacggttattaatatttatcaggacattatttattaatatcaggacaaattctcctgaggcagtgccacaaaagttggtttgaaaatcaccagtttggtggaaagcccctgtgttttagagcccacagacctggggtgggatcctagccctgcagcaccagctgagttgctcatgggtgtatgaggaactcggagacatttcctcatctgtagcagagcacatggcatataaatggagtgggaaggtgggggcctagcaaatgctgtcctccccactgtcccatgaaatgagatagatagatgatagcatttctgtctctggcttctagcaggcatttggaacaatcaatcagagccaggcagcacttctattccactgtgtgttgaaactagaccctgctctcgcttccaccttacaggggaaaacatttgactttgaagcattccaatctgagttttgcactaagttacaaatgaatcactagctgaagaagacaaactaaagttcatatatgtgttttagttttatttattttgagacagagtctcactttgttacccaggctggagtgcagtggcgcgatctcgactcgctgcaacctccgcttcccagattcaagtgattctcccgcctcagcctcttgagtagctggaattacaggcacccaccatcatgcccagctaatttttgtatttttgtagagatagggtttcaccatgttggccaggctggttgaactcctgacgtcaggtgaaatgcccgcctcagcctcccaaagtgctaggattacaggcgtgagccaccgtgcctggccttatatatgtgttttgtttttaaattaacattttgtaaacagatggtggtctgcatgtgcaccgatgctttaagagtgtatggagccaatgggaagggagtgtggagagaaactgcttgttggggttgaggcagcatctaagaacgcctgagtcctgccatggcaacaatcctgcaaagacagacaggacctcactttgttaaactgatgagtttaagttgttcaagactaaagacgaagccagaagatgcagactagcttcgcaggctgagaagtggggaaggtggagccaggtggacctcgcctctgcatcacagaggcctgggtccaggctatggtgctcttagcatctctttaagaataaatcccagagcccaaggttggaagaggaagtggaggccttgcgttcagatggccctccccaccctctccaatgacagaggagcccaaggttgcccaacatatttaaggccatgtcatccgagttcaaatagacatgagtttgtagtaagtggttgctgcactttgccagctggaagatcaagccttagaactggaggttctttcaagtcccccagaaagtgctggcatacaatgtgtaccagggcagctccctctttagaagtccctgtcagcccttgggacataaactgcatcccctggccccttgggggtggtctgattctttctgttctctttcatctgattcagtaataagctagctagctagctgctgccttattaccgcctaactagagactcctagttttggaaagacagtaagatgtcagcttgccagcctctattactgggatgaggagacggaaatggaaaccatgagaatggtgtgcctctcgacagttgccactgacccctggagaggagtcctagttgggttgggaggaagggggttgggcttgaactctccctgcccccttacttttggagcagcagcatccccccgaggagctgagaggtcactccctgggtcaagcagcctgagctagtccctctccacggacaggatgattcacagcccagaaaagggagcagccacctctggaaaccgtgtacatcctaagagcccctcctgcagcacctttcttaggttgattcagggagggaagctgtgggaggagtcggggaaaggcctgggagcagtgcttcctctctccctgctgcaccaacatcttggaagcttggtggaggtggggacacaactcttaccagtagtgctgctcttcctcctctcccacacccccactttctcttcccctttccaaatacccaaaggttttaatgtgatctcctggcattggagaccctgggcaccactgcacattcaggccagtgagcaggtcaggcccatgtagccaccggaggtggcaatgcccgagaggccatcctgcaggcactagctggagatgccagtgctgagtgactccaaggagattgttttccttctgaaaaagcagcacatggctgggcgcagtggctcatgcctgtaatcccagcactttgggaggccgaggcgggtgggttgcctcagctcaggagttcgaaaccagcctgggcaacacggtgaaactccatctctactaaaatacaaaagctgtagctaggcatggcagctgctcaggaggctgaggcaggagaattgcttgaacctgggaggcggaggttgcagtgagctgagattgtgccactacactccagcctgggcgacagagcgagactccatctcaaaaaaaaaaaaaaaaaagacaccattccttttgctgaagtgggcacaggccaggcccctaggaactgagcgcttgcagtgctgcaggaagtgctctcctggcactcccttgtcctgccaagaagtggggactgcaggggactttgagcaacccagtacatgaacctcttcatttacagaagcattttggaggcttttttcactacacaaaaggttctactatagaattttccaattgtattttgcattttaaaatatactgttcattaacataaaaatatacacaatgccgggcacagtggctcacgcctgtaatcccagcactttgggaggccaagggaggcggatcacttgaggtcaggaatttaagaccagcctggccaacatggcgaaaccctatctttacaaaaacttagccgggcctggtggcacgcgcctatagttccagctactcgggaggctgaggcaggagaatcttttgaacctgggaggcagaggttgcagtgagccaaggtcgcgttactgcactccagcctggttgacggagcaagacaccgtctccagaaaaaaaaaaagtgtacacaattacaagtgaaattcccacttgctagaggtaactgactcaccacctttagtgagttgtcttggttttgttttttaaaaatactctgcaacaaagctttacttgtttttgttgtctgttacagagtaaaccgtggtgtagattcttctgccagaaattctcacacttttggagttagagaacagaaatggttcagtaagtgacaaaatgacagccagaatagatggtctagggctttgtcccacatccaccatggccttagcctttttctttcaaccttgtttggctggctccttcctctatccctaaagctgtccagtcctccagcctgcaaagcaaattctttcaagtcagagcaaattctttcaagtctctgcctccagcaagtatcctgtcttgctccttcccttcactgtgaaacgaatagaaagagtggccagctctatatcgtctttgctccaccaccccttcctcttcctcctgcttctgctgccccccaccaccccaacactgggtgtccccaaggactagccacacactctagacccactccaaagcattctttcttgcaaccattctgcaacctgccaccttgctaaccctcctgccagttcttctgcctctgtagttggcctgtgagactttgcaggcagccctctcacctacttccttggcattactgctctgaggctcagctctctgccctccttccacgcatgcttccttggacatgcagaaattaaagtgctgaaaatggaggcctgttatataccacagttctaagtctctagaggcctccttcaggcacctggggagactgcgagagcatcaggtgtccccatctggacgtgtctatgtggccatgcttcacctgcacccccacgcagttcgatggcattaacctggggactagttctgggcctgaaaactgagctcagccttgtcagccagagatgcctcggggcttcccctgaactgagaggccacgacgtctgctcttcgcttttatcctctgttgcaggatgcagtcagcacctagtgcaggggtgaacgccgatgccaagtttgccctcctatccttcaaccccaagtaggaagttcacctcttattttcatattgtaattgaattccgacaccccaccaacccttcctgggactgggggaagccccatcgtcagtctatttatgacactcagtcgtaggaagctttgaccctggttggacaggaatgagctagagcacccaaagccactgggcatggtttctgtgtgctgccctaggcaagggcagaggggctctgcctctccttacctgggcctaccagaacacccttgccagtcacatgtcttccgggtcaccctgctgccctccaaggcacctcatgccctcagagggccctgctgatgcct

SEQ ID NO: 97134 - DNA, 13761 bp, Homo sapiens
cccagggtaccaagaggactgcaagaccaagggactcctggactactgagatgagagcagtaatggagtttggtgcttccagagttctggtggtagtgtttgtttgtccatcccaagtggattctaggacagaagttaatggacagggatggattagagataagctggatgatacatctcaattggagtccagcagaaaatggcaacacatagaccagctgtacccagggaagagcagtaaactttcccttatacagacactgtgctcccataggagaagggagaggggaagaacaattctataagggctgaactttgaattaatgcttaccaggaagagactatcacacatgaaaagatggagggagaatgaaaaaaagactggcctgataggaaaggtttagctcaggagagtcttttttgccacaaagcagaagcataaaatttgttgactcattagtgggttttaaaaaaatttttaatttttgtgggtatataggtgtatatatttatggggtacatgagatgttttgatacaggcaagcaatgcataataatcacatcatggagaatggggtatctatcccttaagtatttatcctttgtgttacaaacaatccaattatactcttttagttatttttaaatgtacaattattattggctatagtcaccctgttgtgccgtcaaagagtagattttttttttttttttttttgagacagagtctcactcttgttgcccaggctggagtgcaatggcgtgatttcagcttactgcaaccttcacctcctgggttcaagcgactctcctgtctcagcctcccaagtagctgggattacaggcactctccaccatgcctggctaatttttgtatttttagtagaggcaaggtttcaccatgttggccaggcaggtccaaaggtagatcttattaattctagctatttttctatatccattaactatccccacctccccccagctcccaactcattaatgttttaaaacataagtttcatgaagtcacacctctgcttaaaatccttcaatagtgacattggcaagatggctggatagagatgcctggtattcatctatcccacaagaaaggcccaacacaatgaataaacaaactaaggtttgactggagtgtggaagggagagtggtggagtgtggtgggggagtggagatgcacctgtggtgatcagaaatccaggagggcagcgaggaagcactgggcctctatagccctgtctcccccacctggattggatgtgcccagagtcaggaaggacttcttattgcagggaaaaggtaagcacaagatctccaccagcccccactggcactgcaaaaacctacagtccttattacagaagaatcctacggtcttcccaagccctgagcccagtttgaagagctgctgggtatgcaagcagctacattgctccagattaggagagcaaggtgtgcactccccattccccccatcccactccctgtgggccaagctgctgcagcataatgccatcttgagaaaagagcaaactctgaagcacaccctgttctgggggccggtagccactgcatatctccagcactggggcgctccatcctcattatgccaagcccacaccacacggttggctgaatgccatacgtcagctgcacagagcttgggcctaggatcagctgtgactctggtcctgcacagcaagaaaacaaacccctgcttactgcacttccagccagatgaacagtctgccagtcctgcccagggccaacctgccttgagctggccaaactgctctgcaccctcccacaagagagagaggcccctgagcctcctagtagctaatatgcacccaggccagtggagtggctatgctcccatgctcaggaccggagaaacagccccacagcacccctgcctctgcagacatgcccctggcctgcctaatggccctgcatttcccataaagacctgggaaatactccttcaggctgcccccggtaggcacgaccccaaaccagctaagcagccaagagcccacatccaggacttgagaaacagctctgtgggccaccactagtgaacatgccctgggctggccaggaagccatgtgcctgcataccaggcctaagaaacagccctgtgggccatctccagcagaagtatccccaggtcaactgagcagccacgaagctgtgtcatgagcctgagcaacaaccctgtgcctgcccccagacctgtctcctacgccaacacagcaggtgtgcacccatgtctcaggccccaaaaacagccccacaggccacctctggtgggcatacctgcaggccaatcaaatagccctgtgcttacatctcagacctacaaaacaaccctgtgggccacccactgcagaaacacccccaggccagtcaagcagttgtgcagctgtgtcctgggcctgagaaaatgtcccatgaatcaccccatcaggtgtatccctaggccagccaagcagctatgcacccatataccaggcctaagagacagccctgctggcctctctggtgggcattcctccaggtcagctgagcagccttacacccatgtcctaggccttcgagaaacagctctgtgagccacttctggcaggcatgtccccagggtggccaaataactcatgctcctggacagagtaatagccccatggccccagccccagtgagccagatcccaagttggccaactcaccatatgcacacacatgcctctgacctgagaaacaggccagtgaacccagccctggcaaagttgcaccaccattgccacaaattatttcagactaggccactgagaaatggccaaatgccactagtgtggataatggctgaagaaactacatggaggttacattacactactgtatcttcctaaaaccaaggccagtacaccccatgaaccaacaccccaggtcccattcatataaacaagtcttttcttatgaaacctactccataaaattggaagaggtgatttttccaccaaaggcatataaatcaacataggaacacacaatcatgacaaagcaagaaaacatgtcacctctaaaggaaaaagacaattctctagtaacaggccccaatcttgaggaagtagatgaaattccagaaaaaagaattcaaaataacaaccttaaggaaatggattgagatacaagaaaaatacagatagacaattcaatgaaatcaggaaaacaattgataatttgaataagaagttcaacaagagatagatatcatacaaaagagtcaaacagaaatcctagagctaaaaaagtcaatgaatgaaattaaaaatacaatccacaacttcaataatagactagaccaagcagaagaaagaagaaagcctactaaatttttggcacactataaagcaaacaagtatttgtattatgggtgttcctgaagtagaagagaaggggaaagatgaggaaaatatatttaatgaaataatagcagaaaacttcccatgtcttggaagagaaatagacgtttaagtccaggaagctcaaagaattgcaagtagattcaacccaaacaggttctctctgaggaacattatagtcaaattgtaaaaagccaaagacaaataattctaaaaacagcaataaaaaatgtcaagtcacatataaggggccccactaacagcggatttctcagcagaagccttacaagccaggtgagtgaggagtgaatgggatgatatattcaaaatactgaaataaaaaaatcctgctagtcaagaatattatagccagcaaagctattattcagaaatgagggagaaataaaatctttcatagacaagcaaaaatgaaaggaattcattaccactaggccttacaagacatgctcaagggagtcctacatctggaattgaaaagatgattaccattatcaagaaaacatgtgaaactataaaactcacaggtagagccaatatacaaagaagaaagagaaaggaatcaaagcttagcactacagaaaaccacccaactgcaaaaataaacaataagagaggtggtaaggaacaaaagatatacaaaacaaccagaaaacaaataacaaaatggcagcagtccttacttatcaataacaacattgaatgtaaatggactaaactctccaatcaaaagacatggagtgactgaatggataaaaaaccaaacccaactatctgctgcctacaagaaacacacttcacctataaagacacaaatagactgaaaataaaggaatggaaaaagataatccatgcaaatggaaaccaaaaaagagcaggagtagctatactaatatcagctaaaatacatttcaagacaaaaaccataaaaagaaacacaaacggtcatattatatgttgaaaaaggggtcaattcagcaagagtatgtaacaagtattaatgtatatgcagccaacactggagtacccagatatataaagcaaatattattacagctagagagatagacccttatacaataatagctggagacttcaacaccccactttcagacttggacaggttatctagacagaagatcaacaaagaaacaaaaggacctaatcaaaatttacagaacatttcatccaatggctgcagaatacacattcttctcctcagcacatggaacattctcaaggacagcccatatattaggccacaaaagaagtcttaaaaatttcaggaaaactgaaataatatcaagtatcttctatgaccaaaatggaataaaactagaaataataaaaggaatttaaaaaactatacaagcacatggaaattaaacaatatgctcttgaatgactagtgggtcaatggagagattaagaatgaaattgcaaattttcttaaaacaaaccataatggaaacaacataccaaaatctatgggataatctaaaagcagtgctaagaggaaaatttatagcaataagtgcctacatcaaaaaaagtaaaaaaaacttcaaataaacaaactaatgatgcatctaaaaacctagaaaagggcaaaccaaactcaaaattagaagaaaaaagtaataaagatcaaagcagaaataaataaaaatgaaaacaatataaaaaatcaatgaaatgaaaaattgtttttttaaaagataaacaaaatggacaaacctttagttagactaaccaggaaaaaagagggaagacctaaacaaaatcagagatggaaaaagagattacaactcataatgtagaaattctgaggatcattacagactactataagcaactctatgccaataaattgaaaaacctagaagaagcagataaattcctacatacatacaacctacctagattatatcatgaagaaacccaaaacctgagtaggccaataacaagtaatgagatcaaagccataataaaagtctcccagcaaagaaaagcccaggacccaatggcttcactgctgaattttaccaaacatttaaagaaggactaataccaatcctactcagactattccaaaaaatacaaggccagtattatcctgataccaaaaccagacaaagatacatcagaaaaagaaaactacaggccaatatgtctgatgaacattgatgcaaaaaatctttaacaaaatactagcacactaaattcaataacagttaaaaagatcatgatcaagtgggattcatcctagggatgcaaggatgtttcaacatatgcaaattaatcaatgtgatacatcatatcaacagaatgaaggacaaaaatcatatgatcatttcaattgatgctgaaaaagcatttgataaaattcaacatcccttcatgattaaaaaaaaaaaacaacaaaaacaaaacttaaaaaactgggtctaggcgggccggagcccaggcccggcccagcagcaccccccaggtagactggggcgaggccatgccgacacaaggtgagaccactgctggaacatccagtaatggataaaaatgagctggttcagaaggccaaactggccgagcaggctgagtggtatgatgayatggcagcctgcatgaagtctgtaactgagcaaggagcttaattatccaatgaggagaggaatcttctctcagttgcttataaaaatgttgtaggagcccgtaggtcatcttggagcatcgtctcaagtattgaacaaaagacagaaggtgctgagaaaaaaacagcagatggctcaagaatacagagagaaaactgagacctagctaagagatagctgcaatgatgtactgtcccttttggaaaagttcttgatccccagtgcttcacaagcgagagcaaattcttctatttgaaaatgaaaggagatcactaccattacttggctgaggttgccgctggtgatgataagaaagggactgtggatcagtcacaacaagcacaccaagaagcttttgaaatcagcaaaaaggaaatgcaaccaacatatcctatcagactgggtctggcccttaacttctccgtgttctattatgacgttctgaattccccagagaaagcctgctctcttgcaaagacagcttttgatgaagccattgctgaacttgatacattaagtgaagagtcatccaaagacagcacactaataatgcaattactgagagacaacttgacattgtggayatcggatacccgaggagacaaagctgaagcaggagaaggaggggaaaattaaccggccttccaacttttgtctgcctcgttctaaaatttacacagtagaccatttgtcatccatgctgtcccacaaatagttgtttacaatttatgacaggtttatgttacttctatttgaatttctatatttcccacgtggtttttatgtttaatattaggggagtagagccagttaacatttagggagttatctgttttcatcttgaggtggccaatatggggatgtggaatttttatacaagttattaatgtttggcatagtacttttggtacattgtggctttacaagggccagtgttaaaactgcttccatgtctaagcaaagaaaactgcctacatattggtttgtcctggtggggactaaaagggatcattggttccagtcacaggtgtagtaattgtgggtattttaaggtttggagcacttacaaggctgtggtagaaacagatatcccacagataccacatgttaaaccatgtatatctgtggaacactcaatctcaatgtgcatacccttgactatagctgcagaagtgttcctttagacaaagctgtgacccattttactctggataagggcagaaacggttcacattccattatttgtaaagttacctgctgttagctttcattatttttgctacactcattttatttgtatttaaatgtcttaggcaacctaagaacaaatgtaaaagtaaagatgcagggaaaatgaattgcttggtattcattacttcatgtatatcaagcacagcagtaaaacaaaaacccatgtatttaactttttttttaggttttttgcttttgtgatttttttttttgatacttgcctaacatgcatgtgctgtaaaaatagttaacacggaaataacttgagatgatggctacctttgtttaatgtcttatgaaattttcatgaacaattcaaacataattgttaagaacacgtgtattaaattcatgtaaatggaataaaagttttaagaatggaaaaaaaaaacaactgggtatagatgagacatacctcaacaaaataaaaggcatatatgacagacccacagctagaatcatattgaacagggaaaaactgaaagcctttcttctaagttctggaacgagacaaggaagctcactttaactgttattcaacacagtactgaaattcctagctagagcaatcagacaacagaaagaaagggcacccaaagaaaggaaaaagtcaaatttttcttgtttgcagatgatataatcttgtatttgcaaaaacctaaagatttcactacaaaactattagaactgaaaaacaaattcagtaaagtggcagagtacaaatcaacatacaaaaatcagtagcatttctatatgctaacagcaaacaatctgaaaaataaatcaaggaagcaattccatttacattattacaaataaaataaaatatctaggaacaaacttaaccaaagaagtgaaaaatctctataatgaaaactatttgacattgatgcaagaaattgaagaggacacaaaaaataaaaagatattccatattcatagattggaaaaatcaatattgataaaatgtccatatttcctaaagcaatctacagattcaatgcaatccctatgaaaatactgaggatattctttaaagaaatagaaaaaataatcttaaatttcatatggaaccacaaaagacccagaataactaaagccatctgagcaaaaagaacaaaactggaggaatcacagcactgcaggaatcacagaactatagtaacaaaaagagcatggtactggcataaaaacagacacataggtcaatgggacagaacagagaacccagaaacaaatgcatacatctacagtgaactcactgatcatcagaaaaatgcaaattgaaactacagtgaggtatcatctcattctggttcaaatggcttttatctaaaagacaggcaataatgaatgctggcaagtatgtgcagaaaaagaaaccctcctacactgttggtgagaatgtaaattagtacagccactatggagaactgtatggaggttcctcagaaaactaaaaatagagctaccatatgattcagccatccctttgctaggtatatgcccaaaagaaagaaaattagtatatcatcaaagagatatctgcactcccatgtttattgcagcactattcacaatagccaagatttggaaccaaactaagtgtccaccaacagatgaatggataaagaaaatgttggcacatatacacaatggagtactacctgcccataaaaggaacaagatcctgtcagttgcaatagcgtggatggactggaggacattatgttaagggaaataagtcaggcacataaagacaaactttgcatgttctcactcatttgtaagaactagaaattaaaataattgaactcatagatatagagagtagaatgatggttaccaggggttgggatgtgtgtgtgtgtgtgtgtaattactgggtacaagaaaaatataattagaatgaataagacctagtatttgatagcacaacagggtgactacagtaaacaatgatttattgtacattaaaaaataactaaaagagatcattggaatgtttggaacacaaagaaatgataaatgcttgaggtgatggattttaaaaaaaaagttgatctcatgaagatagtagaatgatggttatcagaggctggaaagggtgggtggggagatgcacagaggttcgctaatgggtgcaaacatagagttagatagaagaaataagttctaatgtttgatagcacagtagggtgacaatagttaagaataattttttgtgtatttcaaaatatctagaagagaagatttgaaatgttcccaatacaaggaaatgataaatgttttaggtgatagacattctaattatcctaatttggtcattacacattgtatgcttttatcaaaatatcacatgtgctttaatatgtacaattacatatcaataaaatgtattaatattggttcactaatcatagtaaacacgtataataaaatgggaactttcagcactgtctgctaaatttttctgtaaacttaaaactattttaaagaataaaatttattaatttaagaaataagctaatttttttaaatgaaattaaaatcaaacgtttgtgaaatgtttgaaaactctgaaacactttgatggaacccaggattttggggaacataacatgagaactaccggtcttatcaacaaaaatgattctgaagttgattcaatttccatcacaggaatcctcacttttcacagtagtgtgggactcataaggactgttcatgctgaaatcatgcaaagtgatcttaataatcaacggggaaaactacaattgtttagtgacctttcaaaattttttcatgaaaatgtaaaaaatatctcttgttggttataatgaatagggaagtgaaaaaagtagtaacaaatatttatttagtacactgcaatttaaaacattagaaatattgagatttaaagtgtttttctaaagaaaacttaccaaaataaccactgctaagaatttttcttcctctgtctctaaattcttaactaatatcttaagatatacaggttggtcttacctacttatgggagacattttggaaggtgcactttaaaagtatttttatttttcaacattgaaaaattttataggtatgaacgcttcaatcatttcattataggaaaaattccccatgatttttttttttttttaaagaccttggtattcacccttcgagttacaattgggacaactgggagagggggaagagttggagtgggatgaagaactaggaggggctcgacagctggaggtctagtccacttagtttttgtactggaagggctcatcaccagtttcattgagaagacacgtgcggatgagggcttctgtcaccgaaaaggggtcacagttggtagaggggtgatggtcttcaaagtaacccttcttctcctggccgacagtccagggaatgcatatgctggcgctacgattggctacaccagcagaaaagttgttgatgttggaggtttcatggaatccagttaggtgtcgggccttgtccaggcctcctttgggatcacaggcacagatgtggtactggtgtcgcttgcttaatttcttgatggcctccccagtgtatttcagaccattctcctcccacatggccttggtgctaaagttggtatggcagcctgcaccattccagttcccaggaatgggcttaggatcaaaggttgctatcacttcaaagtcttcacacacatgatgcaagatgaaacgagccacccagagatgatctcccatgctgattccttcacagggtccaatttgaaattctcactggggaggcatgattggcattagtccccacaatcctgactccagcatacaagcaggcgctgtaatgagcctccacgatgtccctgccataggttctgtctgctcccacactgcagtaatatggagtctgaggccccgggaagccactggaaggccaaccaaaggggtggccatttgtccccatgagggtatattcctgctccatgccaaaccaggggtgctggttgctcatcacgtcgattatccgtttacaggtgtgcctcaaattggtctctgcaggctttcgattgtacttgaaaacttcacacaataccagcttgttaggatccttacggaaagggtccttaaacatagcagcaggaacgagatacatgtcactgttggagccttcagactgtaaagtactatagagccatcaaaattcccctcaggcaactcttccacacacttgggctcactgtccagggtccaggtcttgcagtgcagtccttttccagtaccatcgatccagatatacatgacccggactttctcaccctgaggcagggatatgtacacctgcttgatgcctttatttaagtgggaacatgctgaggtggtcatggtggaaggtgttctgggtgccgagcagacgggccggtaaaggtaggccgcgagagcgaggtgaggagaggagaggagaggaggcctctgtgctgctcacacgctccgctcttcacccactcttgactctccctcatgatttgtgttcacacttttgaatattctagtattcaagagtttctaagttttttactcaattcagtgacattcaaaaattttcaaaattatggaacaatttgcataagaaacaaggacgtttctttttgcaatattattgtccgtgtacatggcaagtatgtatttctctttgaaaaattatctttttaagttgcatagtgtgtaatagtggagataatgctcccacgcactctctgaactaagatttaataaaacatttctaccttctccaaaaaaacttaccacacaaacaaaccacacacttatcaagaaaaatatgaatagcacttaccttctcatggtataacttgtaatatggcatgaacagcttttctatgcctttgcaaattgtcatactcctaagttttgattatcttctaacatttcatcctttgtactttcaatgttatgacatatctctgagaggtactttaatgttaagtttttgctggcatcacttcctctaacatgaggtcatcctttcctcatttataagatgattgtcttcactacattcctctcaccttatatctagggtttcttagagggtggcggtatcactcatggtcagctattttttctataactccatttacattagattcaaatttcacctcagcatcatcaccctttggatgaattactgttgccagggcaatgggttcctaccccgataaaagagtagactcctgtagttgacaggtccaccagaatcacaagtggtggggagggggaagtttctcaaatagacactacatattcatgatagattttgctcctatcacacattgtcataacactatttatagtgatagaggattgtattagttcgttctcgtgctgctatgaagaaatatcccaaactgggtactttataaagaggtttaattgactgacactctacatggctggggaggccttgggaaacttacaatcatggcagaaggcacctcttcacagggaagcaggagagacaatgagtgctgaacgaaggcagaagccccttataaaaccacctgattttgtgagaactcagtcactaccacgagaacagcaccagggttggtggtggggtggtgtgggagggggaccgcttccatgattctgttatctccacctggtcccacccttgacatgtagggattattacaattcaaggtgagatttgggtcgggacacagagccaaaccataacaaggataccacccctaagaggacgaatccaatcatcaaatcttaagctcctttctgcacaaatcaccacaattctgtttgtcaaagaatctttccacctccatggttcctagtcattatatcccagacgatccttaccttctgatccacaaaagaaatgtccacatgttccatgtctggacttacctgttctctgattgcaatggaaacaggtgatacctgcctctgatcttctttactttgtgaacccttaaaatttccctcttggcatttctagctttgatacttctgtgcaggttttggttctgcctactgttttggtgttaatgtttcttgttcaaaatatgaaatgaggactacctacttcaattttcattcaaggatgaaaaaaaaaaaaggccaacctgccaacatggactagtgacaatatgcattgtaaagaaaatagaactatcatccctgaagacttggaaagacatgctgctgaaaatgctttgactaggaaaagcagacgcacatgttaggaactatgatatctgcttaatgggttttcaataaaataaatgtgtctggtgaaaccccgtctctacaaaaaatacaaaaatttagcagggcatggtggtatgcacctg

SEQ ID NO: 97135 - DNA, 30992 bp, Homo sapiens
aattagccaggcgttggtggtacgtgcctgtaatcctagctacttgggaggctgaggcaggagaatcgcttgaacccgggaggtggaggttgcagtgagccaagatcgcgccactgcactccagcctgggcaacagaacaagactctgtctcaaaaaaaaaaaaaaaaaaaaaaaaaagtagcagtggctggaaagggatttcaagaagggtaaggaacgatacaaatcctggagggtgtggcacttcccccccaaccccctcctccaagaggctttgctggcctcccatacaagatattttggggacacaaaggcacatgaggctctgccaagtttatggttcccagcgtggtgtgggatcagggaggcaccctgtaggttcagcggtccagatgtaacacacaggggcatgggggtggcagacctgggggtcaggcattggccctgatcttctctggaaggaatgaccctaaatggagcgagaagcagagcttagacacctggcggccacttcctgctcaccttaggcaagcgccttcctctttggctgtagttttgtgcctccacaagcccttagtcctggagtcagccagatctgaggttccatccaggtgtgatactgatgcttagcctcaggctagtgccttcaccgctaactgttgttcgtgaaaggagcgctgctcacctgagaggagggctggaggaagtgagagaggcagagtaggagtttatccagcccagtttctttatcgacttaattttctttgcctcccttcttggagggagtgagggtgaagaagggaggagggtatcgacccgctaatgagcacttttatttacagaacgctttttatatagtctcttctggacacctacagcagccctgcaaggggaggcaggcaggggtaggtaggctgggtcccactttgtgggtggggacaaggaaggggcttctctgttaagacaaagtggcagagacttgaccccaggtcggcaggcttcaagttggggctgtttcccaaggctactgctgtgggtggggtgagctgtaagcaagcccaggggctgagggaaaggtcacggctccatggtgtggctcccgggctgctgtatgggactgaaaatccactctgcctatctctccctcccagggctgggagcttggctgagggaggagggaaggtgcagggctgcctcttcctggctagggttaaggggttgccttctggggctgcctgctctggattccttagtaaaaggagaaagcgccagacagcttttcctggccttaaaaatccacacctaccagtggcctgagggatgttaactctagtagttgagtacaagaggtcatctcatccattccccagcctcagtctccttttccagggaggctcagggtggtcaaagaacacaggcgttgggggcagaccaatcagacttacctttgctgtgtgtcctgaggcaagcgacatcacctctctgagcctgggctccccagcaatgctgagagaataatctcccctgctttgtgaggattgaggaggataaaattcttgagagcacctgctgtcaagtgcctggtgccgcaggttatgggaatgggggcatgcctgctgggggcagggagagccagaagccttcagctagacttgggaagagaagcatgggagcctctgctttctggcccaacgtgcctttccaccaactggctgttctttttttttgtttgtttgttttttgagacggagtctcgctctgtcacccaggctggagtgcagtggtgcgatcttggctcattttaagctccgcctcctgggttcacgccattctgctgcctcagcctcccgagtagctgggactacaggtgcccaccaccacacctggctgattttttttgtatgtgtgtttttagtagagacggggtttcaccgtgttagccaggatggtctcgatctcctgacctcgtgatccgcccacctcggcctcccaaagtactgggattacaggcgtgagccaccgcgcccggccaaactggctgttcttgaaagttctctggcccaggttcatctcagcccttcccacagttcatttaaatgccccagacaggccctgagctccccttgcttcaccccgtccagctggcccagtgtgggaggcccgctctacagaaactccctgacttcatctttactcagaaggggtgccctttatgtaataagaagaacacagtggggctgtgtcatcagggatggggacaacaaaacaggattcaacccgttgtgctttcaaatgcacttcaatccagcccactgtggaaacattttaaagctgggtttcttgggaaagaatgccctcgatgccagctgatccattgttcctcgttggtagggtgggcacacatcttagattcaagtttccaggcaaagcaggtgaaacacaacaggaagaaattgctctaattttatacgttatatgcaatcaaacttccttttttaattcattattattatatttttgagacagagtcttgctctatcacccaggctggagtggcatgatcacagctcactgccgcctcctgggctcaagtgatcctcctacctcagcctgtcaagtagctgggactacaggtgcatgccaccatgcctggctcattttttttttttttctatagagatggggccttgctatgttacccaactcctgggctcaagcaatccttccatctgggcctcccaaagtgctgggattacagatgtaagccaccatgcctggcctttctactttattttcaggctattcaagtgaagcagtgggagtggagaaggaagaaagaaatctgtaactggtgatcagttgattgtaaacaccactgccaatcaaactcgacttgtactaatagattttggaatcctctttggccccggggtgaaaggaccaggacatagctggcgtgatgatgtaccgaatcgtgtgcctgccagggtcactgggtgcttttagctgcagtagttagacttccccacacacctgtgaggtgggtgaggtttactttttttttttctttgagacggagtctcgctcttgctgcctaggctgcagtgcaatggggtgatctcggctcactgcaacctccgcctcacaggttcaagcgtttctcctccctcagcctcccgagtagctgggattacaggcgcatgccaccatacccggctaattttttatatctttagtagagacgggttttcaccatgttgaccaggctggtcttgaactgaccttgtgatccacccacctcagcctcccaaagtgctgggactacaggcgtgagccactgcatccggcctaggtggggttttgtccccgttctgcaggagggagactgaggctcggaggttcagggcctgcttggctgtacccagccccagtatgtgccttggccacactagtcagatccttcccctcccactcctgccaccctgctcctgccctgtcccataatccaggttgaatgggggtggggatttggggagcaaggagggctcaaagagatggagataggcctgtgtcaggccaaagtgcaggttgggcactgggagtggggccaaccatagagcccccacccctgccagggtgtgggctgctcgaggaagacaggagtggcctggggcatgtgtgagattggcctgtggcctcaccctgtgggtggcaccagctctggccatggctttcccctttgccccaattcctgactcttctgaagccagatttggccgagggccctcactgggtactgagacagttccagaaaggactctagagccagccgagtccctccactctgcttccatccaagttcttggaggggaccaaaaaggcccacactgtccctattctccccctaccccctccatgggtggcgaagtggctgggggcgcagcatggcagggtgggtgggccagcctccaaagccagcgctttccttgtgccacccgcttcgtgcagcagccaatacgcagtggatactctcatttccatttttcctatggagaaactgaggctcagagagctgacataacttgctccagtgggatttgacctcacatctgacaccaggtcacttgctctttctgcaactgtgtgcttaacagaaaaccagaggccccgatgtaatcctgggtctgccttcatctttctgtgtggccttaggtgagccgtgttgttttgccaagactcagcggattcatctgtaaaatggggacatatctgattagttatgtggttatctgtttagcatctgcctttcttgttagactggaatctcccagagggcctggctgtgtctctgcctttcaccgctgtgttctcagcacatagcatttgcaataagttgtcccatttgctcttctcaacatggctgtgagataggtatgtaccactgagcccattttacagatgagaaaactgaggttcagagaagtgaaatgatttgcccaaggtaaaggttagtggagctgagactcatgccgctgtcttctcaagcaggtgtgattttgggcatctctacttcaagacaggtgttaggagaggagttgcaggcatcttaagtcatgagaaatgataataggtggggctgggaataaattgagctccaagcagagcaaagatgttatttttatttgcaaagctatctatccttccagctatagctgatggaatcctccaggccccattagtccccacccctcatacatcccctaagctgtgtcctctgccctgcccaggactggactcgggccatatccgtggtgccgtcaacatgcctttcatggacttcctgactgaggatggcttcgagaagggcccagaagagctccgtgctctgttccagaccaagaaggtggatctctcgcagcctctcattgccacgtgccgcaagggagtcaccgcctgccacgtggccttggctgcctacctctgcggcaagcctgatgtggccgtgtacgatggctcctggtccgagtggtttcgccgggcccccccagagagccgtgtgtcccagggaaagtctgagaaggcctgagccgtgacctcttctgcttactgtaactgcggccggtttagtgaccccatgacttacagccggttcttacctcttaggtgaaggagatgacatgtttttagaattgctgtgcaaggctcaccctctctctgtcaacactggaataaactttgccttttctgagtagtgtgtttgcctgcctctctctgggctccatccttgcccccaaacttccatctctttcaaactccggagactccaccaaggacagagaccaccatagcccctctggctggggaagccataccgaggacaccactttcacccagttttggcagaaacagcctcctgctgtcccatgtcaggtggactctgtcccagagcatgctgggtcctaccaggaagacaggtgggaagggaaccagaaagccagagagctgaagccccagctgctgtagccccagcctcctgggtaggggcggagggacagctggctttcccaatatgtccatagaggtgtcacacagacccagggcctctcagaagaggccatgctcaggagcaggtgaaaggaaggtggcctctgtctcgagcaccttttctggctcagagtaagaccccctggggagcagtggagggaggggctggagaaagagctttggccctgggagaaggtccaggctctggcaggtgaatcaggaagccacagtagaagaaagcaacctgatagcttggccccatgtggctggatttcaagtttcccagaaacagcctctcttagacctcctttggggttgcaagaagaattccgggccccacctactggggactaccggctccccactatccagccttcccagtgaagacaggatcctggagggccggagaccaagtctgtccttggcttggcattggggcaaataggtgctcaggagatgctgaggaggttggttttggggctggcaggttgggtgatggggctgaatgctgaggccggtgggacctgtagtggtgggactggtagtctggagggttgacccctctcacttccatgccactaacaaaacagtcctcttcccagctcacatgtggctcagatcctactgtgggaagaagaagcaaatatacacagtatgtcagatggcaataaggtgcaatggtagaaaaggttggaaaakaggagtagggagtgtggggtgggctgggatgctttttaagaaaagrtggtctgggaaggtgagcagagtcttgaaggaggtgaagaggcaagccatgtaggcatgtgggggaaggaagttgcaggagaggagagggaacagcccgtgcaaaggccccgaggagggactgtgcttggtgtgcccaaaaaacagcagagcctggcatggcagggacccagggagcacttgggaaagtgagaggagcagaggtcagagaaaaatggtggacaggttgggtaggrccttgcagataaatgggaggatgtcagcttttactgtggttgagctggaaggttttgtttagaggggtgacatatgatctaatataggtcttaacaggattgctgggctgttgagtgagaagactgtcagaggatatggtggactccagggtggtccccatattatctgccccctcgtgttcatgccccgtgtgaccctctccctttcactgygggtgggamccgtgacttgcttttaaccaacagcctacggcaaaggtgatggatgccacttctgtgactatggtacacaacattgtaatgccccatcttgcaaggggactccctctttgctggctttgatgaagtcagtgtcatgttggtgttggggggcccacatagcaaggaactgaggatggcctctggctgacagccagagasagcctgagaccctcagtctaacagactgcaaggaactgaatcctcccacagccacatgagcttggaagcatattcttccctagtggaacctcagatgagactgcagccctggccaatacttggattgtagcctgctaagaccccaatgcagagaactcagctaagccatgagtagacacccgacccaaagaaactgtgagataacagttgtatgttaagcttcgaagtttatggcaagattgtcgtgcagcaatagataatacttaggcaagagatgagggtggcttggaccagggagtagggggagttgtggaggtggacgaaggcatccaaatctagtgtacttcgaaggacttgctgatgggttgcttgyggaagtagcttagagttttgtgatgtctctctctgtgcaaggcaatgtgctacattttgcaaaaaattgttttattcgcccatcacccttatccttagtgttgggtgatatctgtttcacatgtgaaggaagttcagctaaaggacttggccagtctcttatctaataagtgacaggcccagattctggggactccaagtttaaccacagcactctctgtttcctggggaaatcctgaaaggctgggcttgcaggaggcgttcactatacccactctttgtccaggctgagcaacagccagacaggaatgggccagtgctggcaccaatgacttctgcctccttcttctctgcagaaaagaagtcacttaattttgttgatctccttctgtagcccttgttgtttaggaataggagagaggacccttcctttagttttactcccaggtccctgatccctgggtgtccaaatcagacagctccagatgcatctttctccttccccattgacctcgacctacatttatgctgttatacacatccatgcctttaatattctcatcccttcaaaactgttaagttcctaggyatccttcaagatccaactcaaatggctctttcataagtccttcctcctttttcctacacagagctagttcttctccctacttagtgctttgagctcccaagaacatcttttgcacttggtagcatctgagccccctgtgcctggcacacctggcatgtagtgggggctcaactgacattctagagtggatgagagagtgaacaataattgaagcccctcctgccttttcctggcctcaatcctggctttctcctggcctcttttccctacgggtgggcctatcagccctctgaggtaacagagccctgtgtatagtgatcaccatggcaactccaatgaacatcttggggagggccacttcccagcaaccatccattggtcttcaccagtagttctgcagtggggatctgcacttctgggcttcagcacacatcagtgtggttcacgtgtttcctgctgttatgaaagagattggagaggtgaggcagagacttatgaagggccagggttcttccaggacatggggtttcatcttccttctccccattcagagttgcttgtgagtgaagactgcctagactggacttaccttcccgccctctttgaccaaagtctcttgggatctctctctctgggtcagaaactggaagtgagtccacacttccattgtagcccgtccagactgctgtggactggcagtgcactgggacgtacagagctgccgtgggcacgtcaggttggtggctggggataggaggagaaagaaaacttggagctaacttgaacttcacctagcttgaagatgtgcaatttaattttagccccacctggtgaagtcctgtgtcttttcggagcctcattttctccatctgtgaaagaagataaattagtagtgtctccgaacaccttactgggtatttgtgaagaccagactaatttaccagatrtgagaatgcttgacatggacttgtgttagttatctcttgctgcacaacaaatcaccccaaaacttagtgggcttaagacaacatttactatctcacagtttctgtgagttgggaataccggtggagtgttggtgatttttctgtcccagggtctctcacaggctgcaatcaaggtgttgcttgggtctctagtctcatctcaaagctcgaccagagaaggaacccattcacatggcaggatccagctactctggagctgttggcaagaggccactctgagttccttgccctgtggacctctccatagggcatctcacaacagggaaactggcttctgtcagagaagatgagctgaggagagctgcagagagtgtgtgaaaaagacagaagtygtagtctcttataagttcatcatggatgcaacatccctcatttttgccacattccattcatcactatgtccagtccacaccaaaggggagrgaattataccaagaaacagggatcattgggagccatgtmaactgcctgccactctctgccctctggcccccaataatgtacatcccttccacatgcaaaatatagtcatcccctcctaagatctttaaaattctcatcctattaaagcatcagtttaaaagctagaatctggtcatataaatcagctccaggtgtggctgaggctcctccagtgtcgttccttaagtacagcttctcagattcaattcttccccatcatagatctgtgaaactaagtaatttgccctgaacacacctaacatacagtgatgtgataggcataggataagaactagtgacattcctattcaaaattgaggaaaatggagacatggagtcaatgttccatagcggttttgaaatccagccacacaaatgttggacattccttgattaggtttcaaggcctggggataattctccatggctctcagctctgccttctggactcttgcatccactctctgacttgtcttttttatttttattttttgttcaatggtatcttttcattttgtactgtctctatcccttttacccgaagttgccaacattttgctgatgttatyttctcaacagtaaaacttacaggggttcactccattgaacaaaagtcacacccctttttaactgaggctcctgttgaggagccttaagcttcctagaggtcctatggttctgttaagaggatatatcaggcatctctttaatctctttaaagcaccctttgtttgacagagtaataccctcatcctttgatctttctgaagttttaacaacaggtcgcacagtcacactcctgggcacactttccagacagccttctgaagctatttcttaattttagcatcttttgggatctggaaaggatgagacttcagaaccattaagtactggcatctttttgtttaacagtcccttcttcaattcatcaccttcctctcacatttcactacaagcagcaagaagaaagtaagaggcaactacmatcttttctttggaactctttagctaaatcattcagttcattagtcacataactgcagatgacagtgtcactgtttctgccactacataacaagggtctttcttccactatttctagtaatatattcctcacttccatttgggccctcactcacwgcatcttccaactccagatttctgcttaaaaaaaaaaaaaaactgtttaaggtgatttaggctttttctatcatgcttctcaaaatccttatagactctgaccaycgcttggttccaarttcagtcccaaatttttaagtatttgttatagcaacaccccactgttagtaccaaaatatgtattagctatgtattgctgcgtaacaaatgaccataaagcttagaagtttgacactgtatgtttaaaacagtacaaatttatgatctcagaayttataggagtcaggatgctcacttggctgggtcctctggcccagggtatcccacaggctgtaatgaaagtgtcatccaggctgtgttctcatatcaaggctcaaytggggaaggatccactttcaagctcattcaggtgtcaggattcattcagttmttcaaagactgttggactcagggcttctattctttatgagcttttggccagaagtcaccctcagtttcttgctccatgggctgctccacagggcagctcaaaacayggcatttgctgtcatcagaatgagcaaaccaaggagaaccagggaaagaragcaaacaaaacygaagtcacaggccgggcacggtggctcacacctgtaatcccagcactttgggaggctgaggcgggtggatcacttgaggcyaggagttagagatcagcctggccaacatggtgaaaccctgtctctactaaaaatacaaaaattagccagatgtggtggygcacacctgtaatcccagctactcaggaggctgaggtgggagaattgcttgaacttgggaggtggaggttgcagtgagctgagattgcacyactgtactccagcctgggtgacagagtaagaccctgtctcaaaaaaaaaaaagaaagatcacataagaaaacaaaacacaagcacgaaagctgcagaggcttttgaatctacccctctaatttgaatccaaggccttagagagaagactgagtttacaccagagcaaagtgtgggttcctgctcttggttctccttcgtggtggctaagctgcttcccttccctgascacgaacgaccattcagcaaatggatacaatcctatttgcaggaagacaaatggttkccaggatgggagccggggcaatgggcttcacagccaggggcctgctagggtctcctagggtggtggtgatggggcagaagaggaggaggagatraaaggaaaaattatgaaggagtaaaatgagcccagggttccaaggctgcttgagataggtctttgaggactggtggggtggggtgggggtggccagggcttttcagagagggcagaggctgcagaagtccaggaggcagcccctgtgccaggggtgatgagtgaatggggcagaggctccgtgggtctgggcagtgccagagggcaccagrggcagcttaggaacctctgatcaggggcgggcagacagccacaggccttcctgktcagctcccagctcatccttgttcacagaaactctgtgtgttatctgagacgatgaaacrtggtgctttgtttacaggactaagcttggaattgcctgtcccacagcaagaggctatggagctgggccacggagcaggtaggacaggcagaccagggatgtgctgaatgcacatccaggcttctggagggactccctggggcagcagggcaccggccctttctcctcccgctccgtcttgtgttggcctccagacccaccatcggcccaggcttcctaggggggcattctgttggaagacagaaggaaaaaggagggaacggaattactgagccctcccatcctgccatgtgcagggattatcaccccgatatggtctccatcctgagggggtgactcaggtgctctgagtcttgtgtgtaccagaagggcagggctgtgggggaacatggtgaggggcctggcctcaatggatgggaggtatatatggggttacacgtgagccaagagcaggggtagtgtagcccaaggagtggaggggagtgttccaggcaggagaaatagctcaggcaaaggcttgggagggagagacggctggcacttttgtggagtcccgagagcaggcactctgccctgaggacaagaggaaagattttgatgcaggcgtgactgagtcaggcccgctctgagaatggtccccaggggtgagtgcaggttggctggggctggcaggtgggatggggagaagagagtccagtgagttggggcagcgatcctgctaaaatcttcctccaatgacctgaatgcccaggggcttgttaaacactcagattcagggcctttctgatgcagcagctctgagagggtcccaggcatctgtatttttaatgagagcctagggaatcctcatacatggccacatttagataaactctgcggaggtttatcatccaggggatatgatggtttagcttgggctcagaggcctgacggccamgatgcccagcccttatgtatcttttaagaggacttgaagttttggagggaagaccaccaaacatatttacagctgtaatctggggtggaggatgaggccaggctgtgaggagacactgaaggctgagagcaagagacctagagaagcggaggctgtgggcagggacgtgggagacagggagaggcggggaggagagagcctgggaggtggctgggatggtgccacttctcagccctggcgaagggaggaggtaggtattggggagcagtcttgcattggaagcaaagtctggaagtcccatccaactccagtacttcccaggcatgtggcttagccccaggaacgcctctgccagtgccgctgctgccagattctcactgcggagagtgagggggaggtttcaagatggaaaagtggggaagggaactatccaaatggagccagggacatgaaagcacagacaggccaagtcccttgcttgcggtcacacagmtaggcctcaaggmgggacaggcttaggcggcagcccttgttgccccaggcaatgtggactaaccctgcccgtgggaggcacgcaggctggcctctcttctcccattgtgtctcctaatttcccacccatgcctctggttcctgcgcttcctctccgtccctctccccttctctggctgtggagctctggggctctttgtctgtccgtttcccctcctcacccccatctctgccccctccccaccctctactttctgcccttgtctgcgtgtctctctccctccccctctgtttctctttgtcctgctcaggtacaaccactttcaccagggcccatctgaatgacaaggagggccaacaggacttggacccctggaaagcggcctacagttccttggacacctccaagttcaagaaccagggtctgtcatccccacagcccctgcccctgggakccagcrctcaaggcagctccctagggcagtgccacttgaaggagattccccctccacccccgactgctgccagcagggattctctgggcatggacccacagtccaggtccctgaagaatgcgggctctcgatcctcctcgagagagaacagggccacctcgggagagggggctcagccatgccaggggacggatgacggtcccagcttgggggctcaggaccagaggagcacgcccacgaaccagaagggcagcatcattcctaacaacattcgccacaagtttgggagcaatgtggtggaccarctggtctccgaggagcaggygtcatagcaggggccaggagggtgatgcagagtcttataatgaggacataagataaactcactcttgagtacagagtccctataataataccactagaaagcagtatctcctgagcatctgctgtgtgccaaacactgtgcactgtttaaacttcacatataacaagttgttacatcttcccagcaacccatgaggaaggtactattattgtcctcattttatagataaggagaccgaggcttagaggagttaagtcagtcaaccaaattcacctaactgtgcgagacgagggtgcaaactgggtcggcagattctggaactctgrtccttaatgactttgcagttaaaagccttttgtgtgaattggatgttttccatgtgatcaagtctcccaaagaagacagcatttagtggatggatagcatttattgggaatcagaagacgtgsgtttgaatcctggacctgatcctaaatgctggatgactttggataagttacttaccctctctgggcttcagtctccacatctgtaaagcgaggcagttgcactagatcaggctgacaaatacatggtgagcgtatcacaaccctcccagcctgcattcatggcagacatcactagtcaatgccagcactcttttccacccgatatagcattccaggcagtcattacaaatcaactgacacgagataaaattcatctaccgtttctggtcaaatgctatgttctttctgtcctggcattctgagacatatttttaaagccaccatctcaaccctcatagcaactgcattgtgtggaaggtcaggcaggagttattgcttcctttataacagatagtataaccaagtcccaaggaggggctacgatctgcttgggtcacaaaagctgggggtcaggcttctcctaggctccccttccactctgtcatcttaaagtgcagtgaccccaccaccagcaagtctggaaggtcacagtcttgacatgttctgccccacttggaggaacttgtcccaatttgaggttgactctgtggtcaccacctctcaccaccctgcccagccttgggagaagtcctttctctcttcagccaccgttgtccctggctggaatcaagaaatccgtgttttctgcccatctgtaacttatgtcacaagtgtcattgagccagcaagtgtcagagctggaagccacttcaaagaccatccagttccaccctgccttcacattttacatgtagggaaactgaggcctagagtggagaagaggcttgctgaagtcaacagctgatatattgcagaactggaactcaaacctaggtgtcctgcccctggacctgggctcagcttctctgtgtgtcagtttccctattggtatgaagagggagttggcctcattgaaagttaagcacccacccagagctgccctgtgtggtgcctcagttgtaggaggcaarccagggctctgtgccctgccagccatgtgaactgggtgatctttggtctcctgaggcccgctttcctcatttataaaatggtgggaagagtggcaccctatagagaccccccgycccaatgttgcaggtagcagatgctcaatgcttggaagaggttttatgatcattaacttgatgccccccacccacagcagtgcagatgatgagaggagttggggctggggcctttgtataccccagctccccagccctgtgaataggttgagggctgcaggctacaggtgggatcggggtggggagggcagggtcaagggaggaggagttggagggagatatggggcttgaaactgcttttccatcccytgtctgtcatccctgcctccctgctcaggctcaaaaggctattgatgaagtcttcgagggccagaaaagggcaagctcatggcccagcaggacccagaatcctgtggaaatctcctccgtcttctcagactactatgacctcggctacaacatgcggtcaaacttgtttcgaggtcaagtcaaagggcaagggtggggccrtgaacacccatggtctcccaggcattgggcagggaaggcctttggggtttccactccatatggggtctaggaccccagggcacatcttcaaggacacttatttcatgcccatgtgtcctctatgtcagcttgcgagtgctgggaacatccagtcccctgtccttgatgtgtggatgattcatcccagttggcagtcaggcacctctggtccctcccctcccatccccccctcccctcccctcccccctcccctccccttctctcccctcccctcccctcccctcccctccccttccctttccttcccttcttttgttttttgaagtctcactctgttgcccaggctggggtgcagtggcacaatcttggctcactgaaatcaccacctcacaggctcaagaaagcaaccctcccacctcagctacccccctgcccccataagtagctgggaccacagatgcgcgccaccatacctggctaatttttttcttttctgttttttttttttttgtatttttgstagaggcaaggtttcaccatattgcccaggctggtctcaaactcctgggctcaagtgattcacccaccttggcctctcaaagtgctgggattacaggcatgagtcactgcgccctccccacctcttgttcttaatctgccagtaggaggcccaggacccagtagaactgggactgctgctccccacacccctagccccatcccaggcacctttggtcacagtgacaatatcaagtttctttggttcaaagctcagctcagccactcactagctgggtatgaccttaggtgggatcctcaacctctgcaagcctccgctgccttctcggtacagtggggatgataatgagagtatggcccttgctgggtcattggcaggactttatgaagtgccacatgaaggtgcttggccgaggcaagtcgtgagcactcagtagctgtcaggctatcatttttcttctccagagcctggaggtggcgccacctgggaagaaaggaagggtgggttggaggctctgacatttacacagggtttccattggatcagtgtagtcctgtttggttggggtggggagagtgctattagctccatttcacgggcagrtttcagatcayttgccttagaactctcagtagtctgcattgtgcctaggactcaaagtcaggtgttccttctgccttcaaagcctcatagtcttttcttgaccactaagtcacctccctagctatgatcctgttcccagggtcttctggatggctcagatgcctgtcacagcacgcaggggcttctctctgccccacattctggtttggcctcattgcaaaatgaggctgtttctggtatggctccttcctctctcctcactccaggccctctccagtgctcccagggcctgacaaacctcttccacctggctcggatccctgtcacctgaggaaccagrtgcccactggaagcctttctggagttttctctgagcttggagaagggatggtgtcrgggaggaaagcgagaatacagttctgcttgttctctgttcygggccttccagatcctgccttccagttctctctttaacaactatcggtcaccaaatagctattccatacaactttgtatgataatgtctacataaatgtaaaataatctatttttaaaaatgtccatgtcccatcatcccacctgggaagtagaactgtgccaagggtgtgctggagctcatagcaaattgcaccagctcacaagaggcaattgtctctctgaactgactggcacataaatgctgtcttaaaattggccatgctagtagtatttacactctggaaattggcaaacactatgaatcagggcttcaccctgccacacagtgctgtcagtgtgcccatccatctgtccctctctgtttccacccacccagggttagcctttatacttgctgtttgaggttggtgaggctggtatggctgcacaggagtgaggcagaagacatcagaggaaacaggctgggtcgtgaagcctgctggaaggtctttactcggagtgagatgagaaaccaagccgggattttaagcaggagaatggccctgtttggctcaggttaagggctcactccagttgctatggggagaatggacataggkagatggggcagaaacagggaaactggtaggaggcagctgcaaaactccagatgggacagatgatggtggcttggtgttggaagctgggctagtgcacctgcgctatkttggaaggcaccattgtgcaatatagcagctcagggaggtaatggtgaaggtggcctgatgtagtaggattctggatatttgtataaggcagagagaaaagaatatgctaatgaatagattttggggtgagagaggaaytaacgttgacttcaacgttttgacctgaacaactggaaggatgagatggctatttactgaattagagaagctgccagggggagcaggttgagggactcctatcctatgctaaatcgtagatcatcttttacacagtcttctaaaatttttagttttgcttttcacatttaactctttaatccacctggggttgatttttgtttttagtatgaagtagggattcattttcaaaaactgtagatggcttttgtgagttttagccatttaagaaagtagtaaaactgaggcttgaggaaactttaggcagcttgcccagctgtataaagagtgagatgacgagctcaggcattccttgggcatctgtgtgcccarccctcaaaataatggaacaacaacaccagaaatctttccccagtagggattcwttttcaattccttctttatgtgggttactgactgcctcagtaccttttattgaataggctcatctttcctcccggtgacctgcagtggtacttctgttatccatcargttttgacacatgcatagatcagtttcaggctctattctgtccattggtctaatattacatttttaatcaccaaagtattataagtagcctgatatctggtcaggcaatactcccactaccacccctccaccaccatcaccagttaatgtcttgggtttctaggccctttactctcccatacaaatgttattaataaacagaaatttccatgaaaaaccctgttgggattttgattggaaatacattgaatctacagctcaatttaagggctgttgtcagctttataatgaattttctaatatatgaatatggtatatacctccattaatttaagtcttccttcgatatctctcagtaacattttgtgatttttttttttctataaacatcatgcaggtttttttgttagacttactcaggagaatctctttttttgctgctgttgaaaatgatatctttttaaaattatattttctaactttgctgctgataccgtatacacaaatgcaatttttgtttttgtatattaatctcgtatccagaagctttatgcagctcaccaattaattccagtaattagttattgattctttaggagtgcttttgaatagtaataatggctacatttatgcatagtatttaacatatgccaggtactgctctgagtactttatatatatattttattctgcacatgaatcccatgtggtaaatgctacaattcccatttttttttccagataaaaaataattgagtcatggaaaagttaaataacttaattaaggccacacagatagggacggtcagaattgggatttaaaccctgccagtcagaggctagagtttaaattcctaaacactaggcttttcttacctttatatcagcatctggctgacctctctaggacaatggtgtmtataagcaggaaaaacaggcatccttatctccttcttgattctaacattacatcattaaatataatatagtctgttttcatactgctgataaaaacatacctgagactgggtaatttataaagaaaaagaggtttaatagactcacagttccatgtagctggggaggcctcacatcatggtggaaggtgaaaggcacgtcttacacggtggccgacaagagagaatgggaaccaagtgaaagaagtttccccttataaagccatcagatctcatgaaatttattcactaccatggaaacagcatgggggaaaatggagctggctctgggtcttagtctggctttgggtgtcctgagagtttrgtgaacttcatgtggggagagtattggcatggccgtgagtcctgggtgtataggcttcccacagacagggctgcgggggraccatgtgggatggcctgcaggaatatggccacggtgagtggccctttgtgtattttctgcctcccaactcaccgtggctccagcttcagaaggaggtcagagcagaacacccctgtgggctaacatgaaggtcctcatctgctccatgcagcagggctgggaggggagagtagagggtcagcccatggtaaggacaagccacatacaaatcaaaaccttggctgggctcacctggacattgtgtctttgagtcacagagcaggcagaatggtagcttacgtcctgtccttttccctctgtgtccaggtatccagggatccctgaaccagcttaccaaggattttctttttttcacttctttccattgttggaattctgatttcctctatttggtgtcttcctctttcttggtttgctctcttgtctttggggtggattccatctcccagcttgatgtgactgtcattggagaacacagccctgtaatgatttcaatcctttgaaattgttcagatttgctttagagcccagtagatggtgatttttgtagatgatctgtgtgtgcttaagaataatctctccaggccgggcgcagtggctcacgcctgtaatcccagcactttgggaggccgaggcgggtggatcatgaggtcaggagatcgagaccatcctggctaacaaggtgaaaccccgtctctactaaaaatacaaaaaattagccgggcgcggtggcgggcgcctgtagtcccagctactcgggaggctgaggcaggagaatggcgtgaacccgggaagcggagcttgcagtgagccgagattgcgccactgcacaccagcctggtgacagagcaagactccatctcaaaaaaaaaaaaaaaaaaatctcaggaggcggagccaggcagatcacaaggtcaagagatcgagatcatcctggccaatatggtgaaaccctatatctactaaaaatacaaaaattagctggcatgatggcgcatgtctctactaaaaatacaaaaattagctaggcgtgatggcgcacgcctgtaatggcttctcaggaggctgaggcagaagaatcgcttgaacccgggaggcggaggtaggcggaggttatagtgagcggagatcgcgccactgcactccagcctggtgacagagcaagactccctctcaaaataatgataataataataataataacaatctcttgggtaagrgattctgcatttgtctatagaacaggcttgttaataatttctgcacaaatcttctaatccttattaatatgctttgcttgatctattagttactaaaatatgtgtctttaaatctccctctataatagcagctttgtccatttgtcctgtggttctgtcaattttgccttatctattttgagattatttcaatgtagcaagttcagaatcattacattaccttaatgaattgcaattgtttttgtttttcatcgtgccgttgccctacagtctatttcacctgatatagttagaccagactgcttttggttagtgtttgcctgggtatatcttttkctgttcttccatgtttatcctctctttgtgtccttttaaatatgccttcaatgatacatacctggaaaacattttctgtagtgtcatcatctggtttttaacgaatgggtttaattcgttcatattgattctcgttactgatatagactatttgggtttatttccatgatcttatttttcgttttctatttgtgctgctttttcttttcttttcttttctttttttttgagatggagtctcactctgttgcccaggctggagtgcagtggcgcgctctcagctcactgcaagctccgcctcctgggttcacgccattctcctgcctcagcctcccaagtagctgagactacaggcgcctgccacaacgcccggctaatttttttttttgtatttttagtagagacggggtttcaccgtgttagccaggatggtgtgctgctttttctttgtggcttctttttctctctctttttggatttacatcagctttcttatttttctcaatctgatatttgttcttttctactcctcttattctttgagtggttacctttgacatttttatatgcgtaattaacaaattataaagttaatctaggcatttgtgttttcctgaacactaagggccttagaaggctttaactttggctgggcgccgtggctcacacctgtaaccccagcactttgggaggccgagatgggcggatcacaaggtcaagagatccagaccatcctggctaacatggtgaaaccccgtctctactaaaaatacaaaaattagctgggtgtggtggcgcatgcctgtaatcccagctactcaggaggctgaggcaggagagtagattgaacctgggagatggaggttgcagtgagccaagattgagccacagcactccagcctggagacagagcgagactccgtctcaaaaaaaaaaaaaagaaaaaaaaaactttaattaactttaattactctcccgacctccacctcagcttacatgttattattttatagaatttatatatgtattatatataggatttagatatatgtatatatagaatttatatatatattctcggcctcccaaagtgctgggattacaggcgtgagccaccgcgcccagcccacatctttttatttctttgtattgcatcctaatattaatttctttaggtatatcttccagtttaccattttctctcagctttatttgatctgctattttatctgttaattgaatttctttttaaacttttatgatggcaattttcaagcttatggaaaagaagagaacttagtttataaatagatgttgcatataccactcagcctcaacaatgattaatacatagccgatcttgtctcatcttttctcccacccatccactcccacccaagattatttcaaagcaagtcccaggcatcttattgccatggagtttaattttttttcaattattatgtgtttcatttctgaaattccgtttgcttctcttactaatctatctgctctttctggatggtttcttactctttgcttatatttttattctctcttatggtttcaatcattaaatataggttttttgtttgtttgtttgtttkagacagagtctctctctgttgcccaggctggactgcagtggcacgatctcggctcactgcaacctccgcctcccgggttcaagcaattctcctacctcagcctcctgagtagctgggattacaggagcccgccaccacgcccagctaatttttgtatttttagtagagacggggtttcaccatgttggtcaggctggtctcgaacccctgacctcgtgatccacccgccttggcctcccaaagtgctgggattacaggcgtgagccactgcccccggcctaaatatacttattttgtattctgtatctgatcattcaaatctttgctaatttgggagattttgtcctttggtgtttctgctgactcttgatcattgcaacgtatctgcttgtgcatgtttgaattttgaaaacagagataagttttcctaagttacaggtattagttgccacttgctagatgtcttgatgaatgtccaataattttgtctttccaaccatgcaaaaaaatctcatttcttggtatagttgaagacactgaagctcagagaggttaaaaatttctctgaggctatactacccataaataatggagtctgggtttgaacccaaacgactttactttgaaacmcttcccactctccttccgttccacaatttaccatccgtagaggaaactgacacccaatataagccatggagtacccgactgccactgaattgggcacttggggtttcttcatggtattctacaggggctgctgaggagacaaagagcctcatgaaggcttcttacacaccagaggtcattgagaaatcagtgagggacttagaacactggcatggcaggaagacggatgatctgggtaagtgaggagctgckggtgatgggaggcagggactgtcctccaccagcagggtgtgttrgctctaagggtcagagagaaaccagagcaggagacagagccggggtggacttggaagwggtacgagtcatccctggggtctgggcaactccagagactgccagatgatctaatctgtgctggctcttctcctgctcgctgtagggcggtggcaccagaaaaatgctatgaacctgaacttgcagaaagcactggaagagaaatrtggagaaaacagcaaatccaagagctccaagtactagttttgacacagtagaggtgtcttctactcaaataaagtgctaacaataaggaaaggctcaggtccgagtcctcctgtgcttggtgcctttcttcacactggagtagaggccgatatgtggtgttggagagaccaactgggggaagatagaagccctggggtcccaaactattccctagtcctccctcctgcacacacatgcacacacacgtaccttcatccattatcccaggaaaggacatgagagctgggcatgactctgtctcaagcccagggtgcctggcttctcccacatgccctgtgtgagggggtcctatagtggacactgctggatcttaccctacatgctcttcctagaagatgccaattattcccagacatccattcctcccccacgagacacggacttcagaggagttggccacacacatttcctccaatctagtggcgggtttgattggtctcatggtgattctttacccctaccccaaccccacctcttgcacgtgattggttcagtcatgcacatatgactcaatttgggccaataagatgcaaggaaacgtgtggatgcgtgcagccttctgggaaattcttttctcagctgggaatgctgagagagcatccatctttcctgatgtaatgaatgaggaaccatgcagcccagaccactcctgccagacacctatgaccagaggaattgcagaccatgcagcacattctgggtcctccatggcctcgcagagctgctccatcaacttggccagaagctgccggcctctggacttcctgtaatgtgagcctgaggtctcctcattgtttaaggagccaaaagcatcctcagaccataggggcttggagccccagggaagagtccccagataatgggttctaggtcagacggttctgttttccagttgatcctgaagcttttcacctgatgagtctctaagcccgcagcacactccaccccgagatcactgacttgcaccctcagaccgtgctctacccatgggttatttattatttgctgtgttccaaaacaccaccaaaacttgtgggcttaaaatgacatgatccttaatttgctcatgattgagcaatttaggcagggctcaggaggtacggctcatttctgttctgtatagcatctgctgtgaagacgcctgctcctctcccatgcctagtgcctcagctgggatgagaaccacagtggggggctggctgatcatcactctctctcatgggacctctcttcgtggctcacttgagcttcttttggaatggggactaggtttcaagaaggagccgtctcaggggacaagattcaatgtgcaatggtttatcaagccttgcactggcttgtcaatgtccctgtggccaaagagacatatggccaagcccagactttgtgagaggggactacataagagtattactgtatgcaggaatggttcattggcgacctcaaaataatagtttgtcctggtggtcatcttgcttttgaaagatcaaaagcgagaggaagaatcaaaatcactactgggagaagaggagacatgttcctacttctccctcaactgcccctcctcccacaaaagggaatgacttacttacttttttttctttgtcttttctttttttttttttttttgagatggaatctggctctgttgtccaggctggagtgcagtggtgtgatcttggctcactgtaacctccgccttctgggttcaagctattctcctgcctcagcctcccgagtagctgggattacaggagtgcaccaccatgaccagctaatttttgtatttttagtagagatgaggtttcaccatgttggccaggctggtcttgaactcctgagctcaagtgatccacccgcctcagcctcccaaagtgctgggattataggcgtgagccaccacgcccgtccaggaatgacttaaaggtagggttggatcagaatgcaatacagggaagtgaatctgacttgatttaatattcatcaaatatctaattatgtgcaaagtgcagagttcagttcaacttctttactgggtacctagtttctgcaagacactgttctgggcactggaaacactagactttgtcttcatcaactactatgtgcccatcacatgtgacacctgaaaaaatgagccacccaaagtcttgtggctaaagcagactctgtgctgttctgacatagaaatgataacgtggcaaatgattatgtgccacatggtttatatacggaactgtatttcatccttacaccagtcctcagagctgttatcactccctttatgaagatgaggaaactgaggcttggagaggccaaggaaattgtacaagattatatgcataggaagctgggggtgcaaacccaggaatttctatccaaagtcacttctactctaccaggcaatcgtactgcagtgtacgtagtatgacagtgcagtgcctaacagggctgagtgtttgtggtgcctgttgacggagcaccacaaacactcagccctattaggcacggtgaaaacagcaatatgaatgcaatacaatatgcaatatgcatatgcaatatgcaatacagtccagacctcagagctttgcagtctgcaggagattgatgtggaagaagctgccttagagacttatctacccatgatatgcccctgcccagccctgaccaatgagctggacgtgcaaaaataaataagacatggcgcctgtcctcaaagagttcagagtctggcgagaagacaaatacatcagtacatagatgctcagaagtcttacacatgcggtgagacgttcacgtggggccagcaaaagcacaaaggagaacgtggttagctctgcctgggatggggtagggtgccggtcatatggtaggcttcatagaggaggtggctcttgagatgaatcatggaacatgaataaggatgttcaggtggactggaagaggcacagcattccagacagagggcatggtatgcatgaaactgcagcatgatgcatttggcaagctgcaggtagcttgttaagcttggaaggtagggctccaaggaggaacacagaggtgaggtaggaaacagagagtctatgcctggaccgggctgtcctctgtgagggccttacatttgagactcagaccttccttctaggaatttacagtctggctggaacataaagagttaatgactaaagaagccacacggaagagttgaaaagatgctcattatccccaataatcagagatgcaaatgaaaacaatccatcaggttggcaagaattaaaacgcaagtgtagatgagaatgagggaaatggaaactttcgtacccttgatgaattatgagccaagagccgtgggtgagtatttagcaaaattgaaattatatcatacaacctacaatttccatttctacacagcctagacaaacccttgaacatgtatatagggagtgcgtgcaaagatctccattgcagcatagtttacaataggaaaacaacctggcaagtattaaaagttcttgttctcagctgggtgcagtggctcatgcttgtaatcccagcactttgggaagctgaggtgggcacatcgtttgtggtcagtggtttgagaatagcctggccaatgtggtgaaaccgtgtctctactaaaaattcaaaaaaattagccagacatggtggcaggtgcctgtagtcccagctacttggaggctgaggcaggagaatcacttgaacccaggaggcggaggttgcagtgagccaagatcgtgccactggactccagcctgggcaactgagtgagacaccatctcaaaaaaaaaaaaaaaaaagtaaaacaacctaaatgcactttagctggacaatggacaaatgggatgatctatggcagtggaaagaaatgaaccacatctgcatgtatcagcataggaagatctcacaatacatcattgcgggtgaaaatgacaatctgcagaacgacccctacagcaggaaatgtactgttgatgtagccttcaaaagggacacacaaaaccagtccattgcttatgggtatgagtatggaaggtgaatgggaaggatgccacagaaatccaacttcacattacatttaatttagtgcttttcagaagcagctttacaagacagagctgccaaaatgctttctgatgagataactaagatgctagcaagagtgtctgagaaacacagtgttggtgagctgatctaaagttaagtgagcaatttcaatgttgacataagggaacaaatgtctcatgttttatgactttgtctcagttaaagattcatcctcagaaagaggaaccctttttaattaaacattgaatgttctagagagagaaaagctgtaatcttggcaaagtaaataaaatatgcgtagattttttttaacttaaagaaggtcttttatttcactggcgtggttcccaatagcattccttgttcttcatgttcctgaggtccctagatagcggaattcacaatgattcttaactttcaaggaggcacaggggccaggtagtacgtaagcattaattcatatagtgaaaaaaattggtcacacttcaattcatgcagggcctcatttgcccattgtgactcaaaaccatcttcataatttctgtaatatccgtgtaccactcaagggaacaccaataaaatcaatttaggttgctttaacccaggatacagtagatgagcctgccatggctataatcccagtccagatcgccccctggtggcagtatgtccaaattgcaggcccagagattcggaatcataagcccacaatgtacatgctgtggagggacagagagaccatttagttacatctttctaaccgtgctttcctactcccactccagttctatgttatagatgaggaaactgaggccacattgaacacatttatgcttaaattgcaagagaggagtttatgttgcctgctttgcaaatccaaactctcaatgatgtcagagtggtaggctgatctttttcccattctccctcccagaatcatggactctgtaataaacaggaactagaaggagccacagcagaggaaaattcaaatgcaggtttgctgtagaaaggcaacaagagactctagctaggctcgtgttcttgggaagaccacctcgcttgtcagagccagttctcatttctagagtactaacagagggacagttccacctctttcagaggctattgtgaagattacctgagaaaatgcatgccatgtatctggcacagagccagttatagacacgcaataaacacttatgcttttccttcctcaaggccctgtttcctaaatatgtttaaaagaactctgtggcatgttaacagatgttctatgaaaaattatcccattgtcaaataaatcaggttatgctggtttacataacactatacagattgcttttgggcaagacttctcagaactttgaacacgctaaaattgattgcgtcactccatattattatacatagttttcgctgttcctcacttcgcctggcacagacagagaaaactatgaacatcagttacaacggctgtgattatgacaatgattttattaaaattgcaggttcagaagcctgggaggtcagccgaggaagaggagtcctgttttggggggtggttagatggactgatgtgttaatccagatgcccattaccaatgctcatggagaaatgtgcctgccaaaggcctggccacttccttcctctggcccacactgcacgcatcgcacttgggaagcagataatcagagaagggagtaagcctactctcaggacaaggggttgagtttctttcattgctggcattgcatgaatcagtctgagtgagggcatcttagcctccctgtgctgctggcttccctggtttacgacaagcaaaaggggttaggtgacctgtccagggcagtggcaggagccaggcttgggcccctcctatccaaatcccttttcaaggggccagtatatatatatatatatatatatttttttttttttttttt

SEQ ID NO: 97136 - DNA, 38360 bp, Homo sapiens
atgaaaacatccccaggtattaaaactaatgtaaatttatatcattttaaaacagtacctaagaaggaaaaatttggggatgaaaaaagccatgactgtattttagaaggaggttcatcttctgcacctctcaatggcaatgaaataatgaaagaaagttgtaataagaaagttacctaaagaacaaaaaacaggtaaaaacaaaattatgatacacaaaaagaagaaattaaatgttggtattcaccaagccagttccacatttcttattcagatgaccttgcaaaagacaatgtgccaagaatgcaaggtaataatcaagacctcattacttttgaagaagcaaattagccaaatttggttctgatccaatcaaatctgataatggttgtactgaagatgacacctcctctcattctgatgacactatgaaagaatgtctttaagtttctaatgagctcgttgaaagtgaatctcataaggaaaagactgctaaacaggttagcattttttttcttttattgttttcttaaatctaatggagttttgcttaaatacatattttatatttgttctaaattctatacaatatacacctacataatacacatattctaatagttttgatcaataacatattggagtgacaaggcaaaagccttgataagtggccagccatagtgtctggcagagttgacagtttccagaggccatagtactatatacagtaacttatagttgacttctcaaattagaggattttttgttgttgtttgttttgagatggagtctctgtcgctcatgctggatcgcagtgaggcgatctcggctcactgcaacctctgcctcccaggttcaagcaattctcctccctcggcctcccaagtagctgggactataggcgcgtgccaccacacccagctaatttttgtatttttagtaggacgaggtttcaccctgttggccaggctggtctcgaactcctgacctgaagtgatgcacctgccttggcttcccaaggtgctggaattacaggcgtgagccaccgcgcccggcctagaggattcttttataggaatctacacaggtaaaactattcaaattcagttttttgtgaatttttattaaaaaatttgtccacactttgttgcttagattcctatggctttttgagaaacatgctaaatttgcctttactgtgctgaaattggataattcttttttccactaggcttcagaaaaggatgatatgttatattacaaaaacacatctggaccaaaaaagagaattgcacactctggcaaatttgatgtgaattatttagttcctcatctccccgctgctcaaagctttatataaagtgcataccttgttatttccagttttattattctaggactatttatccttttgtccactagggggcacaatttactggcagtcggtacattgattcctgcttgttagcattttcctgtccgtttccccaccccacccacagatctaacattttcattgaaagcaggtatattatcattgggtagcctcttaaccataaattttaaaagtcgatcctcattattcacagattccaaatttgcgaattcacctactcagtaaaattgacgtgtaaccttaaaatcaagacttgctgtgcttatgagatcattcacagacaacgcagagtggcaaaaaatttgaattgcctgacatgcacattcccagttaaggctgaagaaggtgatagccttcttgtttaagctcacataatgtaaaatgtccttttgcagtccgtttagtgccaggtttttttgtatctgtgtgctttttgttggtgattttgtgctgaaaattgccgctcattgtagtgctgtctagtgctcctaagcataaaaagaatgtgatgtgccttacagagaaaatatgtgctagataaactttgttcaggcatgagttttagtgctgttggccacgagggtattaaatgagatgtctgtaaacatgacacatatgtaaagcaaggtgatactttgattgaccaaaaaaaaaaatgtgaccagagacttacctgaacctaaccccatgtttgtttgttttaggagcagtggattcagtgttcactaaatctgagtttgtggtgacttacagagtataactacctgaaataacaagaatcgactttagttttcaaaataattataaacttttgtaatttataagtgctgaagttcttttatgacataaaaaagaaattgaagaagcagttcagtgagtagtattcctttaacatttttgtgtttaaaaaagtgatatttaggccaggcgtcatatatcatgcctgtaatcccagcactttgggaggccgaggcaggtggatcacgaggtcaggagatggagaccctcccggccaacatggtgaaaccctgtctctactaaaaatacaaaaattagctgggtgtggtggcgcatgcctgtaatcccagctactctggaggctgaggcaggagaatcgcttgaaccagggagtcggaggttgcagtgagccgacatcgcaccactgtactccagcctggcaacagagtgagactccgtctcaaaaaaaaaaaaaaaaaaaaaaaaaaaaaagatatttaataaactttctgcatggcagagtctatacttccaaatcacaaatgaaaacctgaatttcagttcttcatagaatagttgggtgtccttgggcaagttatttaatttttctgagcttcagtttccttatctatgaaaggaaaattgagtgcctaccccagggtcaaatatataagtacttaataaatgctagttaccttcctcttatttcttacaaagtttttttggtggctaacattatttccctttaactgcaaatgttgtggtgtttatagttttaattttattgtgctatgtaaaaaaaaaaaaaaaaaaagccaggtgtgatggcgcgtgcctgtagtcccacctactccctgttaccccctccccaattcttgtatataaatagtttttggctttgtaaataactgtccttaaaattctcacaagttgaaataattggactaaagataaagaattttaagatttttaaagcattctttaaaaatcttattgtcactgtattgccttccagaagggttttcacaatttatagtccttctcaatgtttcagagttctcttcccacaaacccttacctacgatgcacattataattttttaaagcctgcaaatctggttaaaattttattgccttatcttatattacatttctttaattattagtgaagctaaacattctttcccatgttccattctcttataacaaatgttgctgtggagaagtctgcttgcctgctatttcaccctttgagtcgtgtgatacttttgtctgcctatccaaaggattcttcctttaattctgaagtccaataactttagtagatatgtcttattagctattctattttttctgtctacatacaaagtatcacttttgtatgaaatttaattttttagttaaaactttcttaaattatgtttcagtagttgttcagttttattatttccttatttctggggatactccaactatgcatgcattggattacaatcagcgttacaaatgtggtcaatttactgtgtggctggctgtaaggcccccaacgagcttctatgatagaagaaaggcaaaattatcaattttatcaatttttcatcattttcatttgttttatgttgctgccctataggcctcaaccaataaagaggtcattagaccattcagggtaccagtcccactgctaacaagccccactggaatcattcgggcccagcaaagcagtacagataaaggctgccataaagaatgggaaggcttttattgatgccacttcagaacagaagaaaaatgcatctacatgtccagactctcagagccaaaggaaaggtttggaaaaaagctttttttaaaaaaaagtcacttatttaagaaatggaattttacttcattttaaaaaatatttcttaaaaatccacatgctaccaagtatagttgaatcaatggcacagttttacatgaaataatatgattgatatttaaatattttgtctacatcttttttttttttttttttttttttttgagacacagttttactctgtggcccaggctggagtgcagtggcacaatctaggttcactgcaacctctgcctcccaggttcaggtgattctcatgcctcagcctcctgagtagctgggcaggcatgtgccatccatcacacctggctaattttttttttctttttttgtattattagtagagacggggttttgccgtgttagccaggctggtctcaactcctgaccttaaagtgatccacccacctcggccccccaagtgctgagattacaggcatgagccaccactcccagtcaatactttgtttatctctaaatgctacacaatagtagtactattttgcaagtattttacaattgctttatcaattatctcaattcattcttctgaattatactggagttggttattgggatttttttgcatttgaatgttgttttcttccaggttgcatgtttcaaacctataaaggaagtgttgtgaaattttgaattaatgattaaactctaatcatctgaggttaatgtcattaaaatttatcttttcttttccttgttcatgaaaacttcttagaatattcactcacaatggaccttcatctgaatgtagttctttcaagagaaaacccaactgcaaaaccaaccaaatcgttcattcctgtcaaaagtattgcttctctttctgtttaggtattataaactaagtctgaacaccagaattatatttcatcatatcctgcttacatatagagtccctggaagagtggctatatttttttctgaagctttcaaattcagataaatgccagacccaatagagaaaaatgtcaacattttttagcttaccgatgaatatagttattttcattatgatgtaatttgtgtcactcttagatgttttgttgattctatccttggaaatagtaggcattgttttagacttaaaacatctatggctatggttaattgaaacctactcaacattttttaaaaggaaagtttcaagctgtgtccagtgagggtgtatatttgtttatgtatatgagacagagacagctctttactaaataatgccatcagtgatatgatgttgtagccttctttaagtaattcttattctacttgtggcagtgattttcctcccctgttttccaattattttgtagcagaaaaccacctggcagttttaaggttttctccatccctaaaatgtctttgtattacatgcaaacaattactgagaagtatgatgttggcttggttttatttttcctcaaaggtgaagcagattaactgattttaaagttctctgggtctttttataagtccttcagaagaaatgctaagagtttatagctgggatcactttaatattaagtatactcaagtcactcagaaattttaagtccaagcatttttcttaatgatgtgctatcagaaagacattgggatacatagttgaaggatggcaacctacaaactttgctatatttgaatcagaggagcaaatcccagctttaggaatctggttgtggaacagtagtacaattagatgagtgatcagctatcattgcgtacgtgcaggtagcagcacagatgtggcagtctcacttctccattttgtgagtttaagtaattttatactttgtgtttattctacctcttcaacttgacacttgaaattacttttcaatttaattttgatataactgacctaaggtagttttacttcttccatatactcagtaggaatattaaacagaaacatgtcttcttttctctaataacacttttatttttaacaagaggccaaaagatacatttaacaagatggctcatcggaaaagacattcagtaacatcagaattcttatccaaagtacctgatgaagtaagacaacgctacatcaacctctttgttgagaagtatttgaaagtttgtaaaacagaggatgaggctgtttacaaggttggtattatataatgtaatttatctgaagacacacacaaaattattacattgaataaaaaactcatggagcacaactagcaaataactttattcattttctcttcattacattttcaaaaccaggccatgggactggttcagttccttcttccctcttggatgacttttatggtctttttcagttaccaaaagtcccctggttacttctagggggtctgggcagggtgaggactgtctgctagctccatcctctgcacaggggagccccatggctcagaaaacctaacaaaggaaacatgggtacagcagtggtaataaggggcatgcttgtcttattcctgatcctagggggaaagctttaagtctttcttcattaagtacaatgataactatggggtttttacatataacctttattaagttgagacaattcctttccattcctagtttgttgagtgcctcattgtgttagattttgttaaatgcttttttcttcatctattgagctgtcacacaggttttatcctttattctattaatatgatacattgcattgactttytgtgttaaaccttacatttatttgataggtgttcttggtcatggcatataatctttttttatacgttgctaggttacatttcctagtattccattgaggatttttgtgtctatatttatcacagatattgttctgtagcgttttttgttagtgtcaatgactttttaaaattgctataaaatacacrtaacataaaattaccattctaaccatttaagtgtacaattcagtggtatgatgtrtattcacaatgttatgaaactatcactactatccatttccagagcttttttatcatttcaaacagaaattctgtactcattaaataactccccattcctctctcctttcagtctctggtaatctctattctactttatgtttccatgaattttcttttcttttcttttttttttttctttttttgacagagtctcactttgtcaccaggctggagtgcagtggcgcaatctccactcactgcaacctctgccttccagcttcaagcgattctcctgcctcagcctcccaagtagctgggattacaggtgcatgccaccatgcccagccatgtttctatgaattttcttattctatttatctcatgtaattgaaatgatatactgtttgtccttgtatgtctgacttctttcatttagcataatgttttaaaggtttattcatgttgtagcatgtattcaaattttatttatttttacaactgaataacactttacggtatgtataaccatacttttgttatccattttgttcactcaataatggatggagattgtagttttctttgcagtaatgattctgtctcttttttggtctcagggttatattgacctcatagaataaattrgaaagtgttccctcctcttttattttttggtttataagacagccttagctttcacttcctgcttgtgcagggcctcaaggttggccactggtgaatgaataggattttctcttttcccaggtcttaaatggaacacttgttaaacccaggattatgtcagagcctttacaaatctctagggtcatctagttctccaagagtttcttttaaattcctagccaaactattgtttgccagactaaaaccatagccctagctagctgtgatattgccaggatattgctattgtttcagttgcaccctggagatagggttttttccctccatactctgaactctgagtcaaatcaaatayccacaacaccctaggaatagagatttttcagggaactggttttttgtttgaatattgatagtgctctagcaataatgcttttagtatggttctaaaaaagatatgtctactctgttggctctcagggccaacctttcacaaccgtggcgccactaagctgggaagggaagggaggtaggaatttcacagaacccactgtgttaccaaggttcagtagtttctcttagacaattttcagtttgttctgtggctttagttattagaattttgaaatggttgatttttagttgttttgccaatatttttattgcttttgtgggacagtaagttcatgaaggttctcgctctactattccagaagtctgtgtcctctaggattctatgtaggttaaagaataatggcaaaaataaaaagggacaatatgagcctcttatgtgttgttcattttcttccagctttgtcttttttcatcatgtgtcttttcttccttactccctctaacctcccatggctttatctctgatgatttagtgtaatgagaagagtcttggtggcatttgggtacacctaggttcaattaccagctctgtaacaataagcaagatgtttcctttgttcaagcctagtttcatcatataaatcagtgatgacacccattctcatacagtcataatgaagattaaatgagaaaacatttaatrtgcttaaaacaaacctgcatatactaggtatataaattaataatatatttaatatttattatcataacactccatttgcttgtttctttcatatttcattccttttccttttactgacttaatgacccttggtataaaaataattatgtaatggtttcaggaaggtaaattttatagaagaaaaaatgaagatcatgtcctccatttgctgtgtaatcctaagcaaattaaccactttgagccttagtttcttttaaatggaaatagtaatatatgcctctggtatatttggggctggctgtgagaatcaaatgaattgatgtatattctcagctttgtataggtattgcactatataccgtataccaatatacagtagccttttgtctatgaagcaagagtatctggttcttgggttggagtcatagaactgttttttttcttctttttttgagacagaatctctctctatcctccaggctggagtgcagtggtgtgatctcgactcaatgcaacctccacgtcccaggttcaggcgattctcctgcctcagcctgcggagtagctgggattacaggcacctgccaccacgccgggctaatttttgtatttttagtagagatgtgttttcaccatgttggccaggctagtctcaaactcctggcctcaagtggtccacccacctcggcctcccaaagtgctaggattacagacgtgagccaccatgcccggactatttttttttttcttcttaaaaaacaaayacaaaatggaaaataagttgcttttcattggtggcacagttttcccccattcattaagttacataaatattttgccatattcattatattgcaaatgacatttcctgttcataggcttttggcttaatatttaattattcaatttttgacctaggctaaaatagaaaaaaaggcaatatatgaaaggtgtagcaggagaaatatgtatgtgaacatagcagtaaattatcttaagaagctaagagatcaaggtaatttatttttttcaattaatcaagtgataaaacctgtaattagtacctgaccctgaatactttttctcattagtagggccatctttagcttataccaaggaatttattttttaaatagtctctttagtggaatgtgtaggtggtacttgtggttgaaaatcagctgcatttgaaattggatgtataactataaccttattgtcagaggttatcactgaaatatttaaacttgttttctggttatgaaagtaactcacttctatgcggaatagcatttctcaaccttgttttcgttatcgtccccctaagaaatctttgcagacattattttttctatcacctccctcttcccccttcataaaattaagtgccgctttaggagatacacctaatgctaaatgacgagttaatgggtgcagcacaccagcatggcacgtgtatacatatgtaactaacctgcacattgtgcacatgtaccctaaaacttaaagtatactaataataaaaaaaaataagtgccaagggataagattttattaggtaaggttgaattttgaagaaccatataccatcatagtatttaagattttyttcatccctcaagagtcaattttgctcccttgtgggcagtatcagttccatcaagaatgtatggcatgaattcaaataatatagaaaaacataaagagtaaaaagcagccaagacaactctttcatatttcttatttagacctttctatgtattactacagagatgtatatagttttaaaatttttagtgaatatgataattttatatatacagtatgtctagctattttcactgaataaggtatcagaggccttgtcagttaatctagaatctgttaacatctggatcwatatcatgctttttataatggctacgatattctattatgtagaatctatackatagatattcttttctatagaacttatactaaagatacaaaagttagccgggcgtagtggtggcccaaacacatttggatatttggagtgcttacattttttcctatatgactttttcatatatgatttttttctctgacttttgtagatgattatttcacatagaaaaaaatatttttctatatattctgtgataaatttaagtgtaacctctaacattttctcctacmtgatgatatgtatcctagcacaaattcctgtgcgcagaagcaagggtctgcgtgtttgaaactggtaaatattrctaactgcatccaaagagtttgcccatttatattccccttcgataaagtagaagtatatgtgtttttctcacaccttgccaaagcttatcatttagcctctgtcagactgcaatggtgtagagcaaaaatgaagttagttttttttcttttcttttcgagacacggtgaggctctgttgcccaggctggagtgcaggggttcaatccttcgcctcccatggtcaagggatcctcccacttcagcctgttgagtagctgggactacaagcatactccatcacactcagctaatttttgtattttttgtagagatggggttataccacattgcccaggcttggtctcgtgtgcctgagctcaagcagtcctcccacgtagacctcccaaagtgttgggattacgrgcataagccaccackactggcctgaagttagtcttttttaaaaaaatttattactggcagagttaaagcggttctttttttttctttctctctcttctgcatccctcctcccactcccccgtttcttattggtctgttcatctggaacaacctttgcctatcaccgttttaatgtgctgcaaatccattcctcagtttatcgtttgttcttcagccttatttatgaagtattattagatagatgtgattgcaaagtgtaatcagtctctttgatttctgggttttgtctcagactattccaatctcaagaacataaactatcaatctatgatttttgtggcatttcttatgtatgacactttaggggtttttgggttttgtttgtttgcttgcttgcttgtttgttttgagacagagcctcactctgtcacccagactggagtgcagaggtgtgatctcggctcactgcagcctccgcctcctaagttcctgcctcaggctgtcaagtagctgggattacaggtgcccaccactacgcctgactaatttttgtatctttagtggagacggggtttcaccatgttggccaggctgatctcgaactcctgacctcaggtgatccgcctgcctcggcctcccaaagggctgggattataggcataagccaccacgcccgacctctttaaatagatttaaatacatgtgttaatatatgcagggtctgttaggttagtcttttcaggttaagctaactcttcccccttctattcatattaaatatagcacatagaaatggaacgtagaggtcttagtatctgttttaaatatttcccatgaaaatagaaatggtttgcaagttgttacagttgtggtaaattataatataaaacatattgactcaaatttagacataatccattatacaaaatgtattaatttgagcaaatatcaagtcttgacatttttaatagttcagtagatttaacttttttcccagcttggaatttgttatgaagacatttggactcacatgttrgatacttgttttaagataaaaataaatattttaccatgcttatatcttttttaatgtgctatgtgtttttatggaacagacaagaataatcattaatttcagagaatttcttgtatcttttagtcgtgcctagaagcagtaatgacaagaaaacaatttagagagtaggaacagaaaaataggccacacgcggtggctcacgcctgtaatcccagcactttgggaggccgaggcaggtggatcacgaagtcaagagatcgagaccatcctggccgacatggtgaaactccgtctctactaaaaatacaaaaattagctgggcgtggtgttgtatacctgtagtcccagccactcgggaggctgaggcaggagaattgcttgaacctgggacacaggttgcagtgagctgagatcgcgccactgcactccagcctggtgacagagcaagattctgtctcaaaaaaaaaaagsgggggggggagtgggggaaggaacacaaaaatggtaagcttactgtaataatagtaataagccctgtaattgataccttaaggggaaagtaaccctggtatagtacaaataytaaattattatgtttatgaagggtcaactgcatactatgcatttttkatatccttttaaaaaatcagtacaaatacaccatggaatactgtgcagccatagaaaagagtgagttcatgtcctttacagggacatggatgaagctggaaaccatcattgtcagcaaactaacacaggaacagaaaascaagcactgcgtgttctcactcataagtgggagttgaacaatgagaacacatggacacgagcagaacatcacacactggggcctgtcggggtgggaggcaaggggagggagagcattaggacaaatacctaacgcatgtggggcttaaaacctagatgatgggttgataggtgcagcaaatcaccctgagatatgtatacttatgtgacaaacctgcacgttcagcacatgtatcccagaatttcaagtaaaataaaaaaaaagtataaataaggggaaagaacttacatttaagctatatttggattgaattctcaactattttgcttttttgattagcatgtgttaatttttcttttttggttaacgtatgtccagtcagcaagaccaatgcttctcaaatgtcaaactttccatgggtttgaattacccgggactcttgttaaaatgcagaatctggttcagtaggtctgggagggatctcaaaccctgaatttataacaaactccaaggagcaagaagctacagaaaaggagttattagactttggctacattttgaataaaagcaaatggtagtgcttctcctctaataaagccttacatatgagactgaaaacaaaatagatccttttgaatctcctaatacttctcacaaaataatttttccttttgccaaagcgtttaccaaagagtatctagcaaattctgttagagttttaaataagaaaatagataaaattctaaaagaatccataaaaatgaggggctcttggtctgggttagtgatgttggaaatggaacctgaacttgaactcttttgccatgagagacttgtcgtgtttccctttgtggtccttgattataagcgtttgttgtaaccttgtctgaatattaaggataaccgcatagtttggaaccagaaggcctgggtttgtgtgtcagttgtgctgtgtaaccttgggcatgtgtctttatttttctgagcctcattttcctcatctgtaaaaatgaaatcaatgcagttgcctttctaagttaatgtaaagtttaaaccaaagtgctatgcttactatatgctattactgatatgattcttcccttctctcacccaaagcgtatgatgtcacatggtatacggaacaatgtcggttttgttggtgttgctggatgatggatatgaagacctagaatttttaggccactaccttacttaatcagaaccctagcatttcagatctgaaagggttggtaaactctaaccttaccacaatgtaaagaaagataatgctacataaattttatggaatagcttttctttttttcttagtgctcataggagttattctctatagacatcttaaaaactacttgctaactgaggaacagctacacaaaaataactaccctagaccataccccaacaaaccaggaagtattcttttaaacctaggcrtgaaaaaaacttggaaatgatggtaagtagatggggcccacaattaccctttctacatgctaagactgaaacctagggggcccagtgttctgataaatatatatatatgtttatgtttttatatatgtttatatatatgtttatgtataattattttagtggaaatgagattttttggtcagcatagttataccactgataaaaacatttttgcactgtgtwtcatttcccttttcatttcaattatctaggtgcttaattttatctaagtgatctactttattaagtcctcaaaacaaccatttcaggtaagcattgttattcccctgattacacaaatgaggaaactgatgttcagagaattcaaataacttgtcaaaggtcacagaaaataagtgggasagccaggatttgaagccaaggtgtccaactcctgagctcytactcttcatcactattcatttacatatacaatgccatgttttgaaaactataaattctcactgtgaattattatacaaagatttataattagtcttattttgcatgttctccaaatactaggcataattagttaatatgttcatccccactgagagagaatgctaaacatcacagctgtcaaactttaggttgatgatcagagtatgaaatgcagttatacaaatattctacagtgactagaaaatatttgtcatcttctgcatctttaggacttctcccttgggattatcttcactattagcttttctcrttttgttttattttttcacatcccctcaatggaaggcaatacacttagcaggtaagaatrtggactctgaagggggaagtcaggcttcctaaaggctgttttctcagtgaagtgttattcaaggtctggatgctagataagtcatttaacccctcctaccctctgttttctcattctgaatatgaggataatgataactaccccatcaggttgttgtgagaatccattaaaataatgtatatagagtgcttgacacagagcctgcctcataatctaatctcatcatggatattcaaataagagttgctgttatcaccattattatcactatcagaaccagtctgaggtttattaataaaacaaatattcatgaatgggtctagtgaaaaacgcagatatactcttaataacttaataataaatgtacagtttattgtgggagactcttgaagggataaaatcataaggaagacatggctcctatttcagggagctattatgtactagagtagttgactggtcaagttggttacagtcaagttgtaacactaaaactacaattggctggcactgggctgactttggagctaggtagbggggagggggygcctgtttaagcagcagcagcyctggtgcaataagcaagccacttgcaaattctcccttgagtgatcctgtarcttctcctgttactctgtaatcacactgggtatgtgcttcccacaggatcaagcatgcaaaggcaagtctccacattggytcatttaccttttctctcccatctcatctggaataatcctacttcatgttttgtttcrgcacctaagaagctctgttgtcgatgtggaaaaatatatggtgtgactccctcaggttgacacagcagggtagaagaatgtaactaccaatttggcggagtgttgagtcataaaggyaagtatttggtagttctgtttggtttgacaagccagctgttcagagaagtggaatgaagtattaagttcaatgttcagtacagtccaataaagaaaaaactacatcaactctaaaacctttattgtagatacctgcatctgaccaccacttgacttacccttgcagctcattggctcaagaaccctcaggctatgacaattcttctttttttaagaccttaagtcagtcagctgcctcctgaccttgccctttccacatgccaacattgcagtagtttttgtttgtttgctaattgcttcaattccttgcaggtgaccttgcctaatactttactgaaaaaacaaagcctttgcgaaataatgccctgctcttccctcccagtagattcaccaacatctgctcctttctggagtcatgatggaggaagcatccctgttcccgtcacagttcctctccatgtgctctgtatcctgtcctcgtgcacctactcagggactcaccagactccccttctctataagatcagcatgttctcgacataccattctggtatctcccatttgttttagcaaactaaacctccatggtcccggtctcttgctgcatagctactctcatttctctgcctgtcctccagcacctactcagggactcaccagactctcctctataagatcagcatgttctcgacataccattctggtatctctcatttgttgtagcaaactaaacctccatggtcccaggtctcttgctgcataactactctcatttctccgcctgttgcatatgctycatgcacaacaaagagttgtctatgctagctggctttactctccactcaccactgaagctcacatcagtgrcctcgaggctgctggatctaatagacttgtttctgagtcacttgacttatcttttcagtactgtcttaccttatagtattctcctctctgcttttgtaacaacacccacttctgcctttcttcctccctttccagctacttcctttcaacctcctctgctgaatattcttccttaccagcctctagtggcagaaattctcagagctttgggagccttgtctctccatatcccccttctccctagatgaactgattctttcccatggctttcaacagcctctaactgctgttagcccctaaatgtgtatctctaaagaaacatttcccctggactcccagctttgctgaatatccatctgcctgcytatgtgggtttccctcgggtaccacagcatcacctgcatgaagatgagcttgtgatcctctccccaccctgggrtcatctccagcaccctcaattccctatagtccacttaggtgtatttgttcccctgcttaaccaagaaacctggtgtcatcctcactgcctcctttttgtacaccstttcatctggacagtgtgcgagtcccactgttctgtgtcaaaagcatatcccaaacctcctgcttctctgatctggcccctgccccctcttccaccctttcccttgctgtctttacaccacactttctcccacctttctggagccttcttgcctgctgcatcctcgacttttcacatggctaattccttcttaacctggaggtctctgcttaattgtcacatcctcaaggtcttttccygaccgtactttctaaatagggcctccctcttctgcagcaccctgtctctttcttctatagcagttaattatattttgtaatgagttagtaatctgtccaccatcttcaaaaaataagcttctggagggactgtccaacatttttttctccccatgttcccccagcacttagcacagtttctgacacacgcaagccatcartaaacatttggatgggtgaacaggtaaattatttatgtagatgtggacataactatggataatattgtaataaatcctataaaaaggaaatagaggggaaccatgggaggaaaaatatatgaataaataatgtcatcaagtaaatcagacaagctcaatccatctttaaagcatggagggcttagtttgggaaagtgggagactgtgaattccaagaagacgaacaaggagggaagatgctgaggaagaataagtgtagcaaacaaaccagttgggctgatgggaccatacaggataatgggcagaacagggacttcggagccagcagagctgagagttggggctgttctgctgcttgctttcccgggcacgttacttttacaccctgagcttttcttaccattttgtagaaagggctttgtatggcagtttttactagaaaaactagtgcaaaaactagtgcaaaaactccctggaggcagagggacttgttagggagcaattgggagaatatttcctagggccagacagaagggctcagggtaggtaagggtatggatgaggtggatgataggagtagggtaagaaaagagatatgaagtattgagattattgctgcgaagaacgtgcaaggtgtctggcgaaggatgcaaaagccgaaggcatcaggactttgaaggtccagccaaggttggagccaacatctgtattgtggtctcagtctgcataactgggtgatttttcttgggttrgataaaaatctggatacaggaatggagaaggtggtagttggaactagtcatacagaaggttctagcagaaagaaaaggtcagggagtaagagtagatgttgagaggatgattgaagtggtttgactgtcaaaccagtcaatgcaggataaagtaaggaagccagaggagagctgatgggccagggcaaatgataaaaagaggggaagaaaggtgttcacaacattagcaattataattcaccttcaagcatggcccgtgagaactctgcttatcggaatagatttttgtctattatgcaatatctaaaaaagtaactgaagagaggtgacttaaaaatatttgcacagtasagtccttaaagctctttaagggtcaaagaaaatgcatgttcatgagagttagtcactctgccttgtaaagcttgttttgatttttattttttcggttggtttacagtcctcagtggctttgaatctcaatacggctgttgtggaggtttccttggatcgccccggtgtcaggtcgccaaggtaggacttgtcacccaaagtgctgcctgtttcagaarccaagttgtagcctccaacacaggccttggtgatggataagcttttgaaaaaattaactaattttcagttgatgacattttatgagcctaattgtacttagaaaaaacagtaatttatttgacaatgtttgtttcagcttcatgttcatgaccacaaagaaaacctaaagggctttgtgaagacttttgtcaagttcccacctgctgatggtaatcaccgtgtgtttgcagtaagttgtgagatggtatgttggttttatattttactttactgtggttattatgactgaatgattgtgtagcagtctacctggtagaagggtttccagggccttattccttgacgacacagtgctgcattggttgttcacaaattttcagatgaagccattaaagctgagaagagttagtgaattggttaagttcacgcacctagagygatggagccaggaactgtcctgagtgtcttwttatcggtcaaatttctaaaatatacaaatagtggtaattctactcatcaaattgctgaaattatgtgagtgaaaaataatcagcataaaagctttaatgcttttggcaaaatcatttctrgagacaataaaatctttatagggacttatgttcctttacataagaatcagtgctaaaaagtggggaaaacagaatttggaattacaagacctggaaagttctactagctgtgaccttctgagcaagtctcttagatgctctaagctgtaaattatggagtcagtaacaaccccatagtgactatgaaaatyagatatgctaaaatataggaaagtgctttgtacatgtcaaacatatgaatagtcatctttaataaaacataagataagtttttattccccattgtatatttggaaagaagatttgtggcatttccttatactaaagatagaagacagtattccattttccagcttaagatctttttattattgttattatactttaaattctggggtacatgtgcagaacgtgcagttttgttacaaaggtatacacgtgccatggtggtttgctgcacccgtcaacctgtcacttacatgaggtatttctcctaatgttatccctcccctagctccccacccaccaacaggccctgatgtgtgtttttcccctccctgtgtccatgtgttctcattgttcatatcccacttatgagkgagaacatgcggcgtttggttttctgttcttgtgatagtttcctgagaatgatggtttccagctttatccatgtccctgcaaaggacatgaactcatcattttttattccatggtgtatatgtgccacattttctttatccagtcgatcattggtggatatttgggttggttccaagtcttcgctattgtgaacagtgccacaacaaacataagtgtgcaagtgtttttatagtagaatgatttataatcctttgggtatatacccagtaatgggattggtgggtcaaatggtatttctggttctagatccttgaggaattgcaatactgtcttccacaatggttgaactagtttacactcccaccaacagtgtaaaagcattcctatttctccacatcttctccagcatctattgtttcctgactttttaatgatcaccattctaagtggcgtgagatggtatctcattgtggttttgatttgcatttctctaatgaccagtgatgatgagcattttttcatatgtctgttggctgcataaatgtcctcttttgagaagtgtctgttcatatcctttgcccattttttggtggttttttttttcttgtaaatttgttgaagtccttgtagattctggatattagccctttgtcagatggatagattgcaaaaattttctcccattctgcaggttgcctcttcatactgatgatagtttattttgctgtgcagaagctctttagtttaattagatcccagttgtctattttcgcttttgttgccattgcttctggtgttttagacatgaagtctttgcccatgcctatgtcctcaatggtattgcccaggttttcttccaggatttttatagtcctaggtcttacgtttaagtctttgatccatctcgagttgatttttgtataaggtgtaaggaaaggggtccaatttcagttttctgcatatggctagccagttttcccaacaccatttattaaatagggaatcttttccccattgtttgtgtcaggtttgtcaaagaacagatggttgtagatgtgtggtgttattcctgagacctctgtcctgttccattggtctatatatctgttttggtaccagtaccatgctgttttgttactktagccttgtagtatagtttgaagtcaggtagcgtgatgcctccacctttgttytccttgcccaggattgtcttggctatgcaggctctttttttggttccatatgaacgttaaagtagttttttccaattctgtgaagaaagtcagtggtagcttgatggggatagcattgaatctataaattactttggacaatatggccattttcacgacattgattcttcctattcatgagcatggaatgtttttccatttgtttgtgtcctctcttatttccttaagcagtggtttgtagttttccttgaagaggtccttcacatcccttgtaagttggattcccaggtattttattctctttgtagctattgtgaatgggatgtcactcatgatttggctctctgtttgtctgttattggtgtataagaatggcagtgagccgagatcgcgccactgcactccagcctgggcgacagagcgagactccgtctcaaaaaaaaaaaaaaaaagaatgcttgtgatttttgcacgttgattttgtatcctgagactttgctgaagttgcttatcagcttaaggagattttgggctgagacaatggggttttctaaatacatgaccatatcatctgcaaacagagacaatttgacttcctctcctcctatttgaatacactttatatctttctcttgcctgattgccctgtccagaacttccaatactatgttgaataggaggggtgagagagggtgtccttgtcttgtgccggtttttaaagggaatgcttccagtttttgcgcattcagtatgttggctgtgggtttgtcataaatagctcttattattttgagataagttccatcgatacctagtttattgagagctttttgcatgaaggggtcttgaattttgtcgaaggccttttctgcatctattgagataatcatgtggtttttttcattggttctgttcatgtgatggattacgattattgatttgcatatattgaaccagccttccatcccagggatgaagcccacttgatgatggtggataagctttttggtgtgctgttggatttggtttgccagtattttatggaggatttttgcattgatgttcatcagggatattggcctgaaattttctttttttgttgtgtctctgccaggtttgggtatcagaggatgttggccttgtaaaatgagttagggaggattccctctttttctattgtttggaatagtttcagaaggaatggtaccagctcctctttgtacctctggtagaatctggttgtgaatccatctggtcctggactttttttggttggtaggctgtaaattactgcctcaatttcaaaacttgttattggtctattcagggatttgacttcttcctggtttagacttgggagggggtatgtgtccaggaatatatccatttcttctagttttttcagtttatttgcgtagaggtgtttatagtattctctgatggtagtctgtatttctctgggatcggtggtgataacccctttatcaactttttttgtctatttcattcttctctcttctttattagtctggctagtggtctattttttttatcttttcaaaacacctactggattcattgaattttttgaagggtttttcgtgtctctagctccttcagttctgctctgatcttagttatttcttgtctgctgctagcttctgaatttgtttgctgttgcttctctagttcttttaattgtgatgttaggttgttgatttttagatctttcctgctttctcttgtgggcatttactgctataaatttccctctacacactgctttaaatatgtcaaatgtgtcctagagattctggtacattgtatctttgttctcattggtttcaaagaaaatctttatttctgttttcattttgttatttacccagtagtcattcaggagcaggttgttcagtttccatgtagttgtagggttttgagtgagtttcttaatcctgaattctaacttgattgcactgtggtctgagagactgttatgatttgcattcttttactttcaattatgtggtagattttagaataagtgygatgaggtgctgagaakaatgtatattctgttgatatggtgtggagagttctrtagatgtctattaggtgcacttggtccagagccgagatgaagtcctgaatatccttgttaattttgtctcgttgatctgtctaatattgacaacggagtgttaaagtctcccactattattatgtgggagtctaagtctctctatagatctctagaaacttgctttatgaatctgggtgctcctgtattgggtgcgtatatatttaggatagatagcagttcttggtgcattgatccctttaccatcatgcagtgcccttctttgtttcttttgatctttgttggtttaaagtctgttttatcagagactaggattgcaatccctgcttttttttttttttttttttttttttttttttttttgccttccatttgtttggtaaatattcctccatccctttattttgagcctatgtgtgtctttgcatgcgagatgggtctcctgaatacagcacactgatgggtcttgactccttatctgatttgccagtctgtgtcttttaattggggcatttggcccatttacatttaaggttaatattgttatgtgttaatttgatcctgtcattgtgatgctagctggttatttttcccagtagttgatgcggttttttaatagcatcagtggtctttagaatttggtatgttttttcagtggccggtaccagttgttcctttccatgtttagcgcttcctttggaagctcttgtaaggcaggcctggtggtggcaaaatctctcagcatttgcttgtctgtaaaggaatttatttctcctttgcttatgaagcttagtttggctgaacaggaaattctgccacttgtttcttttcactcttttttctctaatcttctcaagttgaaaattcttccctttaagaatgttgaattttgtcccccactctcttctggcttgtagggtttctacagagagatccgctgttagtctgatcggcttccctttgtgggtaacccaacctttccctctggctgcccttaacattttttctttcatttcaaccttggtgaatctaacagttacgtgtattggggttgctcttatcgaggagtatctttgtggtgttctctgtatttcctcaatttaaatgttgagttgccttgctaggttgaggaagttctcctggataatatcctgaagagttttccaacttgtttctattcctctcatctctttcaggtacaccaatcaaacatacatttggtcttttcacatagtcccatatttcttggaggctttgtttgtttcttttcactcttttttctctaatcttctcactttcattgagttgatcttcgatctttgatatcctttcttccgcttggtcgattcagctattgatacttgtgtatgcatcacaaagttctcgtactgtgcatttctcagctccatcaggtcatttatgttcttctctaaactggttattctagttagcaattcgtctaaccttttttcaaggttcttagctttcttgcgttgggttagaacatgctcctttagctcagaggagttttttattamccacagttttgttcccttgctggtgaggagttgtgatcctttggaggagaagaggcattctggtttttggaattttcagcctttttgcgctggtttctccccatctttgtggatttatctacctttgtttggcctttgatgttggtgaccttcaaatggtgtctttggatgtcctttttgttgatgttgatactattcctttctgtttgttagttttccatctaaaagtccggaccctctgctgcaggtctgctggagtttgctggaggtccgctccagaccctttttgcctgggtatcactagcggaggctgcagaacagcaaagatttctgcctgttccttcctctggaagcttcaccccagaggggcacctgccagatgccagctggagctcttttttatgaagtgtctgtcgaaccctgctgtgaggtgtctcccagtcaggatacatgggggccagggacccacttgaggaggcagtctgtccctcaaatgctgtgctgagagatccgctgctctcttcagggctgtcaggcagggacatttaaatcggctgaagctgcgcccacagccactccttacactaggtgctctgtcccagggagaygggggttttatctataagtcctaactggggctgctgcctttttttcagagatgatctgctgagagaggaggaatctagagaggcagtctggccgcagcggccttgttgaactgcggttggctccgcccagtttgaacttcccagtgggtttgtttaccccgtgagggggaaaccccatactcaagcctcagtaatggtggacgcccctccccgcaccaagcttgagcatcccaggtcgaccttagactgctgtgttgtcagtgagaatttcaagccagtggatcttagcttgctggactccatgggggtgggacccgccaagccagaccacttggctccctggcttcagccccctttccaggggagtgaatggttctgtctcgctggcattccaggtgccactggggtatggaaaaaaaaaaaaaaaaaaaaaaactcctgcakctagcttggtgtccgcccagccacccagttttgtgcttgaaacccagggccctkgtagggtaggcaccagagggaatctccgggtctgccggttgcaaagactatgggaaaagcacagtatctcggctggagtgcaccgttcctccaggtgcagtctctcatggcttcccttggctaggggagggaaatcccccaacccctttcacttcccaggtgaggcgatgccccaccctgcttcagctcatcctccgtgggctacacccactctccaaccagtcccagtgaggtgaaccggatacctcagttggaaatgcagaaatcacccgccttctgcgtcgatctcactgggagctgcagactggagctgttcctgttcagccatcttgccagccctcccatctattatacccttatttgttcttattcttccatgagtttaatagaatcttccctaattcctttttttggaacgaatcaggaaataggtaactattgatattcataatgacaaaatgagaactgaagggctgacattagttaaaaaacaaaacaaaacaaaacaaaaacctttgaatcttgaaaacattcaaatgcatttgatgcattacattctttagaaaatatttttaaacaaacccatgcactccatctatgctaacttcttcttgatctaaatgtcttattaactatgtgtcatattccctaactaagccaagtaatggagccaggtatcttttgctccttacaaaagacaatatcaccatatagtttcagttaaaaatacttgtgcagtatttttctcccttagcagtagctgagttctaaatatttattttagtgtgtgctttatgaaagccactagagtagtcactttcctgcatgcattttcattgggtcctcataaactagtaggttggtaattatccctactttacagaagagcagactgagaccagaagattaaataactacctgaaaataacatatagtaagtaaatggcagatcaaagcatagttcaaacccaggttttctagaatctgcccagggctccatctgttcgaccatgctacccatattttgtctttaggcttatgttactgggagacaggatacttaacaaatggtattgaataaaattcagattatgcaaagatcagaattcaacaggaactctgaacttgtaataatgtattctcccctcagccttgcattatggaaccaaatgataaattttcctagtttaccaatgtaaactagcagagaggtagttgacagtcatgcagataagatctttgtttcattcagctgtttgtcacattgggtcaataatgtgttctaactataactgataaaattcatggagttaaatttttatatgctattatatgtcatcttggggtaggttttctggtgtggcagaagatgacttgaagaacattaaaacatcaacccgtgatgtccaagctatcttgttgaacctgtttagtgctgacactgtactaatgtgtcactaaagtgatgtattaatcggacatcactttgaacatagtctatacccttaggtaaagaattagaagccaacatatttttttacaaaaaaaatgtataaaaccacatgtgttaagatagcagtcattatcattatgttataattgatacttgatttgccctgttaaccaagaagacaataatcgctgtctttgctgatgatacagtctaactaccacaaactagaagccgtgtcagacagttcacatcatctggctaatcaagatcataaagaatagtccctcatcaattatgataaaacccaaaccattgttttcacagactttccttaataatcaaatagacaagactaaatttattaactgattattttattcacatacttaggggtctttttccacattaagtcaggtaggctcaaaattaaatgttaggttcattttcttggcataatagacatgaaaacctttccttaatatactccaggttaaaatgtgtgtgttttgctctacgttctagacctgggccagtgaactacggcccatgggctggccacctgtttttctaaatatttttcttggaatgaagccatcatacccactcatttacagattgtgtatggctgctttcacactttaatgatattgttgagtagttgtgacagatcatgtgacttgcaagctgaaaatattaaatctggcacttttagaaaaaagtttacccatcccatcgtagaacggtgttatccaaaagaactttctattctacatctgcactacccaatatggtagacactaggcacacttggctgttgagcacttgaaagatgtctaatgtgactgaggaaatgcatttctaattttgtttaattttaatttgaatttcaacagtcccataaagcttgtggctaccacattgcacaacacagctctagaactttcgggacctttagctgagtgtttgtctcagccacccctaggactagccttcatgcagagaagggctagctcttcttcagtgyaaaaatatgagtaaggccatttaattttcatagatgaatatcagcctttttcttgatgaagctggtatccaaagtataggatatttgtttcaaagagtaatgttgtctctgcatgtgacaaatgagactggaatgtacttgcctctggaccttgccaaactgtaagaaaagagagttggggacatgagtttttcataagaaaaaaggggtatcctcttgtcccctcaaaaacatcatctcccaaactgcacctctcactatgactttcctgcccctgatttctcaggaaccattctatcctgcatgtcctccagaccagaaaatttcaaaacattgcatttcctcattccttggaatcgttctgtttcttccacccagaagactcatggattttcatacttttctctatttccaccatcaacttcttttmgagtcatcttatggaaacttcccttgtcccccaagctgagttttgtctgttccaacccctgtttcacctttccccactactctgaaaatccctgagagtagggacactgtgctaggatgccccaaagtggtacctgctgcgggagttccccactccctccttctcccgtgcagcttcttgatcatttctcctcttcttgtgctctgtgctccctacagactaccctgcaggtaggaaccagtgccgagcatggtggctggcacactgaataatcatttaaagtgttatgtcaggcaaggcatagttgatactaaattttaaatttatgactcctcatttcttagtcttcaaattactcttgttctcaggctaatctttaaatgcttctttcaaagtacagttctcctaataaggaatccaaactggtacctgacttcctgagcccttagattatctgacccctctccctccatatctattctatcaataatattttccacatcaccaaacttcagtaaaaacatattcagcttcttccatgtgtaatcatgggggatttggaactagataggcctgagctgttgtgtgtgccttctccccagaggcagataagcaaaccactgaaatgcgatatggcatgtactgaactggggtgtgcccctctcagccaagtcacaatgtgggcagagcctggttctctgcctccccgagtgcttgtgagaacctctctgccctgatgttgccctctggtggttcctcatggtagaaaagtgtggactctgaagttagactgtttagattttatttccttcagctctactaagtaagtttaggcaagttttttaacctctcaaaatttcaatttccttgtctatgaagagggacaataaaaatacctatctcattaggttactctgcaaagtacagcaggataaactatgcaatatacttagtccagtaactgacacatcacgactgttgcctgttcttgtatcatagtccttgttcctaagtagttattgctgctatcagcatccttattttggagtttttacttttatttgaaagttaaaggtgtttttttttttttacttttatttgatagttaattcacacttcagttgtggacatatcggttatgtttcctcatcagcttggcttgcctcccaaaagaccccttaggagtctaatggctgattgcctgcagagaatcgttcaggatgatggtaagagcccatttgctcatgactgatgtcaagaccctcagtctgacttgactgaacaacagtgaggttcatcrtaaaggtctactgtctaagatgcttaaggtaggagaccaggttcttttctgggggttctctcctctggtggagaatcctaaagcatctgcctgtgcttgtgtaaaaaaccattatatgccattgcctggtatagtcctgggtgttcctcatgaatcagaacagcaatctcactgagaacagtggtcagatcattgggtctggcctttgaattcatgcacagaacttttgttgttccattctaaatcttgctgtatacctcttttcatatgtgcttctcattagaacaaaagaggttctttctacatttgattgggtccaggttatctcaccaagagaaaatttgtgtgtgtgtggggtggggggggtatggctcaaattcagtcattatgtgtgaacttgatttataccagatttgtatatcttgctgccaatttttctatttctgctttttctgatgaaatatacccaatgttaaacaagttaatcaagtacaacaaatctagccaccaattacctgttcgtggcattgctatatgcacagtttcaccagtgtctggcgtggaatggaggatacctgtatattcatgtatgccyatataggcccttcctgtgtacaaacagtagagcaagttaactttaaatatgttaaaattatattacgctgctttgtttctaaagattctygagatatggatgttcctctgatcatatcattcattatacaaaatgatttcattttatgatgaacttacactcctctccagagaatcttttacatcctctgctttgttaagaatactcatttcagaaagaattcccataacattctattatagaatttgtagggccttctgttgaaaataatcttgaaccatggtcataatctttcagttaacaaatctgtttaaaacaaaatcttctaaaagttaaaaaaatatcagagctttcttggggtaagacacaagtaaagaaatgaaaactattacaccattttagaagcattgaccatacgactttctcacccaatctcagatatcatttattattctcaccagaactatacagctttatgttttgggtaaattttatctactttttaaaaccatataaacttgtgcctaaagttgttcttttatttagagagattactttttttttyctttttttaaccattcgacatttctggcttctagscagatgtcttgctttggtgatccctccactttcttctcatacctccctgggaaggagatacacagctgagggtaccgatgtgctagccaatcattgcaaggtagtgataatgtgacagaggaaagactacctagaaaaagaacaatgtttgttaatctagtacattcatgtaaaacatttataaagcaatcattggaggttgtattaggtattaatgatatttcgataggtgagcagtgttaactttgttagaaacataaattgaaggcttaattttgagaaatatgtaagtaacatcagagattatggttgtcttatgtmtaacactttaaaaaatattctgtactatttggaggtcacaatgctagtgaaaatgcaaaagcctgcatggatctggtcatttggaaggtaaaagaagacgtgaaaggaaagaagtagtcaccttgcccaagaacatctttaatttctgaattgctgtttcggtgacttctctggcccctactactggcagtagagtttggtcgatgatggtatggggtttctggacactttcaaagagaagaagaggaaaagcgctgttgaggttgagttactacatttttttattacactttaagttttagggtacatgtgcacaacgtgcaggttagttacgtatgtatacatgtgccatgttggtgtggtgcacccattaactcgtcatttaacattagatatatctcctaatgctatccctccccctgcccccaccccacaacaggccccggtgtgtgatgttctccttcctgtgtccatgtgttctcattgttcaattcccacctatgagtgagaacaggcggtgtttggttttttgtccttgttatagtttgctgagaatgatggtttccagcttcatccatgtccctacaaaggacatgaactcatcatgttttatggctgcatagtattccatggtgtatatgtgccacattttcttaatccagtctatcattgttggacatttgggttggttccaagtctttgctattgtgaatagtgcctcaataaacttacatgtgcatgtgtctttatagcagcatgatttataattctttgggtatatacccagtaatgggatggctgagtcaaatggtatttctagttctagatccctgaggaatcaccacactgacttccacaatggttgaactagtttacagtcccaccaacagtgtaaaagtgttcctttttctccacatcctctccagcacctgttgtttcctgactttttaatgatcgccattctaactggtgtgagatggtatctcattgtggttttgatttgcatttctctgatggccagtgatgatgagcattttttcatgtgtcttttggctgcataacgtcttcttttgagaagtgtctgttcatatcctttggccacttttggatggggttgtttgtttttttcttgtaaatttgtttgagttcattgtagattctggatattagccctttgtcagatgagtagattgcaaaaattttctcccattctgtaggttgcctgttcgctccaatggtagtttcttttcctgtgcagaagctctttagtttaattagatcccatttgtcaattttggcttttgttgccattgcttttggtgtttcagacatgaagtccttgcccatgcctatgtcctgcatggtattgcctaggtttccttctagggtttttatgggtttaggtctgacatttaagtctttaatccatcttgaattaatttttgtataaggtgtaaggaagggatccagtttcagctttctacatatggctagccagttttcccagtaccatttattaaatagggaattgtttccccattgcttgtttttgtcaggtttgtcaaagatcagatggttgtagatatgcggcattatttctgagggctctgttctgttccgttggtctatatctctgttttggtaacagtaccatgctgttttggttactgtagccttgtagtatagtttgaagtcaggtagtgtgatgcctccagctttgttcttttggcttaggattgacttggcaatgagggctcttttttggttccatatgaactttaaagtagttttttccaattctgtgaagaaagtcattggtagcttgatggggatggcattgaatctataaattaccttgggcactatggccattttcacattgttgattcttcctacccatgagcatggaattgttcttccatgtatttgtatcctcttttatttcattgagcagtggtttgtagttctccttgaagaggtccttcacatcccttttgagttggattcctaggtattttattgtctttgaaggaattgtgaatgggagttcactcatgatttggctctctgtttgtgtgttattggtgtataagaatgcttgtgatttctgcacattgattttgtatactgagactttgctgaagttgcctatcagtttagggagattttgggctgagacaatggggttttctagatatacaatcatgtcatctgcaaacagggacaatttgacttcctcttctcctaactgaataccctttatttctttctcctgcctgattgccctggccagaacttccaacactatgttgaataggagtggtgagagagggcatccttgtcttgtgccagtattcaaagggaatgcttccagtttttgcccattcagtaagatataggctgtggggttgtcatagacagctcttattattttgagatacatcccttcaatacctaatttattgagagttttcagcatgaagggttgttgaattttgttaaaggccttttctgcatctattgagataatcatatggtttttgtcgttggttctgtttatatgctggattacgtttattgatttgcttatgttgaaccagccttgcatcccagggatgaagcccacttgatcatgttggataagctttttgatgtgctgctggattcggtttgccagtattatattgaggatttttgcatcaatgttcatcagggatattgatctaaaattctctttttttgttgtgtctctgccaggctttggtatcaggatgatgctggcctcataaaatgagtcagggaggattccctctttttctgttgattggaatagtttcagaaggaatgataccagctcctccttgtacctctggtagaattcggctgtgaatccatctggtcctggactttttttggttggtaagctattaattattgcctcaatttcagagcctgttactggtctattcagagattcaacttcttcctggtttaatcttgggagggtgtatgtgtcgaggaatttatccatttcttctagattttctagtttatttgcatagaggtgtttatagtagtctctgatggtagtttgtatttctgtgggattggtggtgatatcccctttatcattttttattgcatctatttgattcttctctgttttcttccttattagtcttgctagcggtctatcaattttgttgatcttttcaaaaaaccagctcctggattcattgatttttttgaaggcttttttgtgtctctatttccttcagttctgctctgattttagttatgtcttgccttctgctagcttttgaatgtgtttgctcttgcttctctagttcttttaattgtggtgttagggtgtcaattttagatctttcctgctttctcttgtgggcatttagtgctataaatttccctctacacactgctttgaatgtgtcccagagattctggtatgttgtgtctttgttctcattggtttcaaagaacatctttatttctgccttcatttcgttatgtacccagtagtcattcaggagcaggttgttcagtttccatgtagttgagctgttttgagtgagtttcttaatcctgagttctagtttgattgcactgtggtctgagagacagtttgttataatctctgttcttttacatttgctgaggagtgctttacttccaagtatgtggtcaattttggaataggtgtggtgtggtgctgaaaagaatgtatattctgttggtttggggtggagagtcctgtagatgtctattaggtctgcttggtgcagagctgagttcaattcctggacacccttgttaactttctgtctcgttgatctgtctagtgttgacagtggggtgttaaagtctcccattattattgtgtgggtgtctaagtctctttgtaggtctctaaggatttgctttatgaaactgggtgctcctgtattgggtgcatatagatttaggatagttagctcttcttgttgaattgatccctttaccattatgtaatggccttctttgtctcttttgatctttgttggtttaaagtctgttttgtcagagactaggattgcaacccctgccttgttttgttttccatttgcttggtagatcttcctccatccctttattttgagcctatgtgtgtctctgcacgtgagatgggtttcctgaataaagcaccctgatgggtcttgactctttatccaatttgccagtctgtgtcttttatttggagcatttagcccatttacatttaaggttaatattgttatgtgtgaatttgatcctgtcattatgatgttagctggttattttgctcattagttgatgcagtttcttcctagccttgatggtctttacgatttggcatgtttttgcagtggctggtactggttgttcctttccatgtttagtgcttccttcaggagctgttttagggcaggcctagtggtgataaaatctctcagcatttgcttgtctgtaaaggattttatttttcctttacttatgaagcttagtttggctggatatgaaattctgggttgaaaattcttttctttaagaatgttgaatattggtccccactctcttctggcttgtagagtttctgccgagagatcagctgttagtctgatgggcttccctttgtgggtaccctaacctttctctctggctgcccttaacatttttttccttcatttcaactttggtgaatctgactattatgtgtcttggagttgctcttctcgaggagtatctttgtggtgttctctgtatttcctgaatttgaatgttggcctgccttgttatattggggaagttctcctggataatatcctgcagagtgttttccaacttggttccattctccccatcactttcaggtgcaccaatcagacatagatttggtcttttcacatagtcccatatttcttggaggctttgttcatttctttttattcttttttctctaaacttctcttcttgcttcatttcattcatttgatcttccatcactgatacccttttatccagttgatcgaattggctagtgaggcttgcgcattcatcacatagttctcgtgccttggttttcagctccatcaggtcctttaaggacttctctgcatttgttattctagttagccatttgtctaattttttttcaaggtttttaacttctttgccatgggtttgaacttcctcctttagcttggagtagtttgatcgtctgaagccttcttatctcaagtcatcaaagtcattctccgtctagctttgttccgttgctggtgaggagctgcgttcctttggaggaggagaggtgctccgatttttagagtttccagtttttctgctctgttttttccccatctttatggttttatctacctttggtctttgatgatggtgatgaacagatgggtttttggtgtggatgtcctttccgtttgtcagttttccttctaacagtcaggaccctcagctgcaggtttgttggagtttgctggaggtccactccagaccctgtttgcctgaatatcagcagtggaggctgcagaacagcagatattggtgaacagcaaatgttgctgcctggtcgttcctctggaagttttgtctcagaggagtacccagccatgtgaggtgtcagtctgcccctactggttgttgcctcccagttaggctactcgggggtcagggacccacttgaggaggcagtctgtccgttctcagatctccagctgcgtgctgggagaaccactactctcttcaaagctgtcagacagggacacttaagtctgcagaggtttctgctgccttttgtttggctgtgccctgcccccagaggtggagtctacagaggcaggcaggccttcttgagctgctatgggctccgcccagtttgagcttcctggatgctttgtttatctactcaagcctcggcaatggcaggcgcccctcccccaacctcgctgccaccgtgcagtttgatctcagactgctgtgctagcaatgagcgaggctccgtgggtgtaggaccctctgagccaggctcgggatataatcttctggtgtgccgtttgctaag

SEQ ID NO: 97137 - DNA, 18425 bp, Homo sapiens
caccgtcaccgggcatgctgagcactgccatttctcacccaggcagagatgcttggaggttatgtaactgaacacgattacacagctgtgaagctggagctggacctggaactgaggtcaaactccaccgcctttgctccccacacacctgcctacaccctgcctctgggaatggtgtttcaaccctcacacagggggacaatcctcccaggcttcctctccaaccccaccccgatggtgggtagggcagaattccgcccaactccctaagttacaaagggcctcagtttcctcatctgtccaacagggaccacactgctgcgcctcacaggatgacggctacagggatcaaccgccccccacaccaaagcaccctgggcctccctcgcactctcctgttccccacctgccacctggagacgcctcttccccgcccctcacccttaggcgtggaggcgaatgcgcaggtcgcccccatctcagtttccccgccattcccgcgctcaccaggggtccggctgccgtcgctcagcgggtgccatgggtcacggtcggtggccacgagtaggcactcggggtcgcgcaggtgcgcgcacgcctccctcagcttggcgaaggagaagtgctcgtcgtagcccacaagcacggcgcgcacgcgcggggccgcgccgtcccccgcgctcgggtccccggccaggcgcagccccgcggcgcgcagctcggcgcgcagcccctcgccgcccagcacgaacacggcgcccggcgcgtccggaggcccgggcaggcgctggcgcagcaggcgcgcggcgcacagcgcggagctgaagagctgctcggcgcgcagccccccgaagccgaggcgcgcgaagcgcagggccagctcgggccgcgcgcgccggctgttgttgctcacaaacagagccgccttgccggcccgcgccagccgctccagcagctccggggcgcccggcacggcgcgctcgccgttccacagcaccccgtcacagtcgaacaggaccccctgcgcccggcccagcacgtcgcgcagggccgctccgcgcagcctctcgcagcgcgccatgcagccggccggccgccggcctcccgcgccgcgctctctccgcgggcacggcgcgctctccctggcacgttccacgcagccgccaattggcgcgctggaaggaccggggggcggggcgacggcgtggcctgcagccaatgggggcgagagtctgggagaggagcgaagccgcgagctaacggaacttggagagaggggcggattcgtggccaacaccgaggggaagggaccaatgaagagctagcttgatccttctccccgtccctggttctgctggaccagtcgccgccgagtttcaacgccgactacactcttacgcggtgggagactgacgctcttcttaaccaataagaatctacaaacaaaacgcgaagcgaaaggccccgtgccctccagccaatcagaagcttaggcgagctggttgctgggagaaaaacagatgttaaatgaactgcctttgggtcgaatctcattgccccctgaatcgtggacgctccagttcagagcgaagtcccaagaaacgtgtgtgtacgatggggtacgaggcacatggtgtcttcttgggtgctggagccctcggtctagaccagtagttcttcacactgcgttagagtcccctgggaacttattttcagatatcatttacatatagtaaaatgcatagatcttaaatgtacagttcaatgtcttgacaaatgcttttgaaatcaccgatgtgtagcaggacagatcctcatgtaagtgttttgggtgaagactgggcattttttggtttgttggttagttggtttaattccagggattctaccgtgagctaggatagggtagggaagcactgggctagaggctggtaggctgtcactgcagcacgccccgggagggcaggatccagaatggtcgtggccaattgcccagaatagtaatggggtgacccaggttggctgggtccctgtcttagggaggaggccttgtgatctggaagcaaccacaggtcttgggacctttgaggagccactggtctgcagtgtggggatgaatgaattgtgagctgtggtgtcacagttttgaagttgtctgccaacttcagataaggctgtgacccccaggagcaactggagctccaacgacttgggaaaaactgtaccttgtacccaaccttggaagctcaactagctcctattccccaagtgccctaagccttttgctcctggcctttgcatagatagtctccttggcctgaatgttcctttttcctttaaaaatttcaccttcagggccgggctcggtggctcacgcctgtaatcccagcactttgggaggctgaggtgggcggatcacgaggtcaggagatcgagaccatcctggctacggtgaaaccccgtctctactaaaaatacaaaaaaaaaaaaaaaaaaaaagaaaaaaattagctaggcgtggtggcgggtgcctgtagtcccagctactcgggaggctgaggcaggagaattgcttgaacccaggaggcggagcttgcagcgacctgagatcgtgccaatgcactccagcctgggcaacagagcgagactccatctcaaaaaaaaataaacaaaaaataaaaaataaataaaataaataaaaataaacaaaattcaccttcaggtcagctcctgaaagacttcccttaaatatcaccttctccaggaagccgttcttaaccacccaccccataccatgagtctaggttatatggccacccctaacttggctaatatgggctcccagtgcaatgacacttgattttttttgtttttgagacagggtcttacaccgtcacccaggctggagtgcagtggcatgatcactgctcactgaagcctccaactcctgggctcaagcgatcctcctgcctcagccttcctagttgctgagactacaggcacacgccactacacccagttaattaaaatttttttttttgtagagacagggtctcactatgttgtccaggctggtctagaactcctgggctcaagtgatcctcctgcctcaggctcccagtgctgggattataggcatgagacaccgtgcctggccagacacttgattctaatggttgcttctgcctgtctgtttgggaactctttgggtgtagggttaagtcttggagctagctcagggcctggcacagagcagatttagggaaggtttgaggacagatccatccctgctccttggggaggcttcccagcctcctcccggaaggagagtgaggggtccaggaaacagtgggagcggtaggggcttctgtgggccaagggtggtgctttggttttcaatggagagcaatacctctgtggagggaattgttataaagtttcacaaatgaggaaaagggataccaagaagttaagtaaattgcccagaatgtgagggacaagccaggctttggagtcagacctaggctctaatcccaggcccctgcctgactgccgtgtgaccttggcaggtcacttctgtctgggcctcagtctcctcactgctaagaggtaatggtatttcctgcagtaggagaagattaagtggaaatcatccacagaacagcacagcatgtagtgcagagaaagctctaaaaatgtctgctgtgatctcacttcagacaggaagaaaggaggcaaagaatatgtattgttttcccctttataaaattggcttctttatttcaaggacagaaaataaaactatcatttgggcagctgctccagttttgtccaaaataatttatttaccagccttacaaaaaacatgtcggcaagagaagaatcagtcccgtaggagcaggcaaacctctccttccttccggtggctcccctaggacctgccggagagtggagagtccggtgggggggtccccaagcccagggtggacgaggaaaaggtcaggaaatagaggattgtcctgagccctcctggccatgggggccgacccagtgggcactgaggcacttgtgggcaaaggctggaggcccatgcccctttgtggggggcgagagctgtcctgggagggccaggtggggagggagggggtgctgagggctgcttagggagaaaccagccactcagttggtctctgaggcaaggctcctggggcggggctgaggggggatagctgggggagtggggaccccactgatagcctcaggggctcctccctctgctgtggcagcccccaggtccacctgtgcagggttactcaaagagactgggctgggggaggctggacctggggaggccgggctgggggaggctggtgaacgccggctttggcgccgggcaggctgagggggtgtggggggtaacgggggtggcactgtgggggctcggaggctgctgccaaccagacgtcggggcagggcttggggggtcccagggctgccagagccagggggcaagggcggggctggaggggaggagcgggagccggagacctgggggggcggcatggtgggccgggctggcgccgggcgcttggctgttgaggaaggaaagggtgagggaggctgagtgtccacgtggcctgtggtgaatccaccaagctccgtgccccctcacaacctttgcatctgctgttccctctgccgggaacaccgtttctgcggctggctcctcatcgtctaggcctctccttgtgccctttgcccccttggaggccctccccgagcaccctagttagagtcccaccccatgccccaccccagctgctccgtcacattttccagatgtattttcttcgcaggactttttgttctctgaaattatcttgcccatttattttgaatttttaaaagttcttaaattttgagacagggtctcgctgtgttgtccaggctggtcttgaactccagggctcaagctagcctcctgcctcggtctctcaaagtgctgggatgacaggtgtaagccactgtccccggcctatcttgttcatttttattttactgtagactacctaccagccctggtcacgaggctcccagagctgttccgcctattcctggctgtccactgctcattgcctccactgagtgtcagtcactctctcacctggtcagctctgggccaaactgacaggtgagtgtgccagaggggctcagaaggaggcccctggtttcttcccacccctgccacctcctctccttcactgccactgccttttttctttttttttttttgagacagagtctcattcttgtcacccaggctggagtgcagtggcgtgatctttgctcactgcagcttctgcctcccgggttcaagtgattctcctgcctcagcctcctaagtatctgggatgataggcacccgcaaccatgcccagctaatttttgtatttttagtagaggtgaggtttcaccatgttggccaggctggtcttgaactcctggcctcaagtgatccacccgcctcagcctcccaaagtgctgggtttacatgtgtgagccactgtgcccagccccttcactgccctttgaagactccctccttccactgtagtctgtgacctctgggcttctggagggacgggactccagtaccccagtactcacgccggctcccccttagtgggcacgtgctgtgtgccagggccaggcactcttcctgcagcaccactgcaggctccatgcagccccataaggtaagtgcagacactgtcccattacacagaggaggaaggtgaggctcagacaggtgaactcacctgcccaaggtcaaatctaaacccagagtgccaggtggcaagacctgggctctttatcaccttgactcctggcctcccctggctgcctaaaaagataggaggacctgggactgcctgtcccctctccccgcccaccctctgtcccctcctcccctcccacagccaactcactcctccgagccatgtcctccactggggcagctgtctccgggggactcctggtgaccttgggggaggctggtctgggaggcacctcagactctgtcctgcagagggaaggagaggatggggcagacttagccacctcccagaagtctcatggaatcctgaggagtctccagctgccaggtggagtccggatcctcccagcactcgctctctatcactctgtccccatgccacgcacccctcccagaagatgcttctggcattggttggggtctgcatccactgagcccctggctgctttgtgaccctgtgacagagtccatgttcctctagggaccaggagggagccccacctgcctggtaggtagggccaggatgggaggtgggacatagggcctgacctctgcctcagctcagggcctccatgtggttttttttcttgagatggagtctcactctgtcgcccaggctggagtgcagtggtgcgatcttggctcactgcagcctccacctccaaagttcaagcaattatcctgcctcagcctctggagtagctgggattataggcacacaccaccatgcccagatttttttkttgttgtttttttgtagtagagacggggttttgtcatgttgttcttgaactcctggtctcaagcgatcttctgcccacctcggcctcccaaagtgctgggattacaagtgtgcgccacctagscttgtttttttttgttattgttgttgagaagtctcgctctgtcgctcaggctggagtgcgatggcatgatcttggctcactgtgacctccgcctcctgggttcatgggattctcctgtcttggtctcctgagtagctgagattacaggcgtgcgccaccatgccctgctaattttttgcatttttagtagagatggggtttcaccatgttggccaggctggtctcaaactcctgacttcaagtgatccacctgcttcagcctcccaaagtgctgggattacaggtgtgagccaccacacccggccatttctttttctttttytttttttttttgagatggagtttcactcttgttgctcaggctggagtgcaatggcacgatcttggctcactgcaacctctgcctccccggttcaagccattctcctgcctcagcctcccgagtagctgggattacaggtgcgcactaccatgcctggctaattttttgcatttttagtagagatgggatttcaccatgtttgccaggctggtctcaaactccagacctgacgtgatctacctgccttggcttcccaaagtgctgggattacaggcgtgagccaccacacctggccatttctttttgagaaaggatctcactctgttgcccaggctgagtgcaatggcacaatcattgctcactgcagcctcgacctcctagggtcaagaaatcctcccaccacagccttctgggtagctgggaccacaggtgtgcaccaccacaccgacctcatttattttttgtagagacacagccttgctatgttgcccaatctgcctccaagtgatctttttttttttttttttgagacggagtctcgctctgttgcccaggttggagtgcagtggcgcaatcttggctcactgcaagctctgcctcctgggttcacaccattctcctgcctcagcctcccgagtagctgggactacaggcgcccaccaacatgcccagctaattttttgtatttttagtagagacggggtttcaccgtgttagccaggatggtctcgatctcgcctgcctcggcctcccaaagtgctgggattacaggcgtgagccaccgtgccgggccacgtgatctttatgagmtgctttggccactggaagccagagagtgggtgagaagcagagggggtcctaggctcattcctcactgccttcgggtctctgcttggtcgtttcttccttagcgaggtctttcctggccccacagctaaagtagcccccacgctcccccttaacctgctccccctcccttagcagcgcctctccacctgacactatagagagaacgcactggtggctgtgcttgatgctgtctstctctctccctgtgccctgaaatgtgagcatttgtcttgctcatcaggaaattcaaggtgtgagccgcagtgctctgtggtatcctgaatagtagctgcttggtatggaggcaccacggtaccacgaagcccttccagatttaaacgatcaaagagaagacggtggccaagcactgtggctcatgcctgtaatcccagcactttgggggactgaggcaggcggatcgcttgaggccaggagttcaaaaccagcctggccaacatggggtaaccctgtctctactgaaaatacaaaaattagccggctatggtggtgcacgcctgaagtcacagctattygggaggctaaggcaggagaattgcttgaacccgggaggctgcaagtgagccaagatctcgccattgcactccagcctaagcaacagagtgaactccatctcagaaaaaaaaaaaaaaaagaggctgggtgcagtggcttacacttgtaatcccagcactttcaggggccaaggtgggtggatcatttgaggccaggagttcaagaccagcctggccaacatggcgaaaccccatctctacttaaaatacaaaaattagacaggtgtggtggcactcacctgtaatcccagttactcgggaggctgaggcatgagactcagttgaacctgggaggcacaggttgcagtgagccaagattgtgccactgcactctggcctgggcgacagagtgagactctgtcttaaaaaaaaaacaaaacaaaactggaaggtatttatagattccaaaatgatcatctcttgagttccctaggactggaaacaaagcctggcatatagtaggtgctcaggaaattgctacatgatgaatagggcacacatcagtggctgagacaaattccgcctctgagtctcygccccaccctctccaaactaggagatccggtctttgggatgaaaacactaataattacatttccaaaaattcagcttccagctctgagacatggcgcctcaggcaggctgattgtgggagtaccacaggagccattcaagcccctcagtcctcacctttccttggtagcygctgaagccaaggctggggccgkagctggagctggagccggagccggagccrgggtggtggctggggtgggcacggcagtggacggaagttcctcagaggccagcctgtcactgactgtgtcctggagggtaacagctgagaagaggcctgacacgttgaagttgatgtctggagacagaaggagcggagacggctctcagagaccgcgccaggctcctcactccactggccgggaccgtttccccttcccctgaacccatctggaccatgttcagcttccccactccygtgtgagcctcaccaccaccccacaaagcaggcagaccatccccrttgtaaaaatgagaaactgaggctcagacttcctcctggacttatggtgagtttgtggggctacagsggagggagcagggcagaaggagggcacccagcagggcgtccatgcaggcaggagyttcacctccagggaagagggtgtctgcgctctggatcagcgcctcgacgacgcccaccacctggatggaagacacggaggctgcatccagctgggcctggtccctgggacaaagagatgcatctgctcagcaaagggtttgtgaccccaactctctggctggctctgtgctgggcaatggagacacaaggatccatcatattgagtccttgttctcaaaaagcccacaaaccaccagttgatggtaaatgtgtcactcacatgccaaatgtcccccttccttcaccctgacagacatcactaattaatcaaggacccttttcctcatagttgtgatctggacagcctctaccaagcaaatgcaatcagcacgtgggaggaaatcttgccatctgtggccaggtaaataatgatgactcctcacatagcactgcactttacactttaattttattatttcttctttttttttgagacagagtcttgctctctcacccaggctggggtgcagtggcccgatcttggctcaccgcatcctccacctcccaggttcaaragattctcctgcctcagcctcccgagtagctgggattacaggcgcgtaccaccacgcccagataatttttgtatttttagtagagacggagtttcaccatgttggccaggctggtctcgaactcccgacctcaggtgatccacccacctcggcctcccaaagtgctgggattacagctgtgagccgctgcccccggcctatttcttcatttttagagacagggtctcattgtgtcacacaggctggaatgcagtggctccatcatggctcactgcagccttgactccctgggcccaagcagtcctcccayctcagccttctgagtagctgagacttcaggtgtgcaccatgcctggctaatctttttaattttttgtagagacagggtctcattaagttgcccaggctggtttcaaactcctgagttcaagtgatcttcccaccttggcctcccaaagtgctaggattacaggcatgacactggacctggcttgcacttcacagtttctaaaacattttccaattcatcatatcactcactccccaaagcaaaagccctcaaagtttgtatgatttctccccaatttacagatgaggaaatcgaggttctgagggtgtcttcctcaggcccatctctggaaggtggaggggtggagctattagtagaacctgatcgagccaggcgcggcagctcacacctggggcgcgatggctcacacctgtaatcccagcactttgggaggccgaggctggtggatcacgagctgaggagatcgagaccaccctggctaacacggtgaaaccctgtctctactaaaaatacaaaaaattagccgggagtggtggtgcgcacctgtagtcccagctacctggcaggctgaggcagaagaatcgcttgaacccgggaggcggaggttgcagtgagccgagattgcgccactgtactccagcctgggcaacaagagcaagactccatctcaaaaaaaaaaaaaaaaaaaagaacccgatctctgggctcccagctcccccatgccactaaacacctcatcaccaccactggccaaaatgccagaattgcctctctccaaagccctgtggcctgcacagcccctttggcctgttcctcacggcagcctcaaaaacaggagctgctcaacccactccaaaaatggggacaccaaggccccggggaaaaatagacaacagatagttgggatgggatctgccttcctcctgccacctcccccagcccgcggcccctcacccttctttctcaggtggccacagcaagttgggtcccaggactatggcgatgttgctgggtgtcatcttgttcacctcctgctcctcggccagccgtgccaggaacttcatcaggtacctaagggcggaggcaggcttaggccagkggcagaacgcacccagccctgagaattctccagcccagggtttccaaagagtgtgaaagacaccgcccagaatggtcttaacattgtcacagttaaatcagcttatccactgagtgccarccctgcagtgggcactgagccaagctgagtcctcagcagccaccctacagggtagagattgttacagtctgcattttccagatgatgacgctgagtggcctgcccagaggtggcatgtgaagccaggcggtatggcttcaaaagttcaaggtctcatttatttcaatgcttcgcataaaaatgtgtgactaatccggctgggcgcagtgcctcacgcctgtaatcccagcactttgggaggctgaggcgggtggatcacctgaggtcaggagttcaagaccagcctgaccaacatggtaaaaccccacctttactaaaaatacaaaaattagccgagtgtgatggcaggcgcctgtagtcctagctactcgggaggctgaggcaggagaactgcttgaacccaggaggcggaggttgcagtgagccaagactgcaccactgcactccagcttgggcgacagagtgagaccctgtctcagaaaaaaaaaaaaaattatatatataaatgactaatccatcaaagctgcattttcagtaatatttcttaggatacagtggcaaggccaggctcaagcccagggtcccagggtccgtgaccycagctgggctctggctctgcggcaggctggggaggcgggctcgggctcacctgaggttgctgaggttctcggggggtaggcggctgcacacctcttggagggcctgcagccgggcccctggctccttcaggctgggggggagtggagagacctgtcagccagcgcagggctacacctttgcatcctcctcctccccatcccctccctcctccaacatcctcacctggctgccctcatccagtcatcatagaggtcgaaggtcatcagaggctctggcagctcccgcagataggacttgagggcacctgaaggaggggtgtggggagggtcagaggcagcccccacccgctctcccactctccctgtagaaggaacctccggcccttgttcacactaacgtgtctaggtctgacagtttctttgggctgtaggcccttttgagaaaatgaaggctagccatcttgtccccagaaaaatgccaaacattttcggggggctcatgatggaccccacattaagaacccgagtgtcctcagtctcaacagaatatcaagtcttaaagccaggctatcttgggatcgtttcaagccactgcaccccctcccccccaacctcctgcccagggctccccggatcaggcacctgccacagcgtgcgggtcggagcagaactcctccaggctgtgggggtccgaggccattgtctgcttgagacgcttcagcaccgaggccccagcagccagacggaagagaccctgggttcgagaggaggcaggcaagggtcacagaggggtgggcagggcaggacaccctggcgcacttgtagcctggggtgtgccactggcctttgctaggcctgtgtccccgctggtctggctggcagtgtgggcaccacggtgtccacgggcttcaaccttcaaggtctagaattctgagcaaagggcagggctgggaagtctgggaggaggcgggaaaaatcatggggaaatggaagcccagtcagaagtggaagggaggggccgggtgcagtggctcacgcctgtaatcccagcactttgggaggcctgtgcaggtggatcacttgaagccaggggtttgagaccagcctggccaacatggtgaaatcccatttctactaaaataaaaaaaattagctgggcatggtggtgggcatctgtaatcccagctacttgggaggctgagacacaatcgcttgaaccagggaggtgaaggttgcagtgagccaggatcgcaccactgcactacagcctgggtgacagagcgagatcctgtctcaaaaaaaaaaaaagggtcgggcgcagtggctcatgcctgcaaccccagcactttgggaggctgaggcaggtggatcacctgaggttaggagttcaggactagcctggccaacataatctcatctctactaaaaaatacaaaaattagctgggcgtggtggtgcatgcctgtagtcccagctacttgtgaagttgaggcaggagaatcgcttgaacccaggagacagaggctgcagtgagccgagatcacgccactgcactccagcctgggtaacagagcaacactccatatctcaaaaaaaaaaaaaaaaaaaaaagtgtaagggagaaaggaggccccagcacagcaggattgctgagcagcgcagaactgttttggggtatctgccaccactagggtctatcttcaggacaggggggcaatgtattcacagcagatccagccagtgtgtggcagtggagcccctggtttgagaagtcaccttctcaaatgactctgggcatggttacctctctacctctgtctccctcttgtgaaattgtgaaatggagcctggaatgcaaaggcttctagtacagcgcttggcccacgcgagcattgacacgggggaggtagtgtggatgccgcaggaggcagtcatgtcttctcccagggagctgggctcgaatgagggaattacaggcacccggaaagggcagcaagtgggcggtttgggacagaatgagggccccagtgctccttccccacctgccccaggggaccccacctcttccttcatgccctcagaaagcagcatcatgacgcaggcctcgatgggcagggcaatctcccggcccagctcttgcaggtgggttgccagcgacaccccatacaccctggggaagtgggtggctgtcatcgaaggggagtggtctgcagggatgaaacagatcagcggcccagggccttcccaccccgagcagtcaggcaggggcacccccccttcatgtcctcaaggtggtaccacctgccactgactgtccaggcacacatctgaaatcatccgtcacatctctcgaatcagcccgcctccactgcctctgtcctaggtctaggccaccgttgcctccttctgcctcacaggcctggctctagtcctgcccgcttcactccaccctccacacagtagccagagctgcctctccatcacagattgagcctagctctcagaacccatccacagcttcctgctacctttcaggatgaagtgcgagcttctcaataagccccgagcagggcagggtcaggggtgtggtatcgccgggcctatgtccccacctgcttggccgtggttctccctcagctcagccagggctgtgtccagcgagctcagtgacctgcgatggtaatcggcctgaatctccaggagctgtggggatgaagggacaccctgagcggaagtgggggaagctgagccttctatagggtccttgagagcagacgccccctccaccatcttagagccccagtggcccctggctctggcattcagcccctgaactctggatggctggggcccggtcttggactcacacgaatgaagtagttggcataggagtcctccttggtaacaaagtggtacaggtcagccaagtactcgtccttggggacagagaggggagagcttacgttgggtgaggctgtggggtctagaggggaagaggaggcttggaagggttggtgacctcccccaggccacacaactgcaggtggaaggtcccagccaggctcctctctctgccaaggttggtgcttggggccagcccctgggaactccctcaaacttttctggcttctcgtccccatctctgtgtctccatagacttagcacagtgccttgttttttgttttgtttcgtttgagacggagtctcacactgttgcccgggctggagtgcagtggtgcaatcttggctcactgcaacctccgcctcctgggctcaagcgattctcctgcctcagcctcctgagtagctgggattacaggcgcccgccactacgcccagctaagtttttgtatttttagtagagacagggtttcaccatgttggccaggctggtcttgaactcctgacctcatgattcgcctgcctcggcctccccaagtgctgggattacaggcgtaagccaccgcgcctggccttgcacagtgacctgttattcaccattcagtcattctttcattcactcttcatttattcattcactcgctcgctcagcaaacaaacacatggagactcagggaacagaccaagtctctgccttcccaagttatgcatggggtacagacagaagaggctacgagggaatggcggagctctgctggctcctagccacgtggccttaggcaagtcatgtcacctctctgaacttcagcttccttgcctgtgagatgggccaggacccacccctgccacccctacatatccaggggacccccatggccctcaccctgcattgctccactttcctcttcagctcctcctcctcctccttcagcgtctccaccttgttggccatggtcgtatggctgtgactacccgggctgcctcctaggccttgactgctgcctgaattcttggttgcctgactgagcctggagatgatcccaaggtgagctggtcacctgccctgttgcatgtccagagccaagtgtcccctccatacagcagaccacatgggattctaggatttagagctgcagatctgagagctccactggccggggcctctgcccaggctgggccatgagtgctctgggttgccccctggtggcagatttggtgatcacagccactccacagaggggagaacagggctgccgcaggactgtttacaggatcccaggctttagggttgccccagcaccagctgtgacacacgcgggcacaccctcacagatacgctaaccacctgtgctcctagggaccaggcgtgcacaagtacacacactgtactcagcagaccccacagcatcctcctggtgtggccagggcctcaaagctctatgaccatctctgtgggctgacccagatatgagccccctgagcggctggggctcccacctgctcttgagtgtgttccagtcggacacgagcttctggaggcttttcttgtgtttgaggatggctggcagctcctcctggggatgggcatgggggggtcagtgtgctgggggaggagggagccagaagctggggaagctgggggctgaaagcagggcacaggctcacctcactcagcctgctgagtggctgcaggacgtccctctccagggtcatctcaaactcggccaggatgcgggccagctgattctggatggcacagctcatctccaaggccttcctgtggacacggcaccccatgggtccaggcgcccgctgccctcacctccactggaaacacttggtggggcctctcctccctcacttccggcccctcctagatatccttcatctctgctaagctgaacaccctcccaggcctggccaccctcactgacctgggaactgtccccagcctggtcattcttctgatgtggatgccctcaccacctggaccccctcccagctgagatcacgtcttggtatccccaggtgagggctgggccccgtctgtgctcaccccatgctggaatcagggtccagctccttgaagctctcagccatcgtggtggacagagccatgaggggaagcttcttctgcagggagggtggggccggcgatgagtgtccgtgcctccctccaccctgcctgagcaccaggccagccccttggggcaggggaggagggaacccaggagggccacagtcccagatgagagtggaaacaagatgacaaggcgtggtgggggtgacatttccctgagagcatggatggagcccctctccatctggcgtgccctttcctcttcccagaagccacttgactgggcaggaaggaatgaccaagtcctactgcagactgggaaactaagatgcagggagggcagggagcttgccccaggtcacacaggtggagggagaatgggagcgggagctctttcccctgtcccagggtatatatggctgacctagccaccgctgagttcaaacgctctatggctcccaatttccttgccttggccacactgaattgtcaactgattccaaaacatggccccacactcccaccccatctggagttacggggaatgcctgctctgggatcagagaccagggttcaaacctcagttctgccacttactagctatgtgaccttggacaagtgactttatctctgagcctccagttcctcatgtgtaaagcagtgcctgcccctagggttgtgccagtgttccatgagacagtgcactcatatgttagtaacaagctggcggttatcagccaataaacgctgcctcttgattaataaacgtgtatccctcaaaagccagctcaattgctacctccttcaggaaaccctctgaggccgccccattgacagcctgctcttgcgcactgattggacagagaagttcaggtgctgtcagaagcctggccttggcttatgggaactggtgcacagggaagtggggtaaaggtgatggggaaggtatagggcctcttgagtgcagtgccagaggggccttggaacagagcagtctccatgcccttggtgccagacactcagactggcaaggaaaccccagccccgaccttgcttccccattggatggaagtctcctgctcaggcccctccttcccgggaccccccactcaccacccgcttgtccatgtctgccccgctctggccctgcag

SEQ ID NO: 97138 - DNA, 12333 bp, Homo sapiens
gcagtggtgtaatcacagctcactgcaacctccacttccgaggctcaagtgattctacctcagcctccccagtagctgggactacaggcacatgccaccgtgcctttttttttttttcttttttttctagagaccagggtttcaccatgttgcgcaggctggtcttgaatttctgggctcaagtgatcctcctgccttggcctcccaacttactgggattacaggccaccgggattacagttctagccactgcacctggctagaactgagagatttaacaagttgtggccaggcgcggtggctcacgcatgtaatgccagcactttgggaggccaaggcaggtgaatcacctgaggtcaggagttcgagaccagcctggccaacatgatgaaaccccatctttactaaaaatacaaaaattagccaggtgtggtggcgggtgcctgtaatcccagctactctggaggctgaggcaggagaattgcttgaacccaggaggcggaggttgcagtgagccaagatcacaccattgcactccagcctgggcgacaagagtgaaacgctctcaaaaaaacatacaaacaaacaaaaaaacaagttgttttaagtcactcagtttggggctgcttggttgggccgcaagagatgagtggaacaatgaatgagactggatgtcctctgctacccaatgactggcaaccatgagcttcctgggtctgtaattccatcagctgtccatcccttaccctggaagggtagaggatttattctttgggtagacatagtttaagagtttttttgtttttgttttttgttttcaatgaaaaattgccaagccctttggaggccctgatggctcaaccaggttggtggctgctaacgagagtgaagatctatattcagtccatctggcacatgtgcagaagacccttctccaaccccagatcatgactacaaatggctatcagttggacaaacatacatcctgatgagaagatatggttggttcatcacaaccttttatttcacaatattaatagtaatcattatagctaccatgtattaagccttcaccatggggctgttaagtcttcattgcttagctttactaaactagataatgtgtttgcttatctcatggatttctcttaaccatcccctgagatccccctatagttcttatccctttacccccattttacagaagaggaaaactgaggctcagagaaggggagtcacttggcacagtcgcacagttggaaagtggtagagccaggatgagacgctaattctgactccaaagctagttatatataataatagcacccaagtaatgtatagattaccatgttttcacatatggcaaattaaggaatcagaatgaatgatgcatgctgcccaagctggacagaggatgggccagggcacaagtgacggctgacccactgatccatggaacccccaagaaaggctctagaacaaagctctgatttcacagtgagattaaaattctgcccaaatcagggtacatgggtggaattaatcaaaaaagttagtatgtatgcctttcaccccagcaattctacttctcattttgcagagactcactcatacagtggcatcaagaggttatatgtgcaggagaacgtccactgcagctttgccagtagcgatgaaaactgctaacagcctaagggcctagccaaagtggaatgctcaaaaaagatggtttgctctagaacaggcagctggtaaaaggagtggtgttagatcagcacatgttcacatcagaaatgctccaggagccaggtgcggtggctcacgcctgtaaacccaactctttgagaggctgaggaaggattgcttgagcccaggagtttgagaccagcctgggcaacatagtgattcccctctttacaaaaaataaaaagttaggtaggtgtcatggtccagctactcaggaggctgaggtgaaaggactgcttgagcccaggagttagaggttgcagtgagctgtgtttgcaggagttagaggttgcagtgagctgtgtttgcaggagttagaggttgcagtgagctgtgtttgcaggagttagaggttgcagtgagctgtgtttgcaggagttagaggttgcagtgagctgtgtttgtgccactgcactgcagcctgagcaaccaagcgggactctgtctccaaaacaaacaaacaaacaatcctccagagcaatctgttaaattacattttggaataacctattcaaaatggttttttccatacgtctttaagatgataatatttatatgttcaaaaatttaaagtctggaagactatgtacaaacagaaaatggtagcattacctttaggagctattgagaggaagtacaaatagagccacttgccttcttactatcaattctgattgtcccatgttttataatatattcatgtagtactctaaacaaaatcttttcagatcaaatcaggggagatgaaatgagagtggattctgagcctagtttttttcagggaacaagacccagtgctaccacttaggggctagaaacagaaattgtatttattttattttgttttatttattttatttttgagatggagtctcactctgttgcccaggctggagtgtactagcatgatcttggttcactgcaacctctgcctcctgggttcaagcaattctcctgcctcagcctcccaagtagctgcaactacaggcatgcgccacgacgcccagctaatttttgtatttttagtagatggggtttcgccacgttggccaggctggtctggaactcctgacctcagcttatctgcccacctcagcctcccaaagtgctgggattacaagcatgagccaccgggcccggcctctttattttctttcagtgttttcccaggaagttctctgaacatccagggtcttcacagatggacttctcataaaaggtaactcctggaaccagacataaattttttttttggggtgtgtggtgatgggatacatagctgtcgccagattctcaaagggacagtgtcacacttaacagagcaaggagagtaatcggtgattggtgaatgatcatttatcagagactgtgtgtcaaacatttaaaaaataaaaagtaactgctgaagaaatgaacaaaaagggtcacaccttcaaaaaagcctaatttccattccagagcaatctcaagacaaggaaaaataagagctgcttcacactgagggcttatctggtatcaaggaccaccgccaatgtcatccattagccatccccaataaacccatgaagttcagcctgaacagcatagaaagacctcgtctctacagaaaaaaaaaaatttaaaaagtagccaggtgtggtggcacatgcccagctactcaggaggctaagatgggaggatcacctgaccctaggagaccgaggctgcagtgagctatgatcacgccactgtactctagcctgagtgacagagcgagattctgtctaaacacacacatacacacatacacaccatgaagttttaacttccccattttacagatgaagagacaaagtctcaagccatacagccagtaggtcagcctgactccaaaaacccatgccccaagccacaataagtcactgccttccaaaagcctcatattatcatgagatataaggcaaggaggtatgggtaaaacaccttaacccttaaagatacaaacttattgtaggcccagttggtccctcagcatttggggactgtgctataagggttaactcagcaggcttgaagtgtccaaacccagcacatctcaaagaaaaaactggccttaatgggctcctgggagataacctctaagtccttggaatatcctcccaagtaggggtgtctttgtatacctcaggccttgggccataccaggccagatagtttgtgctaataatgtgatttatggtggggaccttgggccatgctgtatcattttgacctctggagcagctggtgattaagtaactaaagtcggtcatgtgattgccctatgtgactgacatgcaataaaaacctagaccccaaggctagggtgagctttctggctggtaatatttagtacgtgttgtcacatatcattgctgggaaaattaagtgtgtctgtaagactctaccaggagatgacaactggaagcttgaggccggtctctcccggactctgccctatgcacctttttcttttgttgattttattttgagatggagtcttgctctgtcacccaggctggagtataatggcacgatctccgctcactgcaacctccgcctcccaggttcaagcctcctgagtagctgggattacaggtgcacaccaccacgcccaggtaatttttgtatttttagtagagacggggtttcaccatgttggccaggctggtctcgaactcctgacctcaggcgatctgcctgccttggcctcccaaagtgctgggattacaggcgtgagccactccacccggcctcttttgctgattttaatgtttatccttttgctgtaataaaccataaccataaggataatagctcttctgaattctgagttcttctagccaatcatcgatcctgggggtggccctggggaccctgacacaggaattcagctgtgccttacatgcacctatattctccagctttttgctcatcacaaatctacctgacaaaatccagtatggaaagaaaaaaaaaaccctattcattcagtaaagtaaggcacaaacaaatgagcctctgttcactttattcaaagagtatttttttcctctgtgaaactaggtagaactgaggaggaatcaaagaaagcctcatatattaaactcttaaatagattctttgaattcaaagtaagggtcaataggagaggcacaggttgtgggccttgtcccagcaaacaaagccaccaaggcagtcctgcaaattaaggaggatggcaaatctgtctcttaaaaaaaagttcttgaggggaaaaatataaaatacctaagtttcaaaagccggactacttccatacccttcattctctaccctggagtgtccagagatagagagtttcaaggtacgttttcaatgattcagcttttgcaaacatatgcaaatacattcctcatcagcagtcctgttttggcgattaatagcaagcaatatgcttggattagaggtccgatttccacttaaatgcattttcttctcttcttggcaatgaagtcatttgcggagatctgaaagtggggaagactgtgttaggctcagagtaacaattctgaaatagatcatttatatttatacatgtgattgcagaacatactgtcttcatccattcgcataagcatgtaatgttttaagaatgcatcccagatggccagagagagtttaaatttaaaaacgtttcctgggttcttccccacatctcatcttgcatccacttgacctcaaatatacacttttcttatggacacagagcaaatgacagtgattatgtgataaatactgatgaattcttggaggcaagagaaggactcatgtttgttcaaggccaactctgtacccaggattcagctaaagcacctctatatggtatctcatttaaacagtaaaacaagtaacaaatctgcttttgtcaatgagaaggtccaggattctactaatgatctgcagaaaggcagcgagggaacagttagtgaggaacagggaggaaagctgtttttcatgagagggttcttttctttggaatagaactatgggatcttgggtaggtgtggtggctcatgcctgtaatcccagcactttgggaggctgaggtgggcagatcacttgaggccaggagtttgagaccagcctggccaacatggtgaaaccccgtctctactaaaaatacaaaaattagctgggtgtggtagcgcacacttgtaaccccagctacttggaaggctgaggcacgagagtcacttgaaccccagaaggtggagattgctgtgagctgagatcgtgccactgcactccagcctggggaacagggtgagactctgtctcaaaaacaaaaactctgggatcttagtgcaactcaagatgggaaccctaataatgacagagtccttgcaggttggagcaaagtaaattgaaagaaaaactaaaacatatgcygattgtttaaaaatagatacagagactaaaaataagagtccaagctggaaggtgtttccatgtaaaataacctctcttgaggtttcctttaacctgatcatagaggctgggggacagaaggaagtgagctcactcatgcagccttaactccagtgcccaagtccacagcgagggcccagcacttcacggtttccaagcactcccacctgggccagctcacgccatctcatggccaacctcagaggtgggcaatgatgaatgcccattctccagatgaagaaaacaggggctgaagggagttaaacctggagatcttaaatctttgaattaccaagttcaaaaaatccctttcccgaccccttagtagaatatggatggataaatgtgcacttaaaatcattcactaaaagcaaacctgggaggaattctgtcccttggtggctgtgtagccttgggcaagtcaaagcccttccttctctgtgctttggttttctcttctgtaaaatggaatgatcatgtcatccgcctcccaaggatgctgagggttaaatgagtaacacaggaccagtacctggcccaacggccatgggggttattcttagaacagaacgacttgtgactgttattagaacattaattgctctggcccaacgctgatgctgtttttagaagccagactggcagacagcattctgtgcaaaaatggttccagaatctccccctcccccatcatagtggtgcttcctgccctgtccccagtgtcagacaaacctttttctggttggttcagcgttaatccctctccctgtccttgatccagagctagaaaactaagccttgattctataaatagcacccccagtctgtcaccatggaaacctctgatggggctgggtcagcccaccctagtggacatgtctaccccagggaggctctggaaggacagaaaagtggcttttcagaaaagtggctccggggccacccagaagcagcgggaacccccagtgaagtccacaggcttacctggaaatcacgagcttcctaagtgggaggaggtgctgttctggttcacctggagaaagacaatacacagaagaaggggtcacggccaggtgagggatgccttgctgtattgagggtcacccctcagcatcactgagtcatgcacatgcttattcacgtagtatttactgtacatctactatgtgccaggtgctgggatagcgtggtgagcgggacagacccaaacctaggatcacggaacttacgttcgagttgaagaaaaagcctactgaacacacacagatgcaagaaaatgtcaaacttgggcaatatgacaggctgctatgagtgatcagtatctgtgctacttcaaaaacggtggccaggaaaggactctacaagatggcatttcagctgtggtataataataaatatttgttcattgtccccagttcctggcacatagctccccaaactcttggaatctctgaaggaataagggtatcttggccgggcgccatggctcatggctgtaatcccagcgctttgggaggccgaggagggtggatcacctgaggtcaggagtttgagaccagcctggccaacatggcaaaactctgtctctactaaaatacaaaaattagccgggtgtggtggcgggcacctgtaatcctagctactcaggaggctgaggcaggagaatcgcttgaacccgggaggcagaggttgcagtgagccaagatcatgccactgcactccagcctgggtgacagagggagactaggtatcaaaaaaacaaaaacaaaaacaaaaaaaaaacaaaacgtatcttttgcatgctaatgacatgactaatggctgggggtccctagatagcttcaggattaggggaaggggtctcagaaagaccaaggcatgattagagggttggaactttttttgttgtttgagacggagtctcactgtgttgcccaggctggatggagtgcggtggtgcaatcttggttcactgcaacctccgcgtcctgagctcaagcaattctcctgcctcagccttccaagtagctgggactacagacgtgtgccaccacgaatggctaatattttttgtatttttagtagagacagggtttcaccatgttggcccggctggttttgaactgctgacctcaagtgatctgcctgcctcagcctcccaaagtgctaggattacaggcatgagccaccacacccagccagaaggttggaactttaagccccacctgccttctcccctccctgacctcctgggaggggagaggggagagggtctaggggctaggagctggagattgggcaatcacccatgacccatgatttaatcagtcatgcctctatgatgaaatctctaaatgacagaatttggaaagcttcctggttggtaaacacattgagaggctgggagggtgtcatgccgggaaagggcatggatgttctgtgacccatcccccatacctcaccctacgcttcttgcatttgactgtacctgagttgtattcttttttatgagacagggtctcactctgccacccaggccagagtgcagtggcacgaacatgtgccacatgtgccatacccagctaaggctttctcttttttgtagggagatggggtctcactgtgttggccttgaatttaaaaaaaaaaaattaatgcgatctgagagctagggaccatggcttttgagcatttcctggttgtttggggagaggtcccactccctttgtgggaatcagagatctatcttttgctgacgtcaagaaagtagccagaattagtgagcactaatttagtatttgttttaaccaaaaagatgatgtaggcagaacaacacagtggggatgaggagaattatccacaaactgaaacttctcatttttgcacgttgccttcgtttttgttgttgttgttgctgctgttgtttttaagagacaggggctccagcgatcctcccacctcagcctcctgagaacctgggactgcaggcatgccactgcacccaactcctgcgtgttgcctttttttgtccacctgaatatgcatttttacattagttgcaattgtatagtatgagctgctttgttttgctttcttactattttttcatcatttgggtttcactagcaccattttggatggctacagatattctgtggagtgcatgtaccaccgtttactgactgcttacctaagaatggttccaatttttgcagtattttaaatgacatcacatcctgattctgcctctcttctgttgggtactgaagctctactgaatcattcccttagaattcacttctaaaaaatggaatcatgcttgaacccgggaggtggaggttgcagtgggctgagatggcgccactgcactccagcctgggtgacacagtgaaaccccatctcaaaaaaaaaaaggaatcagcaggagcaggtggaagggttcagatcttttgaagactcttgaacaacaaggctaaaagtgttttacaaaagggttggggtcaggagcagtggctcacgcctgtaatcccagcattttgggaggccgaggtgggtggatcacttgaggtcaggagttcgagaccagcctggccaacatggcgaaacccctttctactaaaaatacaaaaattagccaggcgtggtggccggtgcctgtaatcccagctacttgagaggctgaggcaggagaattgcttgaacctgggaggcagaagccgcagtgagccgagatcaccgcattgcactccagcctgggcaacaagaggaaaactccatctcaaaaacaaaaacaaaaacaaaaacaaaagggttgggccagtttatacttcctgccgtgtatgacatatgcaagatgtctagctgacctgggactggtttttgttgcttttaggaacaaaatatgaaggaatggcatacccccacgctcaggagggctgccctgcagataagttttgtcaagcctctatttccaaccctcatctccctactgtcctccactgtgcacataatgtcattctggatgtcgtaaaaactggaaatggtcttgaagaagctgtttagtaaatggtagcacatgcattccacagaacactacgtagccatccaaaatggtgccggtgaaactcaaaagataggaaaatattaagaaagcaaaacaaggcagtttgaacatgaaaattgcaatgaacattcctgtaaatcacattggggtagaaacaaagaaaaatataattgcaacgaatgcaaaagtgcatacgcactccagaggtttcggccacactccccactttcaggcgtttacagttccctctgccgggaagccttttctatccagatctttgtgtggcagacctagttttaatccttcagatattggcttatgggtgctttccaatatcagtgaccaattctctgattatctggataccaactgggtgttcaacaattcagttcagttctgacaccagctcccagacttacttagcatcagctgccacagattaagggcccagttccacgactgccccactttagatgccagctgcaatggggtgcgcaggctatccacacttcttcccagccaacttcaaatctggaggttcccacaacccccactctggtttgataattcactagaacagctcacaagacactagggaaaacactttactaactgctacctgtttattataaataatacaactcaagcttggacaacatgccaaaaccctgtctctacaaaaaacacaaaaattagccgggcatgatggtgtgtgtctgtagtctcagcttcttgaggggctgaggtgagaggattgcttgagcccaggagattgaggctgcagtgagccatgatcacaccactgcactccagtctcaacaagaaagaaagcccaagaaaaagtccccacgaagtccctccaactgcattcaagccggaagacgaagtgagaggctgcttcctggcagaagggccactgagatgtggccccagctggatcagtgcttagagaccctctggtccagcacgcatccccacagccctttattttttatttttattttttgagatggagtctcgctctgtcgctcgggctacagtgcaacggcgtgatctcagctcactgcgacctctgcctcccagggtcaagcgattctcctgcctcagcctcccaagtagctgggattacaggtgtgtgccactacgcccggataatttttgtatttttagtagagacggggtttcaccgttttggtcaggctggtcttgaactcctgacctcgtgatctgcctgccttggcctcccaaagtgctgggattacaggcagccagctcacatccccctttttataatgggaaaaccatcaaccagagtggagaagtgacacatctaagggcatacagccagatggtggtatagctgagaaagacagaattcggaattccccttggggtttctaacctgaaaatatcctttcagattggctggtgttttatagtcccctttcaagacctaaggaagagaaaaagaaatatcactattatgaaaatggccaaaaaataaaatttagtcattcccaacacatccagtcatccacccatccacctcgccacccacccatccctccatccaacaaacattgcttaagctcctcttcttctaggcattattctaagcattgtgtctggttgacatgatgttaaccagataatggaaattcctgttcccctggagctaccattctagagggggcaccagataacatacaagaaaaataaacacagataaacaaggacatagcaaaccatgggaactgttgtgaaaaaagtacagtaaagaggtgggattaggagtaaccagggggcttcttttgagtgggtggtcaagaggggactcttgggccaggcgcagtgactcatgcctgtaatctcagcacttctggaggccaaggcaggaggatcacttgagtccagcagtttgagatcagcctgggaaacacactgaaaccccatttctaaaaaattaaaaattagctgggcatggtggcatgcacttatcgtcccagctgctctggagctactccagcctcagctgg

SEQ ID NO: 97139 - DNA, 23198 bp, Homo sapiens
cagggggcggcactgaagcactggtgttcttgggaaaatggagctgtctacaagctctagtcactcaaacaaatataaatgagagaatggaaaagcagatctcctgttcctgtctcacctctttgggtaatatgaacagccagtgggacaggtaaaacccctgtttctcagtcctcagctccctgccccctacctctgaaggtagcctcttcctattccagtctgaggaccctagggcagagatcaagtaaatgacccatgacctagtttttgcagctcaattgcaaaacacctggcttggcttggtcttgattgggggaagggatgtccctgctatggctcaacttctaactcactgggtctctgtcctgcattccactgaagcctcagaggcatctcacagcactgggaaaagccttggaaacttgcattcaaatctcagcttggccactaattctctgggtgaccttgagtcctctgggctccaatgtgaaatggggaagaggtttagacaatatttagatggctctttaaaagtactgggggccagctgtttgggaggctgaggcaggaggatcacttgaagtcaggagttcaagaccagcctggccaacatgtgaaaccccgtctctactaaaaatacataaattagcccagtgtggtggcacacagctctaattccagctacttggaggctgaggcaggagaatcgcttgaacctgggaggtggaggttgcagtgagccaagatcacgccactgcactccagcctgggtggcagagtgagactctctctcaaacaaacaaacaaaagtaccaggggaggaattaatttgaattttatcctagtgttagccaattggtcccatccaaggaaaatttagaaaagggaaggggatgtgtaaaggaaacactaggccccacctagatggtggctggagcttctgatagtcctgtactctccacatttttagactttcttgtacttttttttttttttttgtgacggagtctgctctgtcgccaggctagagtgcatgggcacaatctcggctcactgcaacctctgcctcctgggttcaagtgattctcctgcctcagcctcccaagtaggtgggactacaggtgcacgccaccaagaccagctaattttttttttttttttttttactagagacggggtttcaccatgttggccaggatggtctcaatttcttgaccttgtgatccgcctgccttggtctcccaaagtgttgggattacaggcgtgagccaccgagcccggccatttttagatttttttttatagcccttttacccctcccacttcttgtgctgtcttggtgtgtgtatgaaaaagagagagagagagagaggaaggagagcaagagtgagagaaaaagagaatatggttacttagccctttttcccaaatctgtttttgcttttggggataggatatggttatggtgaagtactccacacagaccccaccaagtttgcctctcctgcgctacagccactgagcaggtgactgaggcgctgttgatccagggtcatatccttactcgccctagaatgtaagctcaggcagggcagaggccatgcctgacatgtgcatcccaatgctttacacagcctaggtgcctagcacatgctagatgcttggtaaatatttgctgaatgaaagatcaaatgaatgattgcagcaagcaagtcctgtaggcatcctggagcccaaggattctgcagtaggcagctttcacagaggttcttccagtgtagtggctctagctctgggtgaagtaggatcatcaatgtcggcccccagggttcacagctgttctgagccccgcccccaggtggcagggcagcccagtcagtcagtcacgtgctggcggctggccaatcatcgggggcggcgcggggaggggtggtgtggacggagaaagtgaaaggtgaggcacggccctgcagattttccagcggatcccccggtggcctcatgtcgcgcagtggaaccgatcctcagcaacgccagcaggcgtcagaggcggacgccgcagcagcaaccttccgggcaaacggtaactgcaccgcggcagggactcgctggggcgcggagccgagccctccccttccttaggaagctttcgtcccctccgaaggttggaacgctcatcccgagccagaccgacaaggcgtacagtctgcaggcctgtacgagcagcaggccaattggcgctgggaaagtccaatcctgggcctctagctcctgagcgggacagggccgagagggcgctcccgagcttgggcctgctggtgggtgagacccaggagagagggagctagagagctctgaggactgatcttgactgtctgcccccagaccatcagcatatccgctacaacccgctgcaggatgagtgggtgctggtgtcagctcaccgcatgaagcggccctggcagggtcaagtggagccccagcttctgaagacagtgccccgccatgaccctctcaaccctctgtgtcctggggccatccgagccaacggagaggtaagcctgtagagccctgcatctgcaggctgggccacggggagtagttccctcttagaactgtcctccacccacagggatagtgaacctccttctgggtcatatcccaccaagctttttggtcccctagggtgggccttccctactcccttgtagcctgtccagtctttgaagcccaccaggtaactggtggtatggggcagtgagtgcttctagcctatccttgtcggtaggtgaatccccagtacgatagcaccttcctgtttgacaacgacttcccagctctgcagcctgatgcccccagtccaggtaacctggctccaactgctgctggggaggagggtggctagacctcttgagggacttctgctgcagagagtgatactcctttacctcaggacccagtgatcatccccttttccaagcaaagtctgctcgaggagtctggtaactatggatttcccctcttacaactttcaaaccagagttggagactcagcattggggttcggccctgcccgtagcacagccaagccctacctctcggttatcttttctcccgtcaccacccagtaaggtcatgtgcttccacccctggtcggatgtaacgctgccactcatgtcggtccctgagatccgggctgttgttgatgcatgggcctcagtcacagaggagctgggtgcccagtacccttgggtgcaggtttgtgaggtcgccccttcccctggatgggcagggagggggtgatgaagctttggttctggggagtaacatttctgtttccacagggtgtggtcaggagggagttgacttggtgtcttttggctaacagagctccgtatccctatctgatagatctttgaaaacaaaggtgccatgatgggctgttctaacccccacccccactgccaggtaagggtgtcaggggctccagtgggtttcttggctgagtctgagccagcactgtggacatgggaacaggattaatggatgggacagaggaaatatgccaatgatgtggaggcttggaggtaaaggacctgcctgttcttctctgcttttgccccttgacaggtatgggccagcagtttcctgccagatattgcccagcgtgaggagcgatctcagcaggcctataagagtcagcatggagagcccctgctaatggagtacagccgccaggagctactcaggaaggtgggagagagccaagccctgtgtccccaaggagtccctaactttcttatcccatgagagaggtgtgtaaaggagaaagctagaggtgaactagtagagagagacttgctaggaggccttagcaataatccagtaatctaaaggaaagatgatggtgacttagactcgggtggttagtggtagaggtggtgagaagacatcagatcctgggcacattcttttcttctgcttcccttgcctatttgctgaccacactccggctcctatgtcaccttgatgacttcctatccattctgtcttcctaggaacgtctggtcctaaccagtgagcactggttagtactggtccccttctgggcaacatggccctaccagacactgctgctgccccgtcggcatgtgcggcggctacctgagctgacccctgctgagcgtgatggtcagtctcccaagtaggatcctggggctaggcactggatggaggttgctcccagtagggtcagcatctggaccccaggctgagagtcaggctctgattccagatctagcctccatcatgaagaagctcttgaccaagtatgacaacctctttgagacgtcctttccctactccatgggctggcatggtgaggcttttcaagtacctatatttagccccaacaccatttctgggctcctggggctcagcctagtgaactgcaacctcaaaggagcaagccttgaaacagttgctgggggaagtggccagagtagagatgctgggactgagggtggagcagcaaacttggtgaaactacatctccaatgtgctttctaatctcctgccagctcttctcaagcaggggatcctgggagatgtagttttcagatacctggttgggtttgggagtaggtgctaacctggataactgtaaaagggctctctctccccactgtctctcttctttctgtcaggggctcccacaggatcagaggctggggccaactggaaccattggcagctgcacgctcattactaccctccgctcctgcgctctgccactgtccggaaattcatggttggctacgaaatgcttgctcaggctcagagggacctcacccctgagcaggtcaggactcagaacagtctggcgtctccagactctcacatgcagtatgtgcaggcacctgatacttctgttgcccttgtgctccagtcattgcacaaggcagaaaacagctctggcaggaagggactgccaaagttaggagccctagggcctggaaggagagtatggtcctcagatcccccttctctcctgcttcctccagggaacccaacagtcatgaccctgatagtttcccataacaacctgggcattccttgggactcaggagctgctaaactctttcatcccctggtggcttcagcagtccttatcaccagcctcacaatcccacaggcccacccccagtgggcctgtggcattcatatttcatattcatatttcaaaccacaatatccagcaaaatgtctcctgagcacccagaactccataccatcggccgggtgtggtggctcatgccttaatcccagcactttgggaggtcaagatgggaggattgcttgagcccagaagttcgagactagcctgggaaacataggaagccctcgtctctacaaaaaaaatttaaaaagttagccaggtatggtggcatatacttgtggtcccagatacttgggaggctgagataggatcacttgggcccaggagtttgaggctgcagtgagccatcatcatggcatcattgcattccagcctgggcaacagagcaagacctcgtctcaaaaaaaaaaaaaaaatgaagtccatgccaccattcttggcagcccagcccttatcctccttaattgctccctgtcccttttccaggctgcagagagactaagggcacttcctgaggttcattaccacctggggcagaaggacagggagacagcaaccatcgcctgaccacgccgaccacagggccttgaatccttttttgttttcaacagtcttgctgaattaagcagaaagggccttgaatcctggcctggaatttgggcagatatagcattaataaaactgtgcatctcaaacttttatcacatactctaatatcagaggagtgtgaaccttcagagatctagggttaaaagctaaaggcatagctccagctacaacttttctttgtctacagatgtgtaaaatcttgatgcaaaaatctaccccaaatttctgaacaaaattaatattcagtattatatctagcctatagattctcttactcttggtgtaatgacagcattcccagtttaggaaactgttttaaaatcttgtgtcttggttgtggctgaggctttgggaaggccagagccccctttgccaccacccctagggtgtcagctccaagcctgggcctgagggtttgatggggagcgggtgagctggatcctgatcccagtggtcagtggccagatcctgggctgctggccagaaccctggctttgtgagtggctgcagcttggctctgctccagcccacaggggctaaaggggcgggtagggagtgtgtagggagygtgtacgtggctttgtgtccttggctcctccagactctcacatgtgcgggcaccatatacttctgctgcccttgtgccccaatcattgcacaaacagaaacagctctgacagagaagggactgctagagttaggaaccctagggcctggaaggaaggtatggctctcagagtgacctggggtctattcagtcccctctggacctgtttccctggcaacgctgtgggaacaacagtctatgcaacacaggagacctgatgccactggtgtcctccaaattttaaggcgaaggcaggcattgtgaatgatgcagggatggccagaatggtttttgccttcgttctttccccaggggaaccaagcctgtgggtggggaaatcacactaaggctggacagtgactgaatctggcccaggagaaacttggctgcctgccttccagaccagggtttttcttccctgagatcctggaggggaagtacctggaacttgggagtgttgccctggtctggaagatctgatagacatagtatgcacacatttccctcgagcttcccatgactggggagtagatgagaaccctgagtgggtggctggtttcttgaggcatacatatacccgacacaccttacacctctgatttggctgcattttggaatcatctgggaagttttaaacaatactggtgcctaggtccaacctccagagactctgatttaattggtatggggtggggttttgcagttttcaaaccacaatatccagcaaagtttgagaaccactgccctacacagccctccttcttctttatcttatctggagtcaggggcaccttcagcttctccaatcacctggccagtggctcttgtttccagtcctgctgttccagggtggataggccttcaggcggagacccaggaatccagctccagactctgtcccaagcagcctcttcagtccgggacgggacaggaagtgtccggcggaggtgggggtggaggtgattggcagttggagtctccaatgggccaggagcccccctatttcactcctctccttccattggcgcctgggcggagccacccccgctgcgggggcccagggcgggagggagtagaggccggggcagagggcgagggcgagggcagagggcgctggcggcagcggccgcggaaggtgaggcctggtgtagacgccaaagtcttgtcaggagtgggcggggcagggtgatgtatgatctgaaaggccgggagtgactaacgactgtcagtgtgtrtgtgcctgtgaggctgtgtctgtgtgacagtatcattgtgtgcgattctgagtgtcacttggtgcagctgtcagctaatgtgactgcgtgtgtcagtgtgcatggagctggaggtgcatgtggctgtgcaagtgtgggattatgtgtgtatctgtcaatgcacatttttggtgggaytgggttgtgtgtttgtgtgagagggactgtgaccacatgagggaatgtgttttgggaaggtctctgtggggtttgagaccatgtctgccakcgtgagagtgggtggctggctttgtgtgtgccaatgtgtgacttcagcagtagcagagcaaaagtgaggtttgtgactatgtgtgtgtcctgggtcctaacttaaaccgtgtgggagtacagctgtattcatgtattgggggacctacctcaagagcccatgggactgacctttctcttaagtgtccagcattgacagacacacccacaacacacgtggcttcccctccttcctctgctcaagaatccccagcatcaggtctactgctccttattttctgtttccctgcttggctcagtttcccttacgtgccgttttctgtccctattgctgtcttactagagatacctctgtgtgtttcttcacagctttgttcccctggtctctctgtgtgggtgcatttccagttttgcctttcctkyctctctgtctctctctgtgcccctatgcctgccttccctgctgatcttgatctctggctagttgggggcctgtaacagtgatgagatgygggtctgccccggctaagagctccctgagagagggggcttagaccatgatgaagagttgcttttaggcggtgctgtgagccctggtaggggctgtgtgcgtgtgtgactgcgtgagtgtatgaatatgtgtaagtgtgtctgagtctgaggyggtgtggctgtgcccgtgtgactgtgagtgacygcatgtgagagtgtatgagtctgagggtaactgtgggtcttgtgtatctggcaccaagggaccaaaggcatttcctggtgctggggcccaaagaatggagggggaggtgagaaatggctggaacttccaggggagggggaactggactctttggcctctccttatatcccccaacctggggcctcccttcccctggaagcacagccagctgtaccctaaggaaacatttggtgaggagtgraaagagggggagtttgtatctgatttttcatttgattgtgtccacgtgtgttcaaaggcatgcccttttgttaactgtgcctcttgagtctgtgtgtgaatgtgactgtgtctggctgtgtgaaaacacagggcatctctcactgacagggacataagtattagccaccctcctttccctcttgctggccttggctgtgtctgtggcttcctttccagacttgggggaggcctcttcccttcccagggccttgggtgggagggaaggagggaggaggcaggagcagggagggggcctggctaggggcggcagagctccagggcttagagggggyggggcagggaaggggaaggaggggatggctctggggtcccagaactgagtggagtaggagacgggggctgtagctggtgagaggaagtcctagaggctatggacactctgctgctgggatcaccgaggtagggtggggctaagcagggtaagtgtggctgggtggccaggggtgagccaactggacacactcagacagacacacagacaggtggaggccctgctctgctctactcctactcctgaagggtccgtgctcttcctcttctggtcktgttcccagagccctttccccgcctgccccttcgttctccatccacttcaccactgccttcctccttctgctcccccttgtccagaatctctctctcctagcatcccccacctgccatatagacacactgttagctttttgagtttccgctgaccccaatccagtctttccaacacttcccacactgccccatcacctcctagtcctgatctctgagtatctcttggtgctgtggcccccatgcctgtccctgcaggctcccagttcctctcagcctctcatccccttccctcccctcccctcccygccaccctgtctccatttccatctgctggctcctsgcccacccccagcctctggcagcagccagggcatctggatctgcttaactacacagccccagcctgcaccctagccccatccagcttcacaaactggagaccaacsaagtgtcaagagccaggcccagctgagtggcccaagtagccagaccaaggagccaggttcaggcgagaagcctggcagccagggcaggggtgggcctcagggtgggagtgcaggatgggctcagatccatgatgacacccttcccccagggtgataaggtctgcctaggttaatcagaggcagtgataagccctggaccaggtgggggtaaataccagaattcccaacagctggactggaggggttaatgggagtggctgagctggtgccagtgcttggtsccaggggtgggcsccaagggcagtggagggggagttgctggcacagtctgttgcctccggcttttgttctgggccctaagcccaggactgagatggagggtgtgagggggtgtgtgtgtccgtgtgtgtgtgtgtgtgtgtgtgcgcgcgcacgcacatgcaaagcactgggtatacagtgggaaaggggacctcaggtcagttcccgcagtgatttctaacagccttaccccacttggtgcatcaatttttctcctaggaagcctcagttttggagaggaagagccaggctttagcctcccatctcaggggtsggggatttttgactctacctctccccacagatgagcagcagctgctcagggctgagcagggtcctggtggccgtggctacagccctggtgtctgcctcctcyccctgcccccaggcctggggccccccaggtgagaagaaccctgctctacaacctcccaactctgacttgtgacttgccaccctcactgtggccccttcccatgcctaacttgtgacaccacccctgctcctgtcatccaacctgggtccyctctctaccctgttctctgacctctgtctccagattataacatgatgctttgatccagtgagscccccaccacccaggttttaacagtctgcttcttatctgtcattctcacaaagkggggaggggggtaaaggaagagccttacctcagaagtgccctccacaggggtccagtatgggcagccaggsaggtccgtgaagctgtgttgtcctggagtgactgccgggtaagtgccccacctgcctgttggtctgacactcatgaccctttcttgactctgcctagtcctcatgtccckcccctcccatcyttgcccgctctgtccgtaatcctcacctctctatctgtcctaaccgtctaactatccttattcaacagaaaattcaactggtatgttttgagcatctgccaagtgccaggtctattctaggctctgggatacagcagtgctaatgccaggcaaggtgcctgccttcaaagagcttacatcttagtggggaagacaataagcaaaggagaatcttgccagatagtaatacctgcagggcagaaaaaccaaagtgagggatgtcgaagaggacaactgagtggttactttttttttttttttttccgagagtctcactctgttgcccaggctggagtgcagtggtgcaatctgggctcactgcaacctctgcctcctgggttcaagcaattctcctgcctcagcctcccaagtagctgggattacaggtatgcgccaccaggcccggctaatttttttttgtatttttagtagagacggggttttaccatgttggtcaggctttgaactcctgacttcaagtaatccacccacctcagcctcccaaagtgctagattacaggcgtgagccaccgtgcctggcccgtggttaccttttaattggtagttaggaaaggtctctctgaggagatggtgttgaagctgatttctgaaggtcaggaaggaggcagccatgcacacattaaggtataagcgctcgtgacagagggagcagctagtgcaaaatgtcctgaggtgggaatgagctcaatacccccgaggaatagaaagaagaccaatgtagctggagttttcagtgggtgagggggagagagataggagctgaagaaggaaaggaaggcaaggsctggctcacaaggggctttgaaagccagtaaaaggaatttgggttctattgcaaatgcasttagaagccaatggagagctgtggcatggtctgacttatgcttgacatcttgtctttgtccattgtcacctcatctcmcttccagggacccagtgtcctggtttcgggatggggagmcaaagctgctccagggacctgactctgggctagggcatgaactggtcctggcccaggcagacagcactgatgagggcacctacatctgccagaccctggatggtgcacttgggggcacagtgaccctgcagctgggctgtgagttggggagggtggcactgatgacacatagggatcctgagggagtatgggacctaagtaagccctctgggaccaggaggacctgaggactgctcagtctccaggtgtaccctctgcctctagaccctccagcccgccctgttgtctcctgccaagcagccgactatgagaacttctcttgcacttggagtcccagccagatcagcggtttacccacccgctacctcacctcctacaggtgtgtgtgtgattgggtgtggatgcctacacatttgggtatgctggtgcaatgtgggtgtgggaggcagggaggtaggttctgaggaaagcctcagagagggcagaaggccctcttttccttcctgacttcagatggccccctccccaccaggaagaagacagtcctaggagctgatagccagaggtaggacgtgagggagcatgtgggggctccagctgggtcccacagtaggcattttcaragccraagaccacatcctcccttctaggaggagtccatccacagggccctggccatgcccacaggatcccctaggggctgcccgctgtgttgtccacggggctgagttctggagccagtaccggattaatgtgactgaggtgaacccactgggtgccagcacacgcctgctggatgtgagcttgcagagcatctgtgagtacccaccccagacctcccccagacccccatcacagagaccccaaatggactcagatctctccactcccagagytcccagtttcctcccaacctagactccatttcacacagagaaggccctgtggagcctgagaaggcaaagggatcagagcccaggaggcatggttatttcagcacacactctagaggctgctgctgctacccacactgcctgattggctgcctagcctcagagcaggccctgtaccgaatgcagccatatgtcatgtcctcccttgctggcccctccttccttgacctgtgcatgggagtgggacactaaaactctagctggaatttgggccaattcatcttccttggatgaaaataggaattgctcttttattcactcaagaagcacttsaaaagtccacccgcagatctcaggtggtttctttttttctttctcttcctttttttgttgagatagggtctcactttgtgsccaggctggatgaagttcagtggtgtgatcttggctcactgaagcctgcaactcctgggctcaagctatcccctcacctcagcctcccaagtagctgggattacaggcatgtgccaccatgtctggttaatttttaaaattttttgtagagacagggttttgctacgttgcccacgctggtctcaaactcgtggcatcaagtgatcctcccgcctcagtcttccagagtgctgagattacaggcatgagccaccacacgcggcctcagcccatttcataatacagatgaccggtctgagtctaatggatgatcaagtttaagatttcccctcccctctcaggagtgwctggctaaggctcctttaaacacacactttgggaagtggtggggaagtgatgragacccatagcctaccctgactttgtgtcttgatgcccttagtgcgccctgacccaccccagggcctgcgggtagagtcagtaccaggttacccccgacgcctgcgagccagctggacataccctgcctcctggccgtgccagccccacttcctgctcaagttccgtttgcagtaccgtccggcgcagcatccagcctggtccacggtgaggcctggagtgcgtcccaacccacggctgtgggtcctgtctctgatttcacgatcctgggtgttctgtatagctttccagtgctggcaggtcactgaagacccaacacttccctgtgggccaggctttgtactgggtgctgggttgcagtggtgactgagagactgaatgtctgtcctgtggggctataactatgaggtaaagcacatctgtgggaagatagcaatggcttttaaaaaaataactttttttttttgagagggagtctcgctctgtcacctaggctggagtgcagtggtgcaatctcggctaactgcaacctccacctcctgggttcaagcaattcttctgtctcagcctcccgagtagctgggactacaggtgcccgcygccatgcctggctaatttttgtatttttagtagagatggggtttcaccatattgcccaggctggtctcgaactcatgacctcacgatctgcccacctcggcctcccaaagtgctgggattacaggtgtgagccacggcgcccggcctaaaaataactcttaggaaaaggagtgcctttcacctagaggcacattctcctacaaacactcatatacccagctgaggatagcagtgaatttgtgtctcaggagatgttaaagattggctggtatcaggactagggagcagcagcatcagataataactaatatttacttagtgctgcctgcctgtggggtacctggctacactttttgcatacattgttttgtttaggtagattcacctctattttacaaatgaagaaactgagtcacagagaggcccaaagggtcattcaatatgtggttcaccaaagatttgaacccaggctgcctgatgccacagcctctctaagtaatcactactgccgtcttacaaacactaggtgtagactcagctccaccagacacccaacatgagacctagacagctccactaggctttaggatgagactgggagcaaggggtgctctttgtagatggtggctgggaaggccctgcacttacaagctgggtaacagtgagtcatgtttacccccaggtggagccagctggactggaggaggtgatcacagatgctgtggctgggctgccccatgctgtacgagtcagtgcccgggactttctagatgctggcacctggagcacctggagcccggaggcctggggaactccgagcactggtgagagacaaagccaaagaaaagggcagaggccccatcccaaagcatctatcagctgaaccagttccaaaagacaggcaggtggsacatgccctgcccacacaggcacggcaattgctgtcccagacttcagacttgtttgcctacagccctgtcttagcttaagtcctgccccttggcctccacccctgcagttacaggctccacttctacaagcttggagcttgccatgctccctaggagctggccatgccctatcaggctcctcctcctaggtaccttgacttccaacctaggccttggccttgagcacaggacgtgacccccrtccccaccagcgtatggacacttattgggtcttgccttcctttagggaccataccaaaggagataccagcatggggccagctacacacgcagccagaggtggagcctcaggtggacagccctgctcctccaaggccctccctccaaccacaccctcggctacttggtgagcttgggcagatgggcaagacttgtaaaggactgaaaaccccagagaaaaggggacaccgagcttggtcaggcttgctctcagtgacatgtggccctccccctcagatcacagggactctgtggagcaggtagctgtgctggygtctttgggaatcctttctttcctgggactggtggctggggccctggcactggggctctggtaagtgactgccattggtccctcagcctctgatcctcacacatgctctgatgcccatagaccacattcatctcyacccttcatgactgcccgctgaacctgtctgattctggaactacctccccatacctccatcccccatgccccacttgattttaactgattcctctcctgaccctttactaataaaccctttggcggagactgagataacccacattgttggagagacagctgcctttctatgccccaggctgaggctgagayggggtgggaaggatggatccccaaagcctgggttcttggcctcagtgattccagtggacaggcgtccaggtgagtaggacatccagaagatttggacttggagatgtttgcccctattttgagtgtccagattaagagctggctgccctagtcattttaaaacatgctgggaatccaagttgggtctcctcattttaatgatgtctaggctgagggctgggcctttcattcttgagtccctgggctcagarktgggtctctttccctcctctcagggtactgaggaaggaccccaggtggacttcccttcagggtattagtattagtactaatactcttccagggtattagactcagagctggatattcatccttttttttcaaggtgtcttggatcagtgctaggtcccctccttcattcttaatgtgcctgggcccagagctaggtccactcccgtatcttcagtgtgttgaagaggctccctyagagctgggctcctctactcatcttcagagtgttaagcttagaactgagtcacctccctcattctcagggtgtctgggccaagatccggtcttactgtctctcctgatttgcctcctgcttcttctaggagctccaaacctgtagaggacccaggagggcttcggcagattccacctataattctgtcttgctggtgtggatagaaaccaggcaggacagtagatccctatggttggatctcagctggaagttctgtttggagcccatttctgtgagaccctgtatttcaaatttgcagctgaaaggtgcttgtacctctgatttcaycccagagttggagttctgctcaaggaacgtgtgtaatgtgtacatctgtgtccatgtgtgaccatgtgtctgtgaggcagggaacatgtattctctgcatgcatgtatgtaggtgcctggggagtgtgtgtgggtccttggctcttggcctttccccttgcaggggttgtgcaggtgtgaataaagagaataaggaagttcttggagattatactcagaaattattatccaatgctgctttattatttggctattgggggcttcagcccattttccttagcatcccaaaattcagcttgggcagagtcccatggagctttctctcttggtgctcaaaccactgtgacaggctggggttctgggggtggatgcagatgctgcgttgagccaggtgaagcctgggtagagaaaggtccaaagctatgaccatagcttggggatgagattagggtcatccccaatgaccctaattaggggttaggagcaaggaccagatgaaaacctgagttggcaacagaattagcagttagggctggggttgggatcagcattaggggttgggactgaggtcagagtcaggggtatcaggggtgggagctcacacgaaagcctggaggtgacagtccccgtcagcctcctgcagttccacctggatgaccttcctcagtagcttgtctgagagtggctttcggtagagctgagtacagcaggcagtgctgggtggcagtaggaatgctaggggcaacagggccatgtgttcagagggatcctgaccaagaacctctctgccagacagctggaggttaggttggatttcctgggtcttttcaacttcatcccattcacccagacccccagctttctatacccccaagtactcacctgctgtagggtctgggctcaggagcaatgacagcagcaggaggctgcagaaggttgggggccccttcatgttgctcagcctagactcttccttctctctctctcctcctcccctaccttttatctgggtgccttttacctggggcactaggtgagtcagaggcagttggagatgtactgtgtaacctgtgacactcctgggccctaattctcggcctgttgccacagactccttcctcatctaggatagccatttcccatgtgctcctaagctctgggcagtgaagctgggggaaggattagtgtgtgatgtagggactgatggaacagtgagtaagggcagtcaagcatccacagcagcatctaatgatagacattcacactcaaatacgcatagccacacattcaaagtcactcctcaatcacttggtcaacctcacaaagtcatactcatgatcagacaaccgtagacaaaattatatagccccggttatactcaaagtccctctcccacccaattgtgttttcacagtcatccaatcacaagcaaattcacactagcacacacagattctgacaggggagttgtgggtggggtgggagcagagggcaggcaagcaccaacttgccttcaccttctcctccccacttcctggcttggcctgcctgtcttatcagaagaaatggatgggaatgggtccctagagcaggcccttctggctgaggagggttcttggctgaggccagccccattcagagaagctgggggaaggccctttatggtaatattaagggtgttttggagatgctgaggtggggcagctttccccaggatgatgagacagggaggaaaggtggggtagataaggagggaagataaaagctctttggtgctaggttactgttgtcaaaacaggtaaaaggcccagtgaatcttaccttcctgtttttgtctagtcctgttccaggaatgccaacctcttgccagcaggggcctagggtctccagatccagtccctgacttgttgaagacattggactcaagcactcaattacatctttgttttactcaaattccagcctccttcctgggcctggaggaacatcccctctccctacccgggttcagtcacaccctcatgtccaactgctataccccctgcatcccaccctccagctatagccgcttctctcctaatcccatacccagctgtcactccgttctttaccccctccccgcaatgcaaagctcctattcatctttatccagtcctttccaggaagctgggagctgcctagggtgggggtatgctgccaagttcagtgcccctggctcctttaagaatttcccactcctggtccagggatctcaatctgcaagtcctgctctatatttgaaacataaaccaagtcataacacagtaatccagcccttatcttgttgcagtcgtctgctgtagggtcagccactctctatggagtaggctttctcttgggatagggcttaggcctttctcttgtgtcccaaggcttgttgggtgtagccactgaggaaatcccaaggaaatctcccaggttcctcgggcttgtcatagaccttcttcatcacttggctgtgcgctacatactttctggtcttccctgggcttgtcggtccagaagtcttcggaaggcagaaaacaaatgcttttgggtgtgcacccatctctcccctttaagaccaagtcttctccccagccacaatctgctgtagctttggccccagccagaaactgggccatctctttctttaacttaatcttgtggtgccctttctggtgctgggtccagtccctaactgaaggcaggcccacatagcagtccctgattctcaccacttgaggagttagtgggtcccaggctgattgggtgacagaagggggcggcagagagcagtggcccttggactctcctagggagggagcaagaacttctaggtaggctgatgccaaggatctctaaacttgggatcagactggaggagccaaaagttggggtatgaactgtaggaaaggtcgccaacccaagtcgctcctctgtggcaggcagcttctaggaatctccccctcttatcatttacagcctgcatcctacacctctgcttaaaatgttttagatatactcccagcagagaagattcttcagacagctggcaaagtcctcgctccgaggaagggagtaacaggcaggattatttagttctcttcatataggcgactcacagtatgggtttttgggggttgggattgggggagacagccattgatagtaacaggaggcctgacactgatgaggggctttgacgtggaagggcacccttccagggagggacgccctgtcagtacggaacagagcccgtgtggggaggggcgctcggctcgaatggcgacagcggcggcagagtcaggaggtcagtacggtgggcttcggtttaaatctttaatgcactggctggctgggcagcggcggtggggctgcggcgggggaagccacgacccgagcgctggggagtaggacccaggccgctggacagacagctcatcaggcctcgcagaggctccagcttctgctccccggggtgcgccgagctgtggggcgacccgacactggcatgaggcggggcgggagctaccggattccccccgatgggtcctcagagactgagtcccgtccatgcccggggcgggtccgcggtatcgcagcctcctcacctccgctccctccgccacatgcgaagccaggggaaaaagtagaaacagccccagtagatcctgcagagagagggcagagccgggcggggcggggcggggcggggaggagctgaccctacagactccgccccgcggtgcctcgccgtcgaggaaggctccgccccgcctctaaaagcggctcccttcgcgcccacgcccctgggaggctcgccctgcccacccctcgcccccgcagaactccaccctcccccaccccggagccgcctggttcctcctccgcagaacccgcctccactcactcctcctccgcctccagcgccacctcgtatctcctcattcccgacatgtcctgggctccgaacgtctcctggggagcggcatgattgaatcagggattccctagccccaggtccccttctccgtcattctcaggacgaggctgcccagttctcaggtaatctgaggctgatgcccccgagaagcctcagttgccaccacgggacagggtgggcttggagatttgggaggcactggaagttaaggggtgaggaggccggtcatctccggggcctggggcatttagggggccagggcgagaggtttggcggtcatggggctgggagatttggggccctgggtgaggattttcaggggctggggtcacctggagggggggctgagaggggtcagcgcagcctaaactcccgccctccctggctccaccccggaaacggaccgttactattacgtcacagggatgccgttgcgcactaggtttgcctgtcccccggaaggggtggggtgttcatgtctcccagaggaggcggagtcgaaacgtcatcttacggggtgaggccaggggcggggtcggttgattaagatgcgggcaaaggaccctcttttataggtgtcaggtcaggttttggagctacaccttggggggccgaggcttccgcagcaggcagcaagaaaagagagttgggactaagtccagtactgttttcttaatccccacgtctcctctacccctccctgggcttctgccctgccgagtgcctctcttgcctgccttcctccccttgtatgaccctgggccgaggaggaataggtcctcagatagagtccagtctagaaaaggccaggctacggaaatacctagttgagtggcctcggctaagtcactgaatggccggagggtcattgcccttcctctctggtctgagacctatcttcttgtgattttttttttttttttttgctacattcattcaatcaacaaatatttgctgaatgaccacctgtgtgtcaggcactgtgctgggcatggggatgtagtagtaaagaagacaggtggccgggcacggtggctcacgcctttaatcccagcactttgggaggccgaggtgggtggatcacgagttcaggagttcaagaccagcctggccaagatggtgaaaccccgtctctactaaaaatacaaaagttagccgggcgtggtggcaggcgcctgtaatcccagctactcgggaggctgaggcagagaattgcttgaaactgggaggcggaggttgctgtgagctgagatcgcaccactgcactccagcctgggtgacagagtgagactccgtctcaaacaaaacaaaacaaaacaaccaacaaacaagacaggcaccttgtctgccctctgagaggtaggggtagagctgggaggatcaaaagagaatagtgagattcttactataaatggagcaggctggctggaagaagtagaaggtgtcaagaaagggcaatcaacccagtgtgggaggttggaaatagctgccccagagctctgacatcccagtcaaggcccagtactgagctgtagtcggtttgagtaaggggaaagacagttttggggctgggctgactgtataggagggagtgaccagaaataagtggggtgaaagtttcctctggttgaaatgtgaggaatggatacccctcttctctccctcatcccaccctctttctccctctcattcttgtcttcccttgtctgagccacatagagagagcagacagagagatccatgggtgctaggtggttttattggaagcactgcagtctgggagttcagaagctatgctttcaccacgttcaccctttcactcacattcacactcatgttgacactccaggcctggctgggtcaggtctggtgccgaggaactagaggcctggtcttcccttctggtccttggttccccaggccagggctgtctctggcactgtcatgggctaactgctgtggctcttgctctgggaaaggaaggagaggaagggccatgggctgtaatcttagacagggctcagagggggcagacaggactggggagggccaggctttccttggcagaggtcttccgcagtctccagtttgtgcaatccatccagggctggtctagaggctgcctttcagtgtggtgaatctggagtcagagagaatggagccatagaactcatcttcctgaaaggccctggtgtgaggggcagatgctggggaccagatctgggaacctgttttaggggcttccttgtggga

SEQ ID NO: 97140 - DNA, 255439 bp, Homo sapiens
tggaattggaaggacagggagattgaagggtagcaagagaggctagagaagagagtgaaaagaccgcttacccgatttgaagttggtaaggtattccttgagctggtctgaggacccgaggtcttaggtggatctcctcatggagtgatggtgaggacaggggacctgtcttccgaaggagtctccctgtcctgggtcttcggcaccaaatgtcaagtgcgtccgtgtgaagagaccaccaaacaggctttgtgtgagcaataaagctttttaatcacctgggtgcaggcggggtgagtcggaaaagagagttagcaaagggagttagggttggggcaattttataggatttgggtaggtagtggaaaattacagtcaaagggggttgtcctcttgcgggcaggggtgggggtcacaaggtgctcagtgggggagcttttgagactcattgtccaggagaaggaatttcacaagttaatgtcatcagttaaggcaggaactggccattttcacttctttcgtggttcttcagcttcctcaggtcttctggatgtataggtgcaggcttgggctcagaggcctgacacaaacaaaaatgtatgctggcaattcctaagacatttctaacattaatgtaacaataattttaaacctagctcagtgaggactaaattctgattttatatcttgctcaaattcctgtgtaaggggtctggggagtcatgcgctacaaataataaattattagatggtttttacttaaccctatatattgtgacttactttccaacctgactgtggcataacattatgagacaaggaagcaaaacaaaatattttaccttaaatcatgtttctttgccatctattgaaatggcctgcaaagctgtcctttgtggggtaaaatgtgcatatataaagaatctctattaacatagctaaatctttttctttcaggccctctcaatcctaaagagattaactaaaagtctagcaccctttgaagatctgaattggaaatatttgtcatctattttctctaagggcagccactataagacttcaaaagaaccttggtctccacagtgttttttcttaacctaaatatttcctttctatgatccctggtctttagacaaactcaaccaattttcaaccagaaaatgtttaaatttacctatagtctggaagcccccctttgagttgttccgtctttctggaccaaaccaatgtatttcttaaatgtatttgattgatgtctcatgcctcccaaaaatttataaaaccaagctgcaccccaactacctggggctcatgttctcaagacctcctgagggctgtgtcatgggccatggttactcatatttggcttagaataaatctcttcaaatattttacagagtttgatttttttcatcaacattagtaaagattttacttaagttatgtaaacttgaaaaagcatttgactattttattttttcctgaataagtgtttgatttaagcacttttattttcttacgccaattaattagagctcttttatatattttcagtagtgaaacattgtgtacacaacacataaatacatagacacattaggcatgctgatagaggtacatctttttttttttttttttgagacagagtttttctcttgtcacccaggctggagtgcaatggcatgatctcagctcactgcaacttctacccgctgggttcaagtgatacttctgcttcggcctcccgagtagctgggactacaggcatgtgccaccacgcctggctatttttgtatttttagtagagacaggtttcaccatgttgtccaggctggtctcgaactcttgaccttaggtgatctgcccacctcggcctcccagagtgttgggattacaggcgtgaaccactgcacctggcctagaggtacctcttatagattcataaaaaacgttttttttccttaggctttcagattctttttttcccctcctccctccccgctactttcagattcttgataacctgtttcacaaccctaggcagttgtcagctaaatagccttaaatttgcatattaaagaaaacaactcaggtgaactccaaacagcaaaatttacattataaagtgtggagagaaaaagtctggtgtgctagacggaaattgaaacagatttaatggccaattaaacataaaattatagaaattataaaagccttttaaatacacacacacacacatcctatagcttttacttcagaacttttagctatgagataaattcaaatttaccggtttgcaaaaagaacttgttggatctaaactgtggtttttatcttaacagaaaataatggcagatttagagcaggcagaaaagaatagagaaaagaggtcttaggaactctataattagtaggtcgaccttagggctctttttccttaatgtaaatgtgcacaaagaccatattttttccattttacataaactttggcagtagaggtgccataaaacctacagagtgctcaaaagagggtcattctccttgttttcttctcattcttagattatttgttttccacttctttttttcttaaaaggagaaactgagctgtggcttagagtttctgtgtggtggatcatcacgtgctgcttgtgggcaggactccacaatgtgccaccactgaatggtttccaccctcttacatgtctcagtttctctctccagaggtttatgacttctgagagggctcacaacactgggtgatcagcccttcaatgtgtttcctggatgagccagtttttaaattaaatatatatatatatatttttttgagacaaggtcttactctgttgccccggctggagtgcagtggcataatcttggttcactgcaacctccactttctgggttcgggcaattcttacgtctcagtctcctaagcaactggggttacaggcacgcaccactacacctggctaatttttgtattattagtagagatgcggttttgctatgtttgtcaggcttggtcttgaactcatgacctcaagtgatctgcctgcctcggcctcctgaaatgctaggattatgtgtgtgtgaccgcacctggcctaaattaatttttgttggggatttccctgcaggaccactgcacatcgttcggggtcaacctttcagacactcccacaaggtccccagtcactcaggggcacctttcagttgggaggggcaaatgccctttctttttggagctgagaaaactcagtctctgatatacctatgaaagcaacagttcagttcctcatgcaaatgcacacagacaaacggaattgagattaatgttgggagaaaaagcaatataaaggatccttcagaacggatctccaaactagaattaggatttttttttttttttgagatggagtctcgctctgtcgcccaggctgagtgcagtggcacgatctcggcacagtgcaacttccacctccctggttcaagcaattgccctacctcagccttcgaatagctgggattacaggtgcacaccaccaggcccggctaatcttgaacttgtggggtcaagtggtccgcccgcctcagcctcccaaagtgctgggattacaggtgtgaaccaccgcacctggcctagaattaggattcttaaacaacgacttcctaggagagaaaattaaaaaaaaaaaaaaaaaaaaaaaaggaaacagccaaaaccacttcctataaactgtgctcagccacccgtaactttgtagctcttttccaacaatatacacaccaaggtcaaatcctctcacagtgcaaggtcatctctggcacccaaagccaaaaaggtcaggtcatgcaatacaggaaaacagagctttagacctaagaagaatctgcccatgactcttgaaatcccacaaagccaagagaacaccccaaaagggggtgagtggcacctttgttctaaattctttttttttttttgagatagagtcttgccctgtcacccaggctggagtgcaatggcacgatctcagctcactgcaacctccgcctcccaggttcaagtgattctcctgcctctgcctcctgagtagctgggattacaggcacgtgccaccatgcctggctaactttttttgtatctttagtcgagacagggtttcatcatgttggcgaggctgagtctcgaactcctgacctcgtgatccgcccacctcggcctcccaaagtgctgggattacaggcgtgaaccatggcgcccggcctaaattctttaaagaggttcaagtcattagaagccttctctcgattttttggtaatgcagatggcaaagggtgaaggaggtatagggtggaagaaaagtaaacaaaagaacaattgaattttttttttttttttttttaatttgagacagagtctcacactgtagctcaggctggagtgcaatggctcgatctccactcactgcaacctgcgcctcctggttcaagcaattctcctgcctcagcctcccgagtagctgggattacaggcacccgccaccatgcccggctaattttttttgtattttcagtagagacagggtttcactatgttggccaggctggccttgaactcctgacctcgtgatccgcccgcctcggcctcccaaagtgctaggattacaggtgtgagccaccgcgcccggcctaagaacagtttaatttttaagaccaggaagcaaacacagaaaccaaatacatggttttttgttttctgtttgttttttcttttgcagctgtgaggaattttactcaaattagataggccttgttacccataatttggaattctcacttggatttgaccaagtgaagtagagttggtcaatgggaaaaagacaaacaaaataaaaaaaaacccaacaatatgatcactgagcactctaatggtaagcagaaattaagaccagctggttgttaactttagccaagacaaaaatccctattcagctacttacctaggggtgcgtctcaggctgaaaacggctgtctaccatcccagaagtaggaaaaaaacccctcatcttccctgttggaagtgagctcaaactccataaaagagttacctgccttccctcgtcatggaagcaggaaaacttgccttccttgttggaagcaagtaaaactccaaaataataataataataataataataataataataataataataataataataatagagggagttgtacaacaaaatgaactttagatctcgaccaaattttgggagatcagggattctctggagggggtgctcctagaccttagcaaattgtcctgttggtttgagccatggagttagctcatgttggtaccaagcatggataggagatttgtcaaagatcagaggtatctccactcacaatccctccgtggttaccatccttcattcagtaaatatttacggactgattaccatacactaggcactattccagacattggagatacaatgatgagcataaaaaacggtctagataagaactgaggtctccagacatactttatgcccactcagttttgtcttttgccctagttgctaaacaaaacttaactttgctgtgcggtgcgacttcgttaacttaaaattacaggctgtcagctatgaccgctagactctaagaaagtccagtggaaatccttcaatgaaaagaatctgttcttgggtggaagccccgctcatgcaggaggaacagagggcttccattctcgcgtcacacaactgagggtcaaccccttgctccctgcagtaagcctgattagtgggcggagcttccttcaggatcgcaagaaagaaaggaggaaggggaccccgcctcctacgtgctcgcgggggggggcggggtcggtggactgggcgtgagttaattggctggggggcggggcaccacgggttggctccgcccaggcgctcgcgcggatcccgggtggaatgacgggagggagtcccggcagctcctacctcccagcgatggcgtcgctgtgccgcgcccagtccccagcctgccggccggtactcaccgctacccggagttcgctcagacggtgagatttggggcgggtccgaggcagcggcgggacgctacctgcgaccgggaccatgaggagctgccagacccgtggggccggtaacgagagcagtcgcggcacctgctgagaggaaagagggagcggtccggcgcggctggggcgcggcagaggcttgcccgatcctcggccatgtcactgctctgcgtgcgcggtgagtgcgcggactgaggcggggaggcggggtgtcggcgtagaggtccccgcacccttccagtggacgtccggtgaccgtctcacccaaactttacatcccgtccgtgctttgggggtctattattttggcaatcacttaacaatcacttgagttctttccactttcttgttttcccccaagctcctgcaagggacgattagctctccattctggtagccatgtgacaatgttgttggactgcaggctcagatcctattaaacagtgactggggttctctagtgagagtggacgagttagaagaccgcggatggttggtgcctgtgaatggtgggcagcctctcattcttttcctcctcctcgcaccgtaacgctacagtatgcttagtagcaggttctttttatcacactttgaatgcgttagtggtacagctgtcacatcccttctattgcttgtcttgtcccctgccacttccctgaacactaaccggtagtataggctaagattattcttctgttccacttgggaggatgtggtgactgcttttgaggataagaggtatgatttatttttatttttattttagcttgcctcacagtaactcaaggtgaagggccattattgcttttcccctgaggacacttgacccatctaagaagatatcttaaagcaagagctttggggtttaagatgaggcatggtacgcgaactaagttctatgtgggtagagactgtttcttattagtttttgtattcctggtgtctgacgtagtagaagcttaatgctggttttgaatgaatgcaagtactgtgacttcagagagattatctgatcaggaaaacacagggtttggattagccattgaatttgatctcgggaaattcaggttacagcctatcatatctgatgtgtcttgattatgaatgagagagcatttatcaactagagcctttacctgatatcttttactggagagttcatatttcttttggctctacagattagaagcattgttgttgtttgtgatttctccaataacgatgtttcccccagctactggcagatgaaactgctttgctctgttctcttccactattttgttgaatctgcattaaccaaaatggatttggccatttcccgggattatgagatatacagtttttcttctttcatggttgatttttcattaatgagaattttgctttgcttttagtaagacattttctctcagcagctgggaatctatttattcctttagatccctgctgctgagtagcaggatttgggagaggttggactttgctgtgtctcttggacagtttaattctctacggccacactgtattacagagctggtccttatgaaagactctttaggcaggagcactcgtgaatcagaaattcctatttaactgaatttatataactactggtgttttcatttgttttaatagcaggcaggtttcattgtctagaaattctgctatttagctaacttctttcctttttaatgttactttagtgaagtttcttcttttttgaatctggagaaacgagatcagcaggccattgtctttttgaatagagatctagaagattttaaatactgaaacaaacaggtaccttatatgcagatattcatattgaatggcaaagtattcattttgggaaaacttacagaaatgaattgaaatacatctttatttttatttctttttctttttttgagacagagtctcattctgtcacccaggctggagtgcagtgctgcgatcttggctcactgcaacctccacctcctgggttcaagtgattctcatgcctcagcctcccgagcagctggaattacaggagtgaaccaccaggcccggctaatttttgtattttttgtagagacagagtttcactgtgttggctaggctggtcttgaacttctgacctcaagtgatccatctgccttggccttccaaagtgctgggattagaggcataatccactgcacccagcacaaaatacatctttctaaaatgacattccttgcgttgtattttggcagtaggaatgttgtattctgaaagcagtctatatagtgatatttattacaactcaatttcaattcatcttggagtagaatcaattagaaacttcctatgcagagttcaaaaagtagttaacttgatgtagaaattggcaaactggtattgaattaatcattcctaaacatttcattcaagaagtcagttattttgtcttgccctttaatcatgccttattgcctgcaggtttaaggctctcaatactctgactccagacttgtggccttctattcttgcctatccttatgcagactttgctctagcactaactttgtttattcctgcctctgctctgttctgcacttgtgccccctgaaatactcgttccatattttctgcctatctaaaatgtattcttactttcccagctaacagtctactttttttgttgttgaaaacttcttcaggtccccagtccacagtgatctctttttcctttaaatcctcggagcacttgtggtctgaacagtgccactagtttggaaatgaatcatatgctgcctgcaactggtcttgtattgtggtgcttatggtgacccagacaaaggaagtaattgcactggtcagatcagatctggaattttgtgttcagctgtggtatttccttctaagaagcatattgagaagctaggttatcttaagaggggagtgattagaataatgaaacatgtaggaaccgaaccatttgaagaatatgggaaatttagttstagaagatttaagaggaagaggatcacgatagtacatgaagactgtttaaaaaactgtcttgtagaagttatgtcaccttttttgttgtcattccagaggacagaactgggacaagtgtggatcagtggttgaaaatgacaggaaattagattttagcttaacataaagaagaacagttgggttgttcagaacaaatggaatgggctatgtagattttttgacactaaacagaaattgaatgagtggtaaggattctaaaggggatattgaccattcagcgggtgattgacttgaatttttttttttttttttttttaattttttgagatggagtctctgttgcccaggctggagtgcagtggcatgatctcagctcactgcaacttctgcctcccaggttcaagcgattctcctgccttagcctctggggtagctgggattacaggcgcctgccaccatgcctggctaattttttgtatttttagtagagacggggtttcaccatgttggccaggctggtctcaaactcctgacctcgtgatctgcccacctcggcctcccaaagtgctgggattacaggcgtgagccactgcgcccggcctagacttgaatttttaagaaaccactcttttatagaattcacttagtctttctttaaatatttccataagtataaagaaatataagtctttaacatgttttggcacagctttacttataatacggatactttttttgggcttccatagggaccagtgccacatgaacaactgcagtaaactaaattaaggattttgtttgacttttattgtcttggtattcacgaccaagtttctccaagcaattataagcatttttagaatcagacctttccataatatttctctgtaattcccagtgtttataacatagttattcccagtgtttataacatagttagataatttaactatggatttttttcccccaaaagtaataaatgcaggccagtcgtggtggctcttgcctgtaatcccagcactttggaaggctgagacaggtggatcacttgaggacatgagtttgagaccagcctggccaacgtggtgaaaccccatctctactaaaaatacaaaaattagccaggtgtggtggtgctcacctgtaatcctagctacttgggaggctgaggcatgagaattgcttgaacccaggaggcaaggttgcagtgagccaagatcatgccactgtactccagcttgggtgacgaagtgagaccctgtctcaaaaaaaatatgtgtatggtaatacattgctaattatagaaaatttaaaaaatgcagaaaagtacaaaaaaagaaaaaaatttccatgggcctaccacctgccaataccattgctaactttttttttaaatttaattttttttttaaagatgggatctcactatgttgcctaggctggatttgaactcctgggctcaagtgactgtcttttctcagcatcacgagtagctgggactacaaggaacacaccaccacacccaactattgttaactttttaattcattgttttcattttgtttttattataaggtgataaatatacagataagaagttgaaacagtttagagtgtaaagtagaaggaaaagttctcttgtccccattcggtattcttacttcccagaggtaactactgtttactgtctcttacctatccttctggaaattttcattgcagatgagtatataggttctgcagttgaatgtacatagcattcttcagctttttttgttttttaacctcaatgatctattttcctgtcaggtcatctgagtctaaaccaagcttgtccagcctgtggcatgtgagctgcatgtggcccaagacggctttgaatgtggcccaacacaaatttgtaaactttcttaaaacattatgagatttgtcagctatcattagtgttagtgtattttttttattttatttttattttttgagacagtctcgctgtgtcgcccaggctggagtgcagtggcgcgatctcagctcactgcaacccctgcctcctgggttcaagcgattctcctgtcagcctcccaagtagctgggattacaggcgcccatcaccacgcctggctaattttttgtatttttagtagagacagggtttcaccttgttagccaggatggtctcgatcaccttacttcatgatccgcctgccttggccttgcaaagtgctgagattacaggcatgagcgcctggccagtgttaatgtattttatgcatggcccgagataattcttcttccactgtggcccagggtagccaaaaggttggacaccctggtctataccattcttttgaatggctgcagagtattctgttatataagcatacataatttaaacagttttatattgatgatattcaggatatttttcttttcactattacaaacagtgctacaatgaacatctttgtaggtttttttttttttttttttgagatggagtctcacactgttgctcaggctggagtgcagtggcgccctctctgctcactgcaacctctgcctcctgggttcaagcaattatcctgcctcagcctcttgagtagctgggattacaggtgcctgccaccatgcctggctaatttttttttttttttttttttgtatttttagtagagaagggggtttcactatgttggccaggctggtgttgaactcctgaccttgtgatctgccctcctcggccccccagagtgctgggattacaggcgtgagccaccacgtccagcctgtagatggtttttaaacatttgtttttatttttgagacagggtcttgcattgtcacccaggctggagtgcagtagtacgatcgtggctcactgcatcctcaaactcctgggctcaatctgtcctcccatctcagtctcctgagtagctgggactacaagtgcatgccaccatgcctgactaatttttctactttttgtaggatggaattgccctattttgcccaggctggtcttgaacttctggactcaagtgatctgcccaccttggcctcccaaaatgctaggattacaggtgtgagccactgcacctgaccagtttttttattattaatttttttctttccaacttttaagttcaaggggtacatatgcaggtttgttacatgggtaaattgcatattgccatattgcaggggtttcatatacagataattttgtcacccaggtaatcagcataatacccaaataggtagttttcagtccttaccctcctcccactccatagatggtttttgttatatgtttggagatctccaattagctttccacctggactttatgtgtaattttctcattgctgttttctttggcatataattatactcagttggaccaaatgcctcggtgtctcagatcaacatcctcaattagaggcagatccttcagcagcaggtaatatttttctatgcctgttgaaaagaccaaagactctgctcttgtaagtaagtttgacctgtgatttccatgtacttttctttcttatttgtattttattttccatatgaacatgtattacttgctttttttttttttttttgatacagggtctcactctgttgcccaggctggggtgcagtggcatgatcacggctcactgcagtcttgacctccctgggctcaggtgatgctctcaccttagactcctgagtagctggaactacaggctttcttgtagagacagggttttgctatgtttcccagggtggtcttgaactcctgggctcaagcaatctgcctgtctcagtctcctaaagtgttgggattaacaggtgtgagccactgtgcccgactgcatttttaaaacagaacaaaacaatgtcactggtgaatggtaacaggaccaagttgatttatattatgatttgccctttaaaaaactcgttactggacaggtgaggtggctcatgcctgtaatcccagtactttgggaggctgaggcaagagaatcacttgcatccaggagtttgagaccagcctgggcaacatagcaagaccccattcctactaaaaaaatatttaaaaattagctgtgcgtgttgacgcatgccggtagtctcagctacttgggaggcgaggcaggaggatggcttgagtccaagagattgagggtgtagtgagccatgttcatgccactgcattctagcctgggtaacagagccatctcaaaaagttcatggcttatcattaatcatccatctaactagacacgttgattgtgcattgattctactctagggaaagtccaaaaatatatttcggtttacagccattgtggaaagtaggaatggtaatgatattagagttttcagacataggtataggttggtcagatacttctcatctccttcccccatcctgccaccccctgctgaatgttattgtcatctgcctcagctaactcctttttgctgggcttccatcgatcgtggttctagtagtccctgcccttagagcagagctgtggctgtgttcctttcacttagggcctcaggaagttgattgtgctttgtgtgagccaggcagtgatgggggaaaggaccaatttgctctgctatgctattgttataaactgttctgttccttataagtagcgtattctgtaatttagtttctaaaaatggggtttctgaaagttgggctctttaggccaataagcttaatttttatcctatttacctgtgctgtgtatttcagactttgagtttgtttaaagtttgggctgtgtatcattagtaaatatttgttggatactttctctgtgcatgtttatgacacaaatctgtattgtagataagaggccacggaatctagataggttttaaaatgtctgttatacagtgttcttatataaactcaaataatccattaggattattaggtctgatttggaataagcagaataaattaagttcttccttgagtagggaaataactgcactgtcttgttttaacatttattttcacattgttattattactgttttttttttgttttgtttttgagatggagtctcgttctgttgcccaggttggagtgcagtggtgcaatctcagcttactgcaacctctgcctcccaggttcaagcgattctcctgactcagtctcctgagtagctgggactacaggtgtccaccaccacgcctagctaatttttgtatttttagtagagatggggtttcaccatgttggccaggctggtctctaactcctgacctcaagtgatctgcccactgcggcctcccaaagtgttgggattacagatgtgagccaccacgcccagccttattttatgattagttttttgagactggatcttgctctgttgcccaggctggagtgcaatggtgcgaacatggctctctgcagcctcgacctcctgggatcaagtgatatgctcatttcagccttctgagtacctgggactacaggtgtgaactaccatgcttggctaattaaaaaaaaattttttttagagatggggtcttgctatgttgcccaggctggtcttgaactcttgggctcaagcaatccttctgcctcagcctcctaaaatgctgggattatagtcatgagccactgtgcatttaaagcaagagtctttgagtttgggggtattttatatataccttctctttttttttgagacaggttcttattctgttgcttaggctagagtgccatggtgctaatcagggctcactgcagcctcaatcttgccaagctcaggtgattcttccacctcagcctcctgagtagctgggactgtatgcttgtgcaaccatacatggctaatttttgtattttttgtagagacagggttttgtcactttacccaggctaatcttcaacctgtggagtcaagtggtctgcccgcctcagcctcccaaagtgctgggattacaggcatgaaccactgtgcctggctcctttttttttgagatggagtctcattcttttaccccggctggaatgcagtggctcaatcttggcccactgtaacctccatctcccaggttcaagagattctcctgcctcagcctcccaagtaggtgggactacaggtgcccgccaccacgcccagctaatttttgtattttcagtagagacagggtttcaccatgttggccaggctggtctcaaactcctgacctcaggtgacccacccgccttggcctcccaaagtgctgggattacaggtgtgagccaccatgcctggtctsaagtatagttttttaaagaaagaagtctcactctgttgcccagactggagtgcagtgatgtgatcatagctcactgtagcctcaaactcctgggctcaagagatcctcccgtctccgtctcctaagtagttgggactacaagcatgtgccaccacacctggctaatttttgaaaatttttttgtagagatgggtctccctatgttgcccaggctggtgtcgaactcctggcttcaagcagtccttctctctgggactcccaaagttctgaggtgacatgcatgagccactgttccctaccccaggctagtttattttgattaacatgtttgtcagattcttccacttgatgtgtgtggcagttagttcattgattttcgttgctatgtagtatcttgttagatgcatatactrttgtttatttatttaatgtatttcttaatctcatgacagtgtagattagattatgtggggagaaattggaggcacttgaattatagcaggagtgatttagattaaacataaattaaaatttcttgatgaaatttgaactgccacagaaaagctgtgaaatttatttttctatggctcttcaaaaataagccctatttccttcatttaaaattttatttattaatttttttttgtagagatggggtctcactatgctgtccaggcaggtctcaggtctcaaactcctgggctcaaggcctcctcctgcctccgcctcccaaagtgctgagattacaggtgtgagctaccatgcctggcccctttgttttttttttttaaattgatatgtcatagatgtatgtgttttggggatatgtgtcatatttagataaattcatataatgtgttaatgatcaattcagggcaattaggatatctgtcacctcaaacatctttcatactgggaacactggaattctcttctggctatttggaaatctacaatagattttcattaactgtaatcatcttactgaactatcgaatactagatcttattccatttatccaactgtatttttgtactctttaatcaacctttcttaatcctccctctcctgtttcctttcatatactatattaggtgtaactgctctggatgaggaaggttagataaccagctttgcatttcctgttttgttgcagtcttttctttgattactgggaaatggaataaaaatgtaagcatatggttaaaatgttgtgttcacctttataaagtacattaaaaaattcttttgttatctttagtaaaaatgaaatgtactttctcaagtgtgatgtccagaaataattatccactgggtgtgtgagaaaggccaatagaatcaaaggaaaaagaatcatgaaatcttttttttttgtgctgatgaatcctttggtgataaaatatgtggtaaaaatgtgacaggaggaagtttgtgctaaggtgtaaggtctatttttatcctgtaagtagggagaagcaattcttagtcattaggaaatataggtttccaaaaagaagagtgttgttttcctgctgctgcttggttctctcttttgctatagtaagtgcttctttagagctgtagaagacaggcctgtggattgtgttgggctgtcaattttctcttgcaactgtttgctttattgatttctatagcgtttcattgtaaatgatgttgagaagaggttagagggcagggagggagatctgcctagcaaccaataaggggctggcagttggacagtgggaagataattgcttttatataattagagttggggcaaagatgattcgaaaggctagattacttacatgagccaaattagttatgaagcaaattttagagactttgtctgcaaaaggatagaggaaatctgcttgccaaggaaaggggggtaaatgatagatataaacctgtatgtctacctcacttcagccctccattcccacaattacaccagagagcatgtcactctttggaatggtgctctccttttgtaatcttaatcttcataatctatctttttttttttttttggggacagagtctcactttgtagctcaggctggagtgcggtggtgctatctcggctcactgaaacctccacctccctggttcaagcgattcttgtgcctcagcctcgtgagtagttgggattacaggccctcaccaccatgcccggctaatttttttatttttggtagagatggggtttcaccgtgttgcccaggctggtctcaaactcttgagctcatgtaatccgcccgcctcagcctcccaaagtgttaggattacaggcgtgagccactgtgcctggccagaatctatctgattgtattctttagcccatttttacagcttatactcttgctatgctttaaccactgtgatataaggtagatgttaaaagctttggttttagacagacatggcttggtgaatatatcagctccaacgctgtgagttgtctgcctttccatatgttacctcatctcattaaaccttaatttccacatctttaaaattcatatatttgttagggtagtagtaccagtgatggtgaaaatacctatagcaaagtattgctgacataattgttgtgaaagtgattagtactgtcccaggcatagaatgagtacttattttaatataaaaacagtattaatattcttcatccagctttatgatatctattcatctaagacagggagctgaaagtcttcctagacctctctctctctctcctttttttgagacagaatctcaccttttttgagatagtctcactctgtttcccaggctggagtgcagtgatttgatcccagctcactgcagcctcaacttccagggctcaggtgattctcctaccttagcctcctgagtagctggaactacaggtgtgtgccaccacacccagctaattttttttttttttgtcggggggcagggtctccctctgtcctccaggctgtagtgcagagtgcgatctcggctcactgcaacctctgcctcctgggttcaagcgattctcttgcctcagactcccaagtaactgggactacaggtgtgcgccaccatgcttggctaatttcttgtatttttagtagagatggggttttgccgtgctggccaggctagtcttgaactcctttttttttttttgagacagagtctcactctgttgcccaggctggagtgcagtggcacgatcttggctcactgcaagctctgcgtcccgggttcacgccattcttctgcctcagcctcccgagtagctgggactacaggcgcccgccaccacgcctggctaattttttttgtacttttagtagagacggggttccactgtgttagccaggatagtctcaatctcctggttccaccgtgttagccaggatagtctcaatctcctgacctcgtgatctgcctgcctcagcctcccaaagtgctgggattacaggcgtgagccaccgcgcccggccaggtcttgaactcctgaccttaggtgatccacacgcctcagcctcccaaagtgctgggattacaggcatgagccaccgtgccccgccatttgtgtagagacaaggttttgccatgtggctgaggcttgtctcgaactcctgggactcaagtgatctgtctgcttcagcctcccaaagtgctgggattacaggcgtgagcccctgtgtccagcctagacttctcagttgaggaagaaaatacaaagagagggaggaaagttgggttccgttgagtttgtgggatctgtgagataagttacatgtgagatatattgaattgaatgtatcagtctcattgcagatgatccttgaaaatggtaacccaaatgtaggtttgtagcttagtagagaaatctgttagagataaatatatggaagttgcaggtatttggtaataaagacattagcttgaattaaaatacttatggagggtcagaaaggagaaaaaggggctgatgctgccgccaaggaactccagtgtataggaatgggcagaagaggagttgatagatgtggtcagaactgtaggaaaatggagagtgttgtgttagggtctgtagcctagagtacagcgagtttcaagaaggaatgatcagatgatagaggtgaaggagacttgttgaggtttaggaaaaaatgaagagatcattggatttgaaaacaaggacagtttcatttgggtaatgtgagggcaggcagtgtattatagtagctgatgagtatttgggcagtaaagaagtggaatgagcaagtgtaggctacacattcagaagttctgcagtgaagagtagggttaagagtagtcttaaaggccaggcgtggtggctcacgcctgtaatcccagcactttgggaggccaaggtgggtggatcacttgaggtcaggagttcgagaccagtctggccaacatggtgaaaccccgtctctactaaaaatacaaaaaaaaaaaaaaattagccagacattgtgctgcatgcctataatcccacttatttgggaggccaaggcaggagaaatgcttgaacccagaaagcagaggttgcggtgagctgagatcacaccattgcactccagcctggttgacaaagtaagactctgtctcaaaaaaaaaaaaaaaaaaaagagtagtcttaagaagaaatttgagtattttgtagcttgaagggaaggaatctgtaagaaggggaaagtcaagatgagatggggaagggagagatgataactgatttcttttgtaaagtaggatgcaaaattatcagctgatagtgaggtggtggggatgatttagagagcttgaggagagtgcaaagggttcattcatttattctttcaacaactattgggccgggtgtggtggctcatgtctataatcccagcattttgggaggctgaggcgggtagatcacttgagatcaggagtttgagaccagcctggccaacatgacaaaaccccgtctctactaaaaataaaaaaattagctgggcgtggtggcaggcgcctgtaatcccagctactcgggactctgaggcatgagaatcgcttgaacccaggaggcagagattgcagtgacctgaaatcgcaccactgcactccagcctgggagacagagcaagagtttgtctcaaacaaacaaaccaacaaacaaaaacaaaaaaaccccacaactgttgtgctaggcacttggggaggaatggtgaggaaaaaacccctttccttcttggaagtttatatagactagtaggactacggaggagttagacattaaacaaggaagaatcatacaaattaatataaaattacgagtaggaaaaaatacaactgatttgtgctataaacgagagtacatgttattataagaacatgtgttaaggaaagttacctacacagatcagagaagtcctccctaatgaagtgaagactgaactgagatctagaagaagaggacactattgagagaaggagaagaatattctaggcagaggaaatagtatgtgcaaaggccttgcagtgggagaaggatctgagagaaggcaagtatagccaatattccaagagaaagggaaaatatggattaagatgaagctggggctcctgacctcaggtgatccacccgcctcggcctcccaaagtgctaggattacaggcatgagccacagcgcagcctggccaacatgacgaaaccccatctctatttaaaaaaaattaaaaaaaaattagtcgggcgtggtggccggtgcctataatcccagctactcaggatcctgctgagacaggagaatctcttcaacccaggggcggagatttcagtgagccaagagtgcgccatctcactccagcctgggtgaaagagcgaaactccatctcagagaaacaaaaaacaaaactatagggccttgtaggcaacataaggtggaaagttagcgagaataagaccgaggaaggggcagaagtatagaagtttataaactgaaagcactgggtttctactttgatttgtttgaatcctttttctaccagtgaaagcttttggcaagcctcttgactaccaagccacaattttaaaatggaagtgttaacatctgccccatgtaccttcataaagttgatgagaattacactcttaagatcatgtgtttgaaattctattgtataataacttttactctcagtcctttttatatcttgtttgtagagacttaactgttttgaaacttataaacaaacaggatatgatcagttccataaacatttattgagcacttaactatgggtgaggcattgaacttgtcaccctgggtatataaaaatgaggaagaagtgggccttgccctcaagaaattgagggcaaagaaagggtgacagccatgtgtacagctaagcatgatgcaagacacaaatggataatttctaaaacagaaaaaatataatggattgtagaaattccaactgagggacagggaagaactgtagaaaaagtcaagttttccattatggtgtcactcattaattgggatacgaagcatagaaagaaagaataacaacttctggggagatgatttgggtgttggatatgttgaatttgaagagttggcagtccacgtgttaaggttggaaatgttactcaggagatcagggttagagtagatttggtctgttctttgtggatctgttgtgtggaggcacggtgacagggtaaacatatactcagcatcatcattataatatactccatttcatccactataagatgccatagattgtaagaggcatcattattttatgtattatttgaaaaatactattgctgggcacagtggctcatgcctgtaatctcagcattattgggaggccaagacgggtagatcacttgagtccaggggttcaagactagtctgggcaacatggcaaaaccccatctctacaaaaattaggcatggtggcacatgcctgtagtccctaatacttgggaggctgaggtgggaggattgcttaaacccaggaggcggaggttgcagtgagctgagatccgccactgcactccagtctggaggacagagtgagaccctgtttcaaaaaaaaaaagaacaaacaaaaaaacacatacacacacacatacaattgattgctctatgacatgtcattgattgtaagattcatttcaatttcagagtggttacatatgagaaaataggccagtggctcacacatgtaatcccagcactttgggaggccgaggcgggtggatcacttgaggttaggagtttgagaccagcgtggccaacatggtgaaaccccgtctctgctaaaaatactaaaattaactgggtgtggtgcacgcctggattcccaactactctggaggctgaggcagaagaattgcttgaccttgggaggcggaggttgcagtgagctgagatcgcaccactgcactccagactgggtgacagagtgagacagcctcaaaaaaaaaaaaaaaaaaaaaaagacaatgtctcaccatcttagaatcaatgaaatactgaagctaacatttaatgagtctttactctttgccaataagtaggtaagggttaatcatttaattcttgtaataaccttgttatcctcattttacaaatgagggcactggcctactgaagtttgtccttttccatactgaaaagctgaatttactttttttgctttactcttaactatacaatacaataccaaattaattatacagggtagtgctttggaacatgaataaaatctatttttaataaaagtatttagggaaagatggctgttatgcattgttggctgtgaatcagagtctcactatagctgtggtttctgtttgcttaggatatattygtggacagcattatagcaggtgtttcatagactggagagttcattatggctctagtttaatattttcataaaaaataaaaggagtttaataaaatccctttttttcttgggagggagtgtggtataatggaaaatttgggattctagagaactcttgaatctcgctaggtagtgactaaaactgtatctataagtaagtttcttaacttcactaagaatcatcttctggccaggtgcagtggctcgcgcctgtaatcccagcactttggaaggctgaggcatgtgcatagcttgagcacaggattttgagaccagcctgggcaacgtgacaaaaccctatctctacaaaaaatataaaaattagctgggtgtggtggtgcatgcctgcagtcccagctttttggaaggctgaggtgggaggatcacttgagcctgggagattgaggctgcagtgagccatgatcacaccactgtgccctagcccagcctgggtgacagagtaagactctgtttcaaaaaagacaaaaaaatagagagagatgatactttagtggttttagttttaggtaaagttaaagcattaagttcagttaattgggtaacatcctaatttttctttacagttcactttagactgtaagagtcagttgcctaatgtaggaattaggtagatggatggctagaatgaccttgtcctgtgtgtgtataatcaaacttgggttatttctgataaacagtaaccatagaaatctgattgtgtattaatgtaaactctattccaactgaggtttatttatttagaaaacatttagaaagatacacttgaacacttgtacatgctcaattataaccttaactgtgtttactttataattagtcattggttttgttagttgaggtttgacgtaagtacttgtttgtcttttggtttgagagagaccttatagagagtaaattttattgatttttggagaaattaatttttttttcaaggacagggtagcatatttatatatatttcatctgtattctttttaagttgtgataagtcgctatgaagtaaagtggaagcctagcagtgatatctaagacttttgagaaatgtttgtgaatgaatgaaactaaagatatatggctgctttgcaagtttagttttgcttattattctatccataccatcagattttaatacaatttattcttttttttttacttgcttcatgtgagcataaattggagcattagctatttcagtcggtgtgaatttggtatcagtactgcagggagagggctgtggacttcaaaaattatgggcttttgaatctgtttcaattttatactgcattgtttaattaagtcagacttggggtacttagcctttctgagttttaatctgtaaattgtaaattacatactctacaacagtgttttttaaaattgtagcagtgtttgtttttgtttttgcttttgttcattagttctgaaatcarttaagtgggtgaccagcgttaggggaaaaagatacagagttttggccaggcagagtggtttacgcctgtaatcccagcactctgggaagccaaggtgggattgcttgaacccaggagttccagaccagcctagtaaacacagtgagaccctgtctttaaaaaaaaaaaaaaaaatgctggatctgtttcagcaggtacctgtagtcccaggtactcaggaggctgactgagatgggaggatcacttgagcctgggaagtgaaggctacactgaggcttgatcacacctctgcactccagcctgggcaacagaatgagacgctgtttcaaaaaacaaacaaaaaaacaaaaacaaaacaatggcatttctttccatattagtgtcctgagtttttctcttttattttcattcaaaaaattttctctagtgccttgatagggacccttatttttcttatttcacagatgtaactaattttaaaatcctttatctttgtttttctatgtttcatgattttaagcaagtctcttagagcaagttgttggattctgttttctaaaaaaaattcagtgaatgtcttttggtattgctgtgtctcagtgatctagaagctgtgttttattgacatatagtaactgagatatgacctgaaatttatttaatctatttctcatgtttctcacctataaaatggagataatattagtacctatacggtactaattataggcatgagccaccattcctggcctggacaactttttatatcaatgaagatcgatctggccaggtgcggtggctcatgcctgtaataccggcactttgggaggccggagtgggtggaccactcgaggtcaggagtttgagaccagcctggccaacatggtgaaaccctgtctttactaaaaatataaaaattagcctggcatggtggtgcgggcctgtagttccagctactcgggaggctgaggcagtagaattgcttgaacccaggaggtggaggttgcagtgaggccagatcagccactgcacttcagcgtgggtgacagagactctgtctcaaaaaaacaaataaataaatacataaaaaataaaaattaagatagatctgcccaccaaactatccttgaaaaaccctaaattctgagtctttggagagattgatttgagtaataactccatctcctgtgtggatggctggacctgcatcagttaaactctttactgcagtgccatggtcttggtgaactggttttgtttgtgcagtgggcaggaagaagctgtggagtgattataggattaccagccctactggactttatttttgaatactacttcttttacatttgttcctatatcatcttcagtaactccaatatctgtgtgttagagctctttatatcttcctacttctcacctttaaaaattataaaaccatcagttttcttgaaagttgactcctctattgctgcttctagtgcatttttatactttttctcatgtttaacttaatattctttctcattgagcttccttttgatttttatctgcctctcagcagtcttcctcagtcttctgcttttcatcttttgcttctgtgaccccccctttttaaaatttagaaactgtgaaaccaatgctgattaaaatttatttttttaacacaaaattttattttattttatttttatttatttttatttttattttttttagtatttattgatcattcttgggtgtttctcagagagggggatgtggcagggtcatagggtaatagtggagagaaggtcagcagataaacacgtgaacaaaggtctctggttttcctaggcagaggtccctgtggccttctgtagtgtttgtgtccctgggtacttgagattagggagtggtgatgactcttaacgagcatgctgccttcaagcatctgtttaacaaagcacatcttgcaccgcccttaatccatttaactctgagttgacacagcacatgtttcagagagcactgggttgggggtaaggttatagattaacagcatcccaaggcagaataatttttcttagtacagaacaaaatggagtctcctatgtctacttctttctacacagacacagtaacaatctgatctctctttcttttccccacatttcccccttttcttttcgacaaaaccgccatcgtcatcatggcccgttcttgatggtcgctgtctcttcagagctgttgggtacacttcccagatggggcggcctggcagaggcgctcctcacttcccagatggggcggccgggcagaggcgctcctcacctcccagacggggcggcctggcagaggcgctcctcacctcccagacggggtggccgggcagaggcgctccccacctcccagatggggcggccgggcagaggtgctcctcacctcccagacgatgggcggtcgggcagaggcgctccccacctcccagacgaagggcggccgggcagaggagcccctcacctcccaggcggggcggccgggcagaggcgcccctcacctcccaggcggggcggccgggcagaggcgcccctcacctcccaggcggggcggccgggcagaggcgctcctcacctcccagacggggcggccgggcagaggctcccccaacctcccagaggaagggcggccgggcagaggagcccctcacctcccaggcagggcggccgggcagaggcgctcctcacctcccagacggggcggccgggcagaggctcccccaacctcccagatgaagggcggccaggcagaggcgcccctcacctcccaggcagggcggctgggcagaggcgctcctcacctcccagacggggcggccgggcagaggcactcctcacatcccagacgatgggcggccgggcagaggcgctcctcacttcccagacggggcagctgggcagaggcgctcctcacttcccagacggggcagccgggcagaggcgctcctcacatcccagacgatgggcggccaggcagaggcgctcctcacatcccagacgatgggcggccgggcagaggcgctcctcgcctcccagacggggcggccgggcagaggcgctccttgcctcccagacggggtggtggccgggcagagacgctcctcgcctccaagacggggtggcggcagggcataggtgctcctcaccacccagacggggcggcggggcagaggcgctcctcacctcccagacggggcagccaggcagaggcgctcctcacttcccggacgtgkcggtcaggcagaggcgctcctcacatcccagacgatgggcggccgagcagaggcactcctcacatcccagacgatgggcagccaggcagwgacactcctcacttcgcagacagggtggcggccwggcagaggcgcccctcacttcccagacagggcggccgggcagaggcgctcctcacttcccagacggggcggctgggcagagggcctccccacatcccagacgatgggcggccaggcagagacgctgcccacttcccagacggggtggtggccgggcagaggctgtaatcttagcactttgggaggccaaggcaggcggctggaaggtggaggttgtggcgagccgagatcaagccactgcactccagcctgggcaacactgagcattgagtgagcgagactccgtctgcaatcccagcaccccgggaggccgaggcgggcagatcactcgaggtcaggagtgggagaccagcccggtcaacagggcgaaaccccgtctcctccaaacatacaaaaaccagtcaggcgtggcagcgcacgcctgcaatcccaggcactcggcaggctgaggcaggagaaccacgggagcccggggcagggaggctacagggagccaagaccaccgcagtacagtccagcctcgacaacagagggagactgaagaaagaaagaaagaaaggggagagagggagacgaaagaaagaaagaaagaaaggaaggaaggaaggaaggagaaagaaagagaaagaagcgggggggggagagagagagagagagaggagaaagaaagaaagaaaagaaagaaaggggagagggagagagcacaaaattttaaaaatgtttctttacctttgagtcctatgttcttacattgttttataatcttttttcttggtcttcaaaacaataaaatattttttcctcccaagaataatgagatattcattcgtatgggggttcccttcctcccacctcaaacatattgagtattcttagatgatctcactttctgtttcctattagaagcctcctcttagattttatttatttacttttcctaaggtacttttgttatagcaagaaggctcctcttggattttaacaaaaagggctcagattgccagttaagtgcctcaggacagtgaggaggaagtcctggctacaaatcacccttttagagaaacttctctttgtggaggatattatttgtagttggctaagatgctatgtcaagttaagatctggtgtggccacattgttgccttgcactagaatagtcctgcttcctcctagagtatatgtcagctctgtgtagcttcctttggtacactagaaaatggtctgccactagtacaaccaactactatgtcctatgtcttgcaggacagttctcaaattctgccaagttgttctctgggtgctgcacctcattgcatccaaagagaatccccctgatttatttagcaagaatgttcttccaaccccgagcttcactytgggctcttgctacagcttttctcaaatcccgctagtttgcagctgttaaaagaactctctataatccgaaaataaaattctaggctgggcatgctggctcatgcctgtaatcccagcactttgggaggccgaggtgggcggatcacttgaggccaggagttcgagaccagtctggcctaacatgatgaaaccccatctctattaaaatacaaaaaaaaaaaaaatggtggcacatgtctgtattcccagatacttgggaggctgaggagggaggatttcttgagctctagatgtagagactgcagtgagccgagatcatgccactgcagtccagcctgggcgacagagcgagactctacctcaaaaaaagaaaaaagaaaaaaaaaaaacaacacagtaaaataaaactctaagccctccagctggctgaatggacctccccccttggccaagggaaacccaaagaaacctgaaaaactacttcagggcataaggagaaggggcatctgatatgcctcatcatacagtgttccctttggagtttagacacaactgaccagcattaacattaaaacagagatgttaagactgacaaaacatgactcttcatagcaccctactaggtgtagaccctactagatctgacatctcttaaggtctgataagagacattcaccacctattctctctgaagcctgctacctggaggtttcatctacatgatgaaaatcttggctttcacggctcccttatctaaactcaagcattttctttatgctgaattcaactcttcaggcagggcttaacttccaaccatttggcaaccaggaaatctttcaatccacttatgacctggaaggtcctcccacccgctgtcccactttgagatgttgaagaatctgtgttgtctgcggtaaatacctggggtttgtcatcttgcaccaggaaaatttaggacacagatacacatgaggagtttaggagcagaatttaataggcaaaagaaagagaaacaaagagaaaggaaaacagttctctctctagtgagagagaggggacttccaagaggaaaaagctgactggtggcagatgtgtcagattttatagtcagtcttgagaaggcggtgtctgatttacatagggctcacagattggttcaatcaagtatgatgtttacatagcacatggggaaggctggccacctcaccctaatcttattatgcaaatgaactttccccttgtctggtgccatcttgtctgctccttactgtacatgtggctggcagagaaaggaacaccgcgcccggccacgagatgcttccttatataaaaatttcttccctttataaccttctttgtatagccagggtgtgacatattaccaaacccaataagaagttcttgcagactcagtgatagtaaaactatcatgcttccttttcgttgggaaccattatctctgctattaggataataattaagcaaaatactacagcaatggaaattctctgtccgatattccggttagaaggtgctaccatctataggtcttactgcaaatagtaaagtgagtatagcaattcctgcaagtgtggtacagtagataatttccatgtaaaattttacttgccaagatatagaatctccctttggggatctatgaagtttcttggttttattttcccaaacagaaacatctgggttatgggcaccctattcactttcattacctggcagatgttgcaggataattgcccagaactagcatattgatccagctttttayattgcccattcctttytgtttcttccaggcttcaggagatcaccacttgattcacaggaataagcgggattagtctaaaatgtagtcaaaaaaacttaaaaacaatcattgagactagaatttagtgacaaatggatgataagctttggagcataatttttctctctccagtctttattttaggtaaaaacaaattatgataggattgtgttgtttgtataataaactttagtcttatacttggcctgattatttgcataaggtgcagaaagaatgatttctacataggccttttgaattggctttgatggaactctgatccacaaggaattttagataaaacctcttagagctgaacccagccatgggtttatatcctcaaatacctgtgagttgggtgatcccctcctcttaaggtcccaagataaacttggagctcctggatctgttagaaagtggcattctttactgactacaggtcagaaaccctggacggggactgtgtaggtaagggtatgaggccagttcttctcatggggcttttattggctctgcaagtctagattgactccttaaatagtttccaaattctagaggaactaggcagagagaaacaaacatactccaaattttgttcacaagagtataacttactcaattattaaaggccataagtagttcaaaataagtttcattgactctgaaaaacaaaacaaggatcagcaatattccaagcaaaagtcagaaagtttgctttagctttgtgagtgcagcccatttagttaactcttattttgcttgatatacatgagcattttagttcttcatagtcctgtactttttttctttattccgtgttacaatctttaaagctattaaaaaaactcacatttgagaacacctgttaaagtcctgtagcttgattataaaccatcttttgagaaagaacaaagcaagacaacaattgtctgcgaatgacaaaatttccaaggtagttatagttaaaagcaagactgacaaataagtttagttatctctgtgatttacaataactttaaccttaattataattgatagcatatacttagacattagaattttagaagtcacatgcaattttggaacatatattagtattcaccaaaatataacttaaagaatatcggacatcattttggcaatcttatgtgacaaaacatgccaaataatmctgtgtacctcttctctggatttttcaggggcctctgaaccatccagaaagccaggcatcaggaaagacaattttgaaacttgaagtttgattttgggacacctgttaaatgtcagaggtttaaaatacttgatgttatgaaatagaatttcagatcgccataaattgcttattttgccaaaatgactcaaaaggcaaaaaccttctattaacctttactattacatgaaaatcctattcaaagtcaaaatttacccttgcattagttwattaatgttagccccagtttgttgaaatgaaaccttatagatgattccatctaattttaaccaatttgaccatgaggtgcaatctttacaaaccttttataaccctttttactaaagggcagattagcatctttagacaaccttgctatacttttatttcaatactcaatttatgagaagaccgtataatgcccttttggatttaatgtttacacattgtttgcaagattaatttttacaatctttctgtaacttgcttaaacctctagctttatcttatcaaatttaagataatccctcatacctgggcaaaatttacatttccatgcattcttataatcttttactaaaaaacgcattttactgtttttatacgccttgcatgtaaaactgtttagtgacctcaaatacatgtggcactgttaactcttagcaacttttacttttggtgaaaaacctgtttagtaagtgtttttaattatgtaccaggtgtggagcctaggacccagacagaagtgcagataaggtctgaccctcttcagcatctaactttcacgtgtcccaggccttacctatctgtaaagcaggcaatttggaacatttagcaaacctagtatctaagctgtatgatttagaccacctatttgcattttgacgacacttgcattttaccaattcttcagactatttttatttcttaaagattacagtcatgtgaactaaaaaatatttaagtgcttatttttctttaacccaattagagctctttttatagacattacacacaacacacatatagcaacacaaatagaagattcagcacttgtaacatttttcatttgccagtttctttttttctgttttttgagacagagtttcactcttgttgtccaggctggagtgcaaaggcgtgatccyggctcaccgcaacctccgcctcccaggttcaagcgattctcctgcctcagcctcctgagtagctgggattacaagcatgcaccaccacacccggataattttttatatttttagtagagatggggtttttccatgttggtcaggatggtcttgagctcccaacctcaggtgatccgcccacctcggcctcccaaagtgctgagattacagacgtgagccaccatgcccgacctgccagtttcttaattggattactcgtttcaggatggagcccttggaggaacagggccaggatagcatgccttttagggcctaagaagcaggcacagctgaaggcaaagaaagatccgcaaaattaacggcgccattttatactggatcttggatcccccaaaggtgggagatactgtggaagaagagagtgcagtgcttctactgtgcatttcatttcaaggcaacccaaagccaattggcttattttgtaatcggcccatccctcatgggagtcttatctctcaatagggggtggggatgtttccatatcttataggtggccaagagcatgcttctctgactcaaatgtgcagagttaagtatccctccataactactattagccattccttaaagtatatttcctacctagttattacacaccaaagctctctcataatgtgaagtaatttgatatccccaaaactcaaaactatcagataacacaatgcaaaacagaactgagcctttgattttgagagggaatgatctgcttttaattcctggggtttcatgaggaaaacagtttttttttcttccccccctcccccaaaacagggtctgtagtgcctcctctgtttttcccaaggagtccccggctaccggaagttatcttagggcctgtcatatgtgcattaagagtggcaagacaaaaaatggagaaaaataattcagtcgactaaaaagaaaaaagactttttccagaaaaacatgatccaagaagagaaaaacataatagccttttaagtatatctataactgggatatccacttttaattaagctgagcactctttcagaaaatccttttaaatcccttgttactaaactttagccacaccaagcagttaagattttcagcttttgaatgtcacaaaaagtaacctcacaggtgagaccaacaagccttaattagtttatgacttaacctccagtgtacaaggtattttcttttttctttttttttgagacagagtctcgctctgtcgcccaggctggagtgcagtggcgccatctcagctcaccgcaactcccatctcccgggttccaatgattctcctgcctcagcctcccaaatacctgggattacaggtgccagccaccacacccagctaatttttgtagttttagtacagatggggtttcaccatgttggtcaggctggtctcaaactcctgacctcaggtgatctctgcctcccaaagtgcagggattacaagcgtgagccaccgtgccctgccaggtatcaggtattttcaaaggggtgataagtaacttttgaaactctcattgcaaaattgtgactgagacagtgaaagagatcagacccaaccaactccattttgtttttagcccctaagctgtccttgctcatcactgggcataggctgaaccaactttgggaggtgtctggtttacagtgtatagtctaaaacaaaggtggtaacagccccttcctaagatatacttccctcttgcctggggaccagaccaagaaactagccacaaaatgagaaaccatggcttaggagtcacgcagctggaggctacaagattttatcctcccttaactgcccaagatcagtatttaagatattttgtaaactctgcccttgatggatcagctggctctgcctagattgataaactggcttatctgatttttggcccttccccgggaactaacttagcacaagacacccacygttgtaaaatggcagagactaaaacaaagtaytgccacgtggttacacgtcatgtttccaagtacatgaaacaagatggaggcctgtagccaagtttgttactgaccattttgttggactggcttgaacagcaggcttatagggtcctgggtctgcatcttaacctaaggtaccctttctttccacaggaccatacagaaagatacacgaagcacaccagattggctacagtttaagaccaacctcacaaatcccttttcattaattaaaacttaaccacaaatataaacaataatccttatcccttttgccagtttggatagggagagagaagccaaaagcctgactggtaagaaaattttacccttttgcccacatgtcaggcttctagttccttttccccagctcaactctaagccaagcatttttaaggtttggaaaattaacttttcccaggttgaaagaacattataaaagcatataggagccattttaagctgtaaaagaaggaaaaataccatagaaaagtctgggggttccagttagagttgttaagaggtattgcttcccttcctatcgacaatgatgtttcctctatttcttgatcttctctattttctcttttccctttttgcttattataggagacatattgtacatttccaaaattctctgccttctgcagaactgcctgtttttcagctgtagtttggggtttggcttagaagcagcataacatcccttcatgagaggttaaacacctgagttaaatttcagaaagcttctatatacctatcagggtcattggagaattggcctaagtctccctttatttgcctaaggtactgtaatgagaagggaacttgaggggcccctgaataagggggatccttagattgttcccctggaagttacttctctaactttggtgaatcatttgctattggcctgcctgatatgactactaaaagagctgggttgattttgtaacacctgcaaaggtctagtaaggccatgcccttgtgcaaaagaaaatgagttgatttttctttaaattattagagtcaaaggagtccttgtgcttcagaatgtactccagaggggtgcaagctgaagatgatctgttacccatctagagagagaagtgacaaaaaggcatctcttttttcaccttccttttggtgtgacccagggtggagaggaaaacagtggggacgtccctcctgctgttttccctctgcggtttctgggtcctggcaccttgtttaatgtgccacccatggttgcaggtgtgacccccagccatggaaccagaggaactaagtgattgggattagtcacactgattcatgcaactcaagtcctctgcctgtgatttcctttgacttcctagacttgtgtgacctgcctggctccctgaaaaatggatcttgggagagactatgcgacagttgcatttgggcaattgttgcacttccctccttaatggaggaagtgtgctggtttgagctctatatcctgctattacagtccatgctaaagtgtttacccttagagaatggttctggttaacttctgaacttaaaatccccttactaattaagtaccattctgattggaggcagaataggtgccttaaaagatcataggggctgagtgtggtggctcatgcctgtaatcccagcactttggtaggccgagacaggtggatcatgaggtcaggagttcgagaccagcctgaccaacatggtgaaaccccgtctctactaaaaatacaaaaattagctgggcatggtggcatgtaatccacctgtgcctgtaatcccagctactcaggaggctgaggcaggagaatctcttgaacccaggaggtggaggttgcattgagccgagactgcacaattgcactccagcctgggtgacagagcaagactccgtctcaaaaaaaaaaaaaaaaaaaaaagattgtagggactaaatggctgttttcctgttgatggagcagtatcaagaataaaatttggttttgaaggatgttttattcctagttgttgaagccagaattttcccatttacagaagcagcatgaagcctggtttgtagtagagaggctcaaaaagggaagagaattgggaagctaggctgtttttggtaaaggactgacaatgtgcctcatgaagaggatccctgtttcactagatggtgctgttgaccttgaaatgccatgtgctttccagaccaagggcagagtgaccttgacacgccatgtgctctccagtcctaggtcagagagagacctggaaatgccacgtgctctccagaccaagggcagagtgacctggaagttccgtttgctctccagaccaagggcagggagagacctgcaaatgctatatactcttcagaccaagggcagagagtgatgctcactgtcggggggagccttctgtttctagaaaatctcaaagacgccttcccttgagctatatcccctacaacgtttcctgatcttgccaaacaaaataactgaactgtaaaacttcrctcacatagcatacacagagagaataggagatatgacagtcgcagacaggaaaggaggaaattatgatagaaaagttggagatcctgttgccaacaccccatcaggtggtcagagactgggatcagtccagaagcctttggataacacctgaaggtagccccagccagaaatcctcagttgctctagaacctcttacagccccgcacaatggctaagtcctccatgaaaggaagctggttcaaacatggccaacatgcccagcaacccatgggtgctgggggattctccattttcttcccagtaaatctcacatctgagtctttaagaatggcagccacgctaaccgtgtttttaactggctgacagatgcccattattgatttgatttagttctaaagtggaggccaacagccccaaaatgaaaggacagagttggattccactcctctactcaccgttttgatgagcgttgtaccttggtatcctgagtgagcaccctgacatgattggctatgttgtctggggtaaatacccagcgtctgtcatctcgtgccagaaaaatttaggacacggacacatacgaggagtttaggaatggaggtttaataggcaagagaaagagaaacaaaaagaaaggaaaacagctctctctctagtgtgagaggggaattctgagagcaaaaggtggactggcggcggatgtgccggattttatagtcttaaggaggcagtgtctgatttacatagggctcacaaattggttcaatcaggtgtgagctttacatagtactcagggaaggctggccaccccaccctaatctttttatgcaaatggaactttccccttggctgatgccatcttgtctgctccttactatacacatggctgacagagaagggaagatggagccactattttgaacatgattggcacacctgccagcatgtatgtctgcagcttgattttacaggctgctctttgttagaaaatgatttgggsctgcttcttattaaaaggaaaaccttaccaaggacttctgtacccttattatctgcctaagtgagttcttcttaactcctgtatcagtgtgccccctttccacgccaaaccaatgtatacttaacatgtatcaacttttgtctttgccttaaaatgtataaaaccagtctgtaacccaaaaaccttgggcacatgttctcaggacctcctgaggctgtgtcacargccatgggtccttaaccttggcaaaagtaacctctaaattgattgagatctgtctcagatacttttttgtttacatcctcatagctgttttgttaaatcttgtccctgattttagccttttttaccttatttctgattttagccttttccttccaagaaaagggtgttcataaggtctcaaataccctttttcataattctcagagggccatactggccctgaaaaatactttttaaagttagtcctgaggattctgttttaaaaagctagatctgtctgcacagacagaatattcagctttgttagagttgttttttttcctccccctccttcacaaacatcttgctagccagtcagaacagctgagtcaactgtggtcagttggctgagagatgtcacggtccatctttatgtccaaatatttgacaaatgtaaaaatatagctgaatatgcaaattaattattgtaaccatgctaatacacatacacatatacatgcatacatatatatacagggcagtgggattatatactattcctatcttttgttttttcatttctatcttttaaaatgttaagttttaaataagaaatggtggttattgtatttttgtttttcatgtctatcttttaaaatgttaagttttaaataagaaatggtggttattgtatttttgtttttcatgtctatcttttaaaatgttaagttttaaataagaaatggtggttattgtatttgggaggtgatacacctttttacttctagattctgaaatagatgggttacaaacaagggaactagtgccacaatgtttggaaattgttccatgcatagaactggctagaacaaggcaagttagccattccctgtgcctgaggaaccaggtcactggctgcagagtcagtgtgaataggattatttcccataatcccttgtagctttggttctatatcaaggtcagagagactcaggagcggaagttacatgtttttttgagggttaggtacagttcttatatattctcctatttctgcctttacttgtaaagatcttggggaggatgctctgcccaggcattttctctttatccctgacttccagggttttcatattggctggagttttataagaacctcagtgttttgtaatgaatatttcttttccacacatcttttctgtttttacatattgtagtagtaatatggatgaggcaggaattgtgtgctgaagtacctcccagctttgactctgaaaatactactttttaaaaatctatttatttatttattttctttttttgaggcatggtcttgctctgttgctcaggctggagtgcagtagtacgatcatggctgactgcatccttgacctcctaggctcaagcaatcctcccacctcagcctccagagaagctgagactgcaggcatgtgccaccatgcccagctaatttttaatttttttgtagagacaggatctccctatgttgcccaggctggtcttgagctcctgtgctcaagcattcctcctgcttcaatctcccaaaacgttgggatgacaggcttgacctactgaacctggcctaaatatttattttaaattagcttcataattagatgaatatcaagtttattcaatctggtattttttaacagtcttgaggaagtagttgatattgattgagcaatatagtgctttcttatttaaatatttaatgttttccttttttcttttttttgagacagagtctcgctctctcaccgaggctggggggcagtggtgtgatcttggcttactacagcctccgccttccaggttcaagcaatcctcccacctcagtctcctgagtagctgggactacaggtgtgtgcccccacacccggctagtttttgtatttttaggagagatggggtttcaccatgttggccaggctggtcttgaactcctggcctcaagtgatctgcctgcctcagcctcccaaagtgttgggattacaggccagagccactacacccagccatttttcaaaacccctgtttgttttaatatgtgatatgttttcagaacacctgcttattttaatatgtgatacggtttggatttgtgtccccactcaaatctcatgtcgaattgtattgtaatccctaacgttggaggaggggcctggtgggaggtgatgggccatgggggcggacttcccccttgctgttcttgtgacagtgagttcgttctcatgagatcttgttgtttaaatttgtagtacctctcccaccttctctccctcctgctccaaccgggtaagatgtgcctgcttcccctttgccttccgccatgatcctaagtttcctgaggcatcccttgccatgcttcctgtacagcctgtggaactgtgaaccaatgaaacctcttttttaaataaattacccagtctcagatagttctttatagcaatgtgagaacagactaatacaatatgcgaaccattaggagatatataaggatttaaaaactttaaaaaacatatctacacatctgtttaaatcttatcagttaaggtaataatgttaacaccccacttggtgtatatctttccatacttatcttcctattcataacatgtgttcaagcatattgataggatttggatctatgtctctaccaaatctcacgtcgaattgtaatccccagttttggaggtggagcctggtggtaggtgatggatcatgggagcggagttctcatgaataggtcagcaccatctgcttggtgcttttctcctgtgagtgagtaagttctcttgagatgtgatttttttaaggtgtgtggtatcttctccctctctctgttccttttgctctggccatgtaatatgcgcctgcttctccttggccttctgccatgatcatacgtttcctgaagcagatgctgtgatgcttcctgtacagcctacagaactgtgggctaattaaatattaaatctcttttctttatacagtatgtagtctcaggtatttctttatagcagtacgagaacagactaatacagaaaattggtatcaaggagtgaagcattgctataaagatacctgaaaatgtgaaagtgacttgggaactgggtaatgggcagaggttggacgagtgtggagggctcagaagaagatagaaggatgagggaaaaattggactgtcttagagacttgttaaattgttgtgaccaaaatgttgatagtgatatggacagtgaaggccaggctgaggagttttcagatggagatgaggaacttactgggaactggagcaaagtcagttttgttatgtgttagcaaagaggttggaggyattatgtctctgccctggggacctagggactgtttttattattattattatactttaagttctagggtacatgtgcacaacgtgcaggtttgttacatatgtatacatgtgccatgttggtgtgctgcgcccgttaactcatcatttacattacgtataactcctaatgctatccctccccgctccccctactgcacgacaggccccagtgtgtgatgttccccaccctgtgtccattcccacctatgagtgagaacatgcggtgtttggttttctgtcctcgggatagtttgctcagaatggtggtttccagcttcattcatgtccctacaaaggacatgaactcatccttttttatggcttcatagtattccacggtgtatatgtgccacattttcttaatccgatctatcactgatggacatttaggttggttgcaagtctttgctattgtgaatagtgctgcaataaacatacgtgtgcctgtgtctttatagcagcatgatttataatcctttgggtatatgccgagtaatgggatgactgagtcaaatggtatttctagttctagatccttgaggaatcgccacactgtcttccacaatggttgaactagtttacagtcccaccaacagtgtaaaagcattcctatttctccatatcctctccagcacctgttgtttcctgactttttaatgattgccattctaactggtgtgagatggtatgtcattgtggttttgatttgcatttctctgatggccagtgatgatgagcattttttcatgtgtctgttggctgcataaatgtcttttgagaagtgtctgttcatatcctttgcccattttttgatggggttgtttgattttttcttgtaaatttgtttaggttctttgtagattctggatattagccctttgtcagatgagtagattgcaaaaattttctcccattctgtaggttgcctgttcactctgatggtagtttcttttgctgtgcagaagctctttagtttaattagatcccatttgtcaattttggcttttgttgccattgcttttggtgttttagtcatgaagtccttgcccatgcctatgtcctgaatggtattgcctaggttttcttctagggtttttatgattttaggtctaacatgtaagtctttcatccatctcgaattaatttttgtataaggtgtaaggaagggatccagtttcagctttctacatatggctagccagttttcccagcaccatttattaaatagggaatccttttcccatttcttgtttttgtcaggtttgtcaaagatcagatggttgtagatgtgtggtattatttctgagggttctgttccattggtctatatctctgttttgataccagtaccatgctgttttggttattgtagccttgtagtatagtttgaagtcaggtagcatgatgcctccagctttgttcttttggcttaggattgtcttggcaatgcaggctcttttttggttccatatgaactttaaagtagttttttccaattctgtgaagaaagtcattggtagcttgatggggatggcattgaatctataaattaccttgggcagtatggccattttcacaatattcattcttcctatccatgagcatggaatgttcttccattgtttgtgtcctcttttattttgttgagcagtggtttgtagttctccttgaagaggtccttcacatcccttgtaagttggattcctaggtattttattctctttgaagcatttgtgaatgggagttctctcatgatttggcttactgtttgtctgttattggtgtataggaatgcttgtgatttttgcacattgattttgtatcctgagactttcctgaagttgcttatcagcttaaggagattttgggctgagatgatggggttttctagatatacaatcatgtcatttgcaaacagggacaatttgacatcctcttttcctaattgaataccctttatttctttctcttgcctgattgccctggccagaacttccaacactatgttgaataggagtggtgagagagggcatccctgtcttgtgccagttttcaaagggaaggcttccagtttttgcccattcagtatgatattggctgtgggtttgtcatagatagctcttattattttgagatatgtcccatcagtacctaatttattgagagtttttagcatgacgggctgttgaattttgtcgaaggccttttctgcatctattgagataatcatgtggtttttgtctttggttctgtttgtatgatggattacgtttattgatttgtgtatgttgaaccagtcttgcatcccagggatgaagcccacttgatcatggtggataagcttttagatgtgctgctggattcggtttgccagtattttattgaggatttttgcattgatgttcatcaggatattggtctaaaattctctgtttttgttgtgtctctgccaggctttggtatcaggatgatgctggcctcataaaatgagttagggaggattccctctttttctattgattggaatagtttcagaaggaatggtaccagcttctctttgtacctctggtagaattcagctgtgaatccatctggtcctggactttttttggttggtaggctattaattagtgcctcaatttcagagcctgttattggtctattcagggattcaacttcttcctggtttagtcttgggagagtgtatgtgtcgaggaatttatccttttcctctagattttctagtttatttgcatagaggtgtttatattattctctgatggtagtttgtatttctgtgggatcggtggtgatatcccctttatcattttttactgcgtctatttgattcttctctcttttcttctttattagtcttgctagcggtctatcaattttgttgatcttttcaaaaaaccagctcctggattcattgatttttttttgaagggttttttgtgtctctatctccttcagttctgctctgatcttagttatttcttgccttctgctagcttttgaatgtgtttgctcttgcttctctagttcttttcattgtgacgttagggtgtgaattttagatctttcctgctttctcttgtgggcatttagtgctataaatttccgtctacacattgctttaaatgtgtaccagagattctggtatgttgtgtctttgttccattggtttcaaagaacatttttatttttgccttcattttgttatgcatccagtagtcattcaggagcaggttgttgagtttccatgtagttgagcggttttgagtgagtttcttaatcctgagttctagtttgattgcactgtagtctgagagacagtttgttataatttctgttcttttacatttgctgaggagtgctttacttccaaacatgtggtcacttttggaataagtatgatgtggtgctgaaaataatgtatgttctgttgatttgaggtggagaattctgtagacgtctattaggtccgcttggtgcagagttcaattcttggtgagttcaattcctggatatccttgttaactttctgtctcattgagctgtctaacgttgacagtggggtgttaaagtctccccttattattgtgtaggagtctaagtctctttgtaggtctctaaggacttgctttatgaatctgggtgctcctgtattggatgcatatatatttaggatagttagctcttcttgttgaattgatccctttaccattatgtaatggccttctttgtctcttttgatctttgttggtttaaagtctgttttatcagagactaggattgcaacctttgcttttttttgttttccatttgcttggtagatcttcctccatccctttattttgagcctatatgtgtctctgcctgtcagatgggtctcctgaatacagcacactgatgggtcttgactttttttttttttttttgagacagagtctcgctctgtcacccagggtggagtgcagtggcgtgatctcagctcactgcaagctctgcctcccaggttcacgccattctcctgcctcakcctcctgagtagctgggacaacaggcgcctgccaacgtgcccggctaattttttgtatttttagtagagacgggttttcaccatgttagccaggatggtctcgatctcctgacctcgtgatccacccaccttggcctcccaaagtgctgggattacaggtgtgagccaccatgcccggccgggtcttgactcttatccaatttgccagtctgtgtcttttaattggaatatttagcccatttacatttaaggttaatattgttatgtgtgaatttggtcctgtcattatgatgttagctggttgttttgcttgttagttgatgcagtttcttcctagcatcgatggtctttacaatttggcatgtttttgcagtggctggtactggttgttcctttccatgtttagtgcttccttcaggagctcttataaggcaggcctggtggtgacaaaatctctcagcatttgtttgtctgtaaaggattttatttctccttcacttatgaagcttagtttggctggatatgaaattctgggttgaaaattcttttctttacgaatgttgaatattggccccccactctcttctggcttgtagagtttctgccaagagatctgctgttagtctgatgggcttccctttgagggtaacccgacctttctctctggctcccttaacattttttccttcatttcaacaggatctgtggaaatttgaacttgaaagtgatgatttagggtatgtggtggaagaaatttccaaccagcagagtattcaagatgtggcctggctgcttctaacagcctgcattcatatgcatgagcaaggaaatgacctgaaactggaacttatttaaaagggaagcagagcatgaaagtttgggaaatttgtagcctagccatgtggtagaaaagaaaaaccccattttcagtggaggaattcaatcaggctgcagaaatctgcctaagtaaagagcagccaagtgctaatttttcaagacaacgaggaaaagaccttgaaggcgtttcagagaactttgtggcagcctctcccatcacaggcccagaggcctaggaaggaagaatgattttcttggctaggcccagggccttgctgcactgcacagctccatgcatcctggagcactgctctgtgcatcctggcatctctagcaccagctgggctcagaagggcccaggtatagcttgggctgctgcttcagagagtgtaaactgtaagccttggtggtttacacttggtgttaagcctgtggatgcacagagtgcaggagttgaggcttgggagcctccatctagatttcagaggatgtatggaaaagcctggatgtccaggctgaagcctagtgcagggtttgagccctcatggagaacctctactagtgcagtgcagaggggaaatgtggggtgggagcccccccacagagtccacactggggcactgcctagtggagctgtgagaagagggccactgtctttgagaacctagaatggtagatccattggcaacttgcacactgtgcctggaaaagccacaggcactcaacgccagcctgtgagagcaactctgaaggctgaatcctggaaagatttggaactttccaaggccttgggagcccactccttgcatcagtgtgccctggatgtgagacatggagtcaaaggagattattttggagctttacgatttaatgactgcctactgggtttgggacttgcgtggggcctatgacccctttcttttgcccaatttctcctttcaaagtggagtatttacccaatgcctgtacccccattatatcttcaaagtagctaatgtgtttgattttacagtctcatagctggaaggggcttgccttgtctcagatgtcactttggattttggacctttgagttaatgctggaatgtgttaagactttggaggactgttgggaaggcatgattatattttgtagtgtgagaaggacatgagatttggagaggccaggggcagaatgatatggtttgcctctgtgcctcccacaaatctcatgttgaattgtaatccccagtgttggaggtggggcttaatgggaggtgatggataatggggtggagttctcatgaatgggttaacaccatcccttggtgctattcttgttatagttctcatgagatctggttatttaaaagtgtatagcacctcacccctcactcttttcctcctgctctggccatgtgaagtgctatatctcccttcaccttataccttgattgtaagcttcctgaggcttccccagccgtgcttcctgtatagcctgtggaactgtgagccaattaaacctcttttttaaataaatcaccacgtttcaggtatttatggcaatacaagaacagactaatacacacacacaaacacacacacatatatacatgcccttttggtttactttaaaaaaaatagctttattgaggtgtagtttgcataccatgcaattcatccctttaaagtataaatccagtggtttttaatgtattcacagagttgtgtaactgtcaccacaataaattttagaatattattatcactgtaagaaagaaacctcttagccattagcaatcatttccattttctccaacctcccactagggaggttcctccaactgggaaaccacgaatctactttctgtctttgtagaattactcattctggacattttatgtgaatggaataatataatatgtagtcttttgtagctgctttctttcacttaacatcatttttttaggttcatccaagttgtagtgtgtatcagtacattgttcctttttatgcctgaataatattccattatatgggtatactataatttgtttattcattcatcagttgatggacattgcattgtttccacttttggactgtaatgagtaatgctggtatgaacatttgtgtataaaattttgtgtggattttttaaaacttgaggtgaggctgggcacagtggctcatgcttgtaatctcagtactttgggaggctgaggtggatggattgcttgagcccaggagtttgagaccaggttgggcaacatgatgtaaccccatctctaaaaaaaatgcaaaaattagctgggcatagtggcacatgcctctagtcccagctacttggaggctgggaggtaggaggatcactaagcctgggaggcagaggttgtagtgagctgagattgtgccactccctctgttgtccaggctggagtgagcagcagagggagaccctgtctcaaaaataaaaattaaaaaaaattaaaaattgaggtgatagtcacataacatacaattaactatttgaaagtgtgcaattcagtggcttttagtatgttcacagtgtcatgcaattattgtgtctctctacttccaaaattttttcatcatcccaagaaaaatacccatacacattaaataatcactccctttccctctatcccctggtaaccactaatctgtcttctgtctctatggattttgcagttctggttatgtcatctaaaaggtatcatataatttatggtccttgtgactggcttttttaacttagcataattttttagggttcatccatatggtggtttgtatcagcatgtcattctttttaatgattgaataataccatagtgtaggccgggtgtggcacagtggctcacacctgtaatcccagcactttgggagaccaaggcaggtggatcacgaggtcaagagatcgagaccatcctggccaacatggtgaaatcccatctctactaaaagtgcaataattagctgggtgtggtgtcgcacacctgtagtcccagctactcgggaggctgaagcaggggaatcacttgaactgaggaggcggagtttgcagtgagctgagatcgcgccactgcactccagcctggtgacagagtgagactccatctcaaaaaaaaaaaaaaaaacacacacacaaaaactctagtgtatggatattaccacagtttgtttacccattcattagttcatggacatttgggttgtttctgctgtttggatgttatgtataatgctgctagatacacttgtgtacatgttcctgtgtggcatatttctgtgtgcactatttttcaaagtggctgtatcattgtggattcccaccagcagtatatgatggttccaccttttccacattcaagctcaaagttactattatctgtcttttaagtcatcctaatgggtgtgaaatgatatcttactgtggttttgatttacatttccctaatgactagtggttgttatgcatattttcatgtatttattgaccatttatttatttttatttattttttgacatggagtcttattctgtaactcaggctggaatgcagtggttggatcatagctcactgcaaccttgaacttctgggctcaagcagtactcccactccagtctcctgagtagctgggactacaggtgtgcaccaccaccacgcttggctaattaaaaaaaaatatttttttctatgaactctgcagagaagaaattaatttttawttatttatttatttatttatttatttatttatttagtagagatggggatctccctgtgttacccasgctagtcacgaactcctgggcccaagtgatcctcccacctaggccacycaaagtgctgggcttacaggtgtaagccactatgcctggcctcattggccatttgtatatcttctttggggaaatatttattcagatcctttgcccatttaaaaattggattatttgtctttttattgaattgtatgtgttctttatgtatatgctagatacaaaactcttattagatatattacttgcaaacattgtctcccattctgtgcttttcgctttcttaatagtatcctttaaagtgcaaaagttttaattttgatgaagactaatttatctacatattttttctttggttgcttgtgctttgggcattatagctaagaaaccattgcaagagtttgtatactttcagctattatagtcagatctttgatacatttttaagttaatttttgtatgtcatgtgaggtttttggtttgcttttacaaaatgtattatgtatttttacttaaaatacatcttggatatctctatcagccagtagataactgtcatttttaagtctgtggataaaagagcgtgttactttgccaacttgtaaactccccttcctggaacgatacctctgcaagtctacctgccatccctgctgtttgttccttattctgtagaccctgttcaaagcagaactctagaccaattgctttcagatttgctttcccttttaataaggcacccatctaattttgagatgaaataatacccttcttggaacattcagtgactccttggaattcatataataaaatgcaattagggagggggcacaatctgaaatagatctgccctttcatactctttagactattactctgtattagtctgttctcgtactgctataaagaaatacctgagactgggtaatttataaagaagaggtttaattggctcacagttctgcaggctgtacaggaagcatggtggcacttctgcttctggggaagccccaggaaacctacaatcatggtggaaggcgaaagggaggcagagacatcttacatggcagaagcaagagcaagagtggggaggtgctacacacttttaaaacaaccagatttcataactcctcattcacttgccatcaccagaacagcacaaagaggatggtgctaaaggctaaagctttcatgagaactccacccccatgatccagtcacctcccaccaggccccacctccaacactggggattgcaattcaacatgagatttgggtggggacacaaatcgaaaccatatcactctgatagtttcaaggaatatttttgttgcttttcattgactttccaatttatgatccttactgactttactacttggaattctcttacaaaatctgtttttcactgtttatccaccttgcaattaataaaagtgtcctgtttcacaaaatgattaaaattatctataattttctcacttaacaatatgtctccctcacattatgctttcctttccactttgtttgtttgtttgtttgcttatttgagacagggtcttgctgtgtcacccagggtggagtacagtggcacaatcacggctcactgcagtctccgcctcacgrgttcaagcgattctcctgcttcagcctcctgagtagctgggattacaggcatataccaccgcaccggctaatttttgtatttttagtagagatggggttttaccatgttggccaggctagtcttgatctcctgacctcaagtgatctgcctgcctcagtctcccaaagtgctgggattagaggcatgagctaccacgcccagcctcccttccactttagttattattattatttttaaaatagagtcttgctctgtcacccaggctgaagtgcagtggcatgactttggctcactgcaacctccacctcccagattcaagcaattctcctgcctcagcctcctaagcagctggagttacaagtgcgcaccaccacacccagctaatttttgcatttttagtagagatggggtttcaacatgttggcccggctggtctcaaactcctgacctcaagtgatccgcccacctcggcctcccaaagtgctgggattttaggcatgggccacacgcccagccaaatgaggaatcttgagaaaacttggcaatgatatagttctatacattgctgctgtttttcattcccttttctacccccttcttttcccgacatcattcttcattctatttccattttacatgacaaattttgttacttatttaattattcccagactgacatttgagataacagtaagaaaaccttatttttagtgttatgtttcccttctagtggactaatactttccttaggtgccttacccttcttttaagcacacggcaataagaacagttttctcagccagtcatgttggctcatgcttgtaatctcaccactttgggaggccaaggtgggtggatcgcttgagcccaggagttcaagaccagcctggacaacaaaataatacccagttactaaaaaaaaaatttttttttccttctagaaagcatttaagttaccttatgcatttcaagaacaaataattcctaataaatgttttaaattgaccttattccatattttgagcgattgatttctatccatgcacacctgcttaccatttcctccactcaatttgtatatagcttcctgtccagtatagttttcactagctacatgtgggtatttaaatgtaaatttgttaaaattaaatgaatttaaaaattcattttctcagttacactaaccacatttcacatactcattagccacataaagctgatgggtactacagttgacagtgcagacacagaattccttcatcatcacagaaagttttatttactggcactgctacactgtttgacttattcctacttgcggggctgacatttgaaattattgtaaaccattccctgtttaataaacttatttttttttttttgagacagagtctcacttagtcacccaggctggagtgcagtggcacgatcttagctcactgcagcctccgcctcctgggttcaagcgagtctcattcctcagcctcccgagtagctgggactacaggcatgtgccaccatgcccggctaatttttgtatttttagtagagatggggtttcaccatgttggccaggctggtcttgaactcctgacctcaagtgatctgcccacaccgtcctcccaaagtgctgggattacaggtgtgagccactgcatctggcctataaacttatctttgatggactcttgttagtggtcattgttgcagaaatcttgcaatgccccatagaagtgttttgtatttttgtttgttttaaagagatgggggtctctctatgttgcttaggctgtactaactcctgggctcaatgaatcctcctgcctcagccttccaagtagctgggactacaggagtgcaatactgtgcttgggagaagttttaaaattgtttttggcagttttgtgtggcaaatataaaagtcattttaagctgaaatattttaagtcagcatcctatttatgttttaaacacataatatattcacatgataattttaagtaagaataaagaatatacggtgaaaagtaaatcttctcatgtcttcctctcagttgtccttggagagaggcatgtactaaaacaaggttctttgtgtgttcttctagattttttatcttataagcatatgtgtgcctgtcttcacttttgaaaatgtaagtggtagcatcctatgcatactttttatcgtgtgtgtgtgtgtcaggtcttaagtctagatgatttgtgtttttacattcatgtattttggaaattattccatgtgggtacccgtaaatctgccttatttttattgcatagtatttcattatataggtgtattttaacttatctactcatcttctattgaacatttaggctgattctaacattttactattgccaaatagattacaatgagtatctttatttttgcaaatgtgcaagtatagcaatatgagtagtagtactgggagagcacaggtctgtgctttttaagactttgatagattctgccaaattgccctccctaaagactgttccaaattacacatttacctacagtgtatgagaatgtctgtttctctgtccctcatcattacggcttatcataaaactcattgtagagcagtattattaaagattgtaataaaaagtttattttattaaattttggctgggtgtggtagtgcatgtctgtagtcctagctaccccggaggctgaggcgggaggatggcttgagcctgggaggttgaggctgcactatgttgcccaggctggccttgaactcctgggctcaagtgatccttctgcctcggcctctgaaagtgtggggattacaggcatcagccactgcacccacccggtaatgtactttctataatggaaataaattaagagctttgagtgtagctattctgagttgcaaacttatctgtatactttggataaaaatatctgagctaacatgtactaagaaacctgagcttacttggaagactgcttcacttttgcatgaagttagaccctaaggtaatcagagcaatctataagaataacttttctatgcattagtaataagttgtcacaaaaagtaagagaaaaaatatcccatccacagtagcacagaggtataaaatatctaagaataggccaggcgcactggctcatgcctgtaatcccaggactttgggaggccgagattagtggatcgcttgaggctaggagttggagaccagcctggccaacatggcgaaaacctgtctccactaaaaatacaaaaattagccaagcacagtggcgtgtgcctgtagtcccagccactcaggaggctaaggcacaagaatcgcttcaacccaggaggtggagattgcagtgagctgagattgtgccactgcactccatcctgggtgacagagtgagactctgtctcaaaaaaataaaatatttaagaataaagccacatgagatatgaaagcatgaaaggcagaatattataaactacatgacctcaaacccttgtactgcaaaagcttagaaatactgaccaaatataacaaatatcccattaaggatataatttagctcccaagaaagtaaggcggctctcccttgggctaaaatggaaaacaatttaaaaaccagagtagaaagtagaactaatgctttaagaacatgagagttggtggaggagcagttgttaatgacgtgttactcctagtggaatagcctcccaccccctaataaatagcccagctaatttatgccattacayacacctagattttagttccagaccttgagctgtgggaccttgggcaaggcctctttgaattccaggtttctcacctgcaaaatggggaaacaatagtacccaccttttctggtggctgtataggttaagttaaatggaaataacacacaatatattgagtgctaactgtgttccagggcagtgccctaagtggtatgtataaattcacttctcttcataaggtggactgaattgtgatgccctccaccaaatccctatgttgaaaccccagctcccaatgtgatggtatttgtagatgaggccttttggaggtcatttggtttagataaggtcatgagggtagggccttcatgatggggttagtacccttataagaacagcaccaggcagtttgtactcctttcccggtctcccctgcatctggtatcaggacacagtgagagcgcagccatctgcaagccaggaagtatgagcccttactgaggaacaaaatcggctggcatcttgatcttggactttacagcctccagaactgtgagaaataaattattgttgtttaagccattcaatctatggtgtcttattaaggcagcctgacctaatacataaggcagcaaaggcattctcaccataaaggcataggttataatggcttcctggtgacaagagacaaggtgatgagtcaggtagctggaaataagatccttgcttccataaagctaggattctcaaagggtcatatgctcagttaaagcctggcctagaaaatattcacaggaagatgaaaagcaagtttattcatcttagtctgagttctgggtggatgggggaaaaagtgtctgacttgagtattcataaccagaggcttgtgctcatgaaagtctgagattcaaatttgtttaatttacatggttcagcaatccctaagccagtaagctaccccaaaaagacagtccaaagctagaaaacaactttgggccacactctcacatcaggttacacaaatttctgtggatacagctacactttacatgagttcataatgcaaaattataaaacctacaaaaaaaatagccaaccagagtgtcatgatacatgacgtagaacataatcagaccttcattaactggtgatagcagactgagtataaatcaaaatgagtatgaaatgattatagacatttaaaaaggaatcgaaaaagaaagggatactatatttagaaaaaagaccaggctgggcatggtggctcacgcatataatcccagcactttgggaggtggagatgagtggatcacctgaggtcaggagttggtgaccatcctgactaacacaataaaaccccttttctactaaaaatacaaaaatagctgggtgtagtggtgcatgcctgtaatcccagctactgagtaggctgaggcaggagaatcacttgaaccctggaggcagaggttgcagtgagtggagatcgcaccactgtattccagcctaggcaacagaacaagactctgtctcaaaaacaaacaaacaatcaacaacaacaacaagaacaaaacaaaagaaactaggtatatttgaaaaagaaccaaaaagaaaaactcaagggaaaagttaaacaagtgaagagtattattgaatttttgaatgtatactagaaagaaattacccattatgtaacagagggagaaagagagaggctgagtgacattgcagataaaatgagaaagtccaacatagttaatagaagttctctaggggggaaaaaggagaggagaggagaggcaatatttaatgagaaatggctggacttcatgaagttaattggaagaaaagacagattatctacaaaggaatgacagattaagaccgtaatagtaacaatagagatcctgagagaaattactatctagaatttttttactagctaaattattcaaaattgaaagtaaaatagacatttcagacaaaaatgtgagaatgtaagctcagtgatgaaagggatttttctttctccactgctgtatctctactaacttgaacaatccttggcacatagtaggcatttagtaagtatttgttgaataagtgaaaaattgaacagtctctcacagttgcttctggaagagggaaattgaaatgagaaggaaggattgagatacaagaaagactattgagtagaacagttgttaaacatgagtaaatgtaaataaatatactttagtggtggctcatgcctatcatcccaacactttggaaggctggggtgggaggatcacttgaggtcaagagtttgagaccagcctgggcaacatagaccctgtttctacaaaaaatttaaaaaattagctaggtgtggtggcacacgcctgtaatcccagctactggggagtctgaggtgggaggattatttgagcccaggaggtcaaggcggcagtcagccatgatctcaccactgtactccagcctgggtgacagagtgagactgtctcaaaaacaaaccaaaaataaataaatatactttataaaactactataattttaattatgtctaatatgttacagttttacaaacaagatggaaataaagttcctgacaacaataggatgtaaagcagaaagtagagattgtagttaaagtagtctaaggttgtgttttttttctgggaagaatttagagatgtggtttagttaaaattcagatgtaataaatttcaaggatagggtttttattttctggaatgtgataaactagttttctgaggaaactattctcattctagtacacctgaatatgctattgacagggacaaaatgagcaatttttttcctacatagttgaattattggaaggccagaaacaataagaaaacatgagcaggtgctaaagccagcatttgcctgttagtatcttctgattcctggtgtctctgagccggagttttaatcgtaatagagggaactttccctaacttactttatgatgatagtaatttaatattactatcaccagacaataacatttttgtaaataaatactaaggccattttcaagcctaaataaaggaccaaaagtcctaaagacattgttaaaatgtatttagcttcatataaaccaataatacagcattatcaagttaagttgattttaggaataaaagagtggtttatcatctgaaaatatgttaatgtattgtatctgttaatcatctaaaatctgtagcattaacagactaaagaggaaacatccttggatcatctcaacagatgcagaaaaagcatttgataaaattcagtaagcattcatgataaaaattcatggtaaattcaaaagggacctttcttttctggaccaggatggattgttctgtattgctcctgctaagtatagctcaaaaccctggacactgtatgtaaaacaaacataggaagaatttgaaaggtaaagagaagacgacagaccagctaggggtttcacgacccatggaatgacatagcagtgagttccctggacttgcttgattgtttatttgcctcatataacgtaagtgttggatcaactggcaacttagtcagaaatggcaatgggaacatacaccccaagaaagccaaaaacagccttttctctttaaaagatggtgaaagaggaaacatagcaagacagaaacttttggacaataaccacgctactctagccacatgccatggaaagaccatggctcctccccttcgctaactcctgttaacccctgttaatgatagataaaaggkgtagaaatttgaaaaatatttaatccacaggaaggcaggaaaaagaaaacggaaaatagaaaataaaatgtcagacttaagccctaacattttaataattacgttaaatgtaaatagtctaaacacacaaatttaaagacagttggcatattggatataaaaacataatccaactatgtgagtgatacattcaacaacttggcrttatgctgagtggaaaaaaaacaatctcataaggtcatattctgtgtgattctctgggtataacattctgcaaatgacaaaatgatggagatggagagcagattaatggttccaatggtttgggatgatgagggagggtgtagatatgactataaagtggtagcaagagggagatcttcgtgttgatggaatagttttatatcttgattgtggcaatagtaacatgggtctacatatgtgataaatagcacagaactacgcacacacatcaggttttttctttttgatattgtactatagttatgtaagatttaactattgttgggaactaggtgaagggtacataggacctctctactatttttgcaactccctctgattatttcaaaataagctttaaagaaacctatagcaaacatcatactcaaaattgatttattaaaagtattttctttaaagtcaggaacaatacaaggatgcctactatcatttcttgtttgtttgttttttttgttttttttttttttgagacagagtctctgtcacccaggctggagtgcagtggcgtgatctcagctcactgcaagctccgcctcctgggttcacgccattctcctgcctcagcctcccgagtagctgggactacaggggcgtgccaccacgtccggctaatttttttgtatttttagtagagacggggtttcactgtgttagccaggatggtctcgatctcctgacctcgtgatccgcccgcctcggcctcccaaagtgctgggattacaggcgtgagccactgtgcccggcgcctactatcatttcttacattcaatagtttacaggcagtcctattctatgcaataagatcagaaaataattaaggctgggtgcggtggcttacacctataatcccagcactttcagaggctgaggagggaggaccacttgagcttgaaagtttgagaccagcctgagcaatataatgagaccttgtctctataaaaaataaaaaaattagccaggcgtggtggcaggtacctagtcttagctactcaggagcctgagccctggaggtggaggctgcagtgagctgtgtttgcaccactgcacttcagcctggatgacacagcaaaaccctcaaaaaaaaaagattttaggcgtggaaagagaaaaaattataacctgtaagggagtctaggcaatgagtacctggcatttttactttctattatatattgtgagataggctctttctctcaccaggttttctctgaaactgatgatttctaatcctaagagccaagggaaaagagtaacaaaaacaataacatgtccacacactggaaaacttatcagtgaaaaatatacttcatgggatggcaagaagcaacataggattgtagttgacatgcagctactattattatattattatgattattaattttactcttcaagactcttatttggtgtgagtctagatctgttagaaggtcactgatgaaaaaggatgtgtgggtgtccaagctgatctgattcatacagctcaatatatttatttattaattttgagacagggtctggctctgtcacccagactagagtgcagtggcatgatcaaggctcacggcaacctctgcctcccaggctccatttttatttattattattatttttaattaattaattaattttttgtagagacagagcctcaccgtgtttcccaggctcatctcaggctcctggcctgaaggagttctcccaccttgaccttgaaaagtattgggattatagccgtgagccaccgcgtctggttaagtggttaatttagaaatgtgcagagttaatgttcgtgtttttctttttcttttctcttttttttttttgagatggagtttcgctcttgttgcccaggctggagtgcaatggtgcaatcttggctcactgcagcctctgcttcccgggttcaagtgattctcctgcctcagcctcctgagtagctgggattacaggcatgcaccaccacgcctggctaattttgtatttttagtagagatggggtttctccatgttggtcaggctggccttgaactcccaacctcgggtgatctgcctgcctcggcctcccaaagtgctgggattacaggcgtgagccactgtgcccggccagtgttcatgtttatttttcatagcgttaaggaactgggtgagaatcaaaatctggaggagagtttagagttttcttcatggttaaatttaaaaaattctatagaacaaatatatttagtgtgtgtaggccgatggcgttagatttccatacactcaacattggggagaaacctcattggcagtggagtggctggtggtaccagctgggggtcccttctttggtcctttgagtgcagagtctttgccctggttgttccctgctttcactattaggagaagccacttgactcatggctggcagatagcacaccagtttcagtaccttgctaaatttatagaaaaccagtgtattaaacagcgaggtatagatagaaactgttttccaacagtgggtatttgaatattaagtagtagtaaattagccaggtgtggtggcacacacctgtggtcctagctacttgggaggctaaggcaggaggattgcttgaaccctggaggtcaaggctgcagtgagccatgattataccactgcactccagcctgggtgacagagcaagaccctgtgtccaaaaaaaaaaaaaaaaaagtaaagacattgttttctttaaattttcaaacttctaaaaaagaacagagaataatatattgcatacccatgtagttgccamcttaatttaacaaatgttaatgatttgttacattagtcaagattaaaaaaatggtgtacagtggataaagttgaaattttctttactgtctcaatctctctttcccaagctgtagtcactctcaaagttggtgtgcattccttccttttagggttattattattctaaaatgtgtgcatatgtctatttgtctatcatgcagatattcattctcttatttttttctgaacgttttaaagctttagtgtcacatttagatgtttaatccatttataattcataattgtgttagcatgaggtaagggcttaattttgtctttttgtatgaataactcatcattactagttttgtctttagcagagtttgtttatgcaggtataagcaaatatgaatatatatttttatttgttccccttattttgtattctttaatttttaattttggggtatataatacatgtatatacttatagggtacatgagatattttgttaaaggcatacagtgcttaatcacattagggtaaatggggtatctatcacctcaaccatttatcctttatttgtttaacaatctaattatatactcttagttattttaaaatgtacaataaattattattgactgtagtccccctgttgtgctatcacatactagatcttatttattctaactatatttttatacccattaatcatccccacttcccccccaactactctttctagtagcttctgttattggtagttctactgtttccatgagttcaattgttttaatttttagctcccacaaataagcgagagcatgtgaagtttgtctttctgtgcctggtatagttcacataacacaatgacctccagttccatccatgttgttgcaagtgacaggatgtcattcttttttgtggctgaatagtactccattgtgtatatgtagcacatttttgttatgatgaacacttaagttgcttccaaatcttggctattgtgaaatggtgcttcaataaatgtgggagtgcagatttactgatttccttttttggggtatatacctagcattgggattgcaggatcatatcgtagctctatttttagtcttttgagaaacctccaaactgttctctatagtgactctaataattatattcctgccaacagtgtacaagggttccctttctccacatctttgccagcatttcttattgcttgtcttttggataaaagccattttaactggggtgagatgatacctcatagtagttttgatttgcattttgctgatgatcattgatgtttaacaccttttcatgtacttgtttgccatttgtgtgtctgtcttttaaatttttatytatttatttattttgagacgttatctcactctgtcacccaggctggagtgcggtggagcaaattcagctcactgcgaactctgcctcccgatctcaagtgatcctcccacctcagcttcctgagtagctgggaccacaggtgcatgccactatacccagctgattttgtgtatttttggtaaagacgagttttcaccatgttgcccaggctggtctggaattcctgagctcaagcaatccaccttccttggcctctcatagtgctgggattacatgcgtgagccaccatgcccggcctgtccgtcttgttttgacaaatatctattcaggtcttttgcctgtttttaaattggattattagactttttcctattgacttgtttgagctccttatatattctggttattaatcacttgtcagaagaatagtttgcaaattactttttctcattctgtcggttgtctcttcactttgttgattgttttctttgctgtgctgaagatatttaacttgatgtgatcctatttgtccatttttggtttgattgtcatggggtattcagatcatagcacattcaaatcatagcacttgtttgtacattttttttcttttaaacttcatgcattttgcatacaatttaagaaatctaacccagggtcactaagattttctcctatgttttcttccagatatttcatagttttatctctcacatttagttctattcctgactcatttcaagttttgcatattgtgtacagtaaggataaaataagcaaatatgtatatgcacttgcatatgaatatcgaatttttcagtaccattgttaaaaagattatcttttccctcaattgaattgccttggcaattttgttgaaaatcagttgacccatatgtgtgtgggtctgtttctgaactttctaattttttccattgatcattatgtctttttatgccaataccacactgtcttgattcctgtatctttataatataacttgagatcaggtagtataattactccaacaccctttttcccccaaaatgttttttggctcttctgatcctttgcgttttcatataaattttaaaaccagcttgtcagtatctaaaaaaaaatgcctgctagaattttgattgggtttgtcttgaatatgtagattaatatggggaaaattgtcattttaacaatagtgagtcttccaaacattgaccatggtatatctcttcatttagttacttctttgatttctctcctcagtgtttatagtttttaacttacaggccttacatttcttttgttaaatctattctaagaatttaatattttggggggatgctgttgtacatagcattttttaaacaggaagaaatacatatamattttattattacatgcacatgtgcgcatgggagtcaagcaagatataaatattcagagaaagataagatggttcatgcttgtataccatcttttgggggccagatgggaaggccattttttggatacataataactgtacgtatttatgaggtacatgtgatatttctgtacatgcatacaatgtgtaatgatcaacccagggtatttaggatatccatcacctaaaatatttatcacttctttgtgttgggaacatttcaaatcttttcttctagctattttgaaatatgcaaattattgataactataatcaccccagtctgtgatcacacactacaacgtattccttcaatataactgtatgtatgcattaaccagcctctcttcaccacccttctcccccttcccagcatctggtagccatcattctactctctgcctccaggagatctcctttattttagctctcacatgagtgagaacatgcaaaatttatctttctgtgcctagcttatttcacttaacatgatgctatccagttccatccatgttgctgcaaatgacagggtttcattctttttatggctgaatagtattccattgtatatatataccacattttcttcatttatttgttgattgacacttaggttgattctataccttggctatcatgaatagtgctgcagtaaacatggggatgctaatatccctttgacatactgacatcctttcctttggataaatacccagtaatgggattgctggatcatgtggtagttctgtttttggttttttgggaaacccccatactgttttccataagggctgtactaattcacgttcctgtccacagtgtatatgagttctcttttctctccatccaggccagcatctgttatattttgtggttttggtgatagccattctaactggggtgagatgatagctcactgtggttttgattttaattttcctgatgattagtactcttgagcatttttttcatatacatgttggccattcttttgagaaatgtctattcagatcctttgtccactttttaatgggatttttttttttgctcttgatttgagttccttatatattctggatattagtcccttgttggatgaatagtttgcaaatattgtctcccattctgtagtttgtctctttattgattgttacttttgcggtgcaaaggctttttagttttatagggtcccatttgtctatttttatttatttctatgcatttgaagtcttagccataaaatctttgactagactaatgtcctgaagtgttttcttctagtagttttaaagttttgggtcttatatttaactcttgaattcattttgagttgatttttgtgataggtgcccagtttcattcttctgtaatatggatattcagttttcccaacaccatttattgaagatattatactttcctctgtgtttttctggtacgtttgttgaaaaatcaattggctgtaaatacatggatttatttctgggttctctattctattccattggcttgtgtctcagtttttataccagtagtaacctgctttggttactatagctttatggtgtattttgaagtcagatagcatgataccttcagctttgtccattttgctcagcattgctttgactatccagggtcttttgtggtttatatgaattttaggattgttgtttctatttctctgatgaatagcattggtattttgatagggattgcatttaatctctagattgctttggataatacagtcattttaacaatattcttagagcctatttgcatagtacgtttttccatttgtttgtgttctcttcaatttctctcatcagtgttttgtcatttttgttgtagaggtctttcacccttggttaaatttattcccaggtattgaatattttttgtagtaattgtaaatgtgattactttttaaatttctttttcagctagtttattattactgatttttgtagttgattttgtattatgcaactttactgaatatattgatcagatctagagttaaaaacaaacagtggagtctttaggtttttctatatataagatcatgtcatgtgcaaagagggacaatttggcttcctcttttccagtgtggttgccttggatttctttctcttgcctgattgctctggctaggactcccagtactaagttgaatgagagttgtgaaagtggggcattgtctactaagccagacaatggcagaacaaaaaaataaaactacaggcaaatactcctgataaacacagatgcaaaaatcgtcaacaaaatactagcaaaccaaatcaagtaatatatcaaaaagataatataccatgatcaagggggatttatcccagggatgcaatgatggttccacatatgcaaatcaataaatgcgatacatcacatcaacagaatgaagaacaaaaactgttaagatcatctcaatagacatagaaaaggcgtttgataaaattcaacatcccttcatcataaaaaaaaaaactctcaaaaaattacacattaaaggaacatacctcaacacagtagaggtcgtatgtgacaaacccatagcttacatcctactgaatggggaaaagttgaaagcctttcctctaagaactggaaaaacacaagaacccatatttattgtgttcttgtttgttgttgttgttattttgagacagggtctcactctgtcacccccgctggagtgtggtggtgctatctcagctcacttcaacctctgcctcccaggctcaagcgagtctcccaccccagccccccgagtagctaggatgacaggcatgtgccactacacccagctaatttttgtatttttagtagagatggggtttcccatgttggccaagctggtctcgaattccttaagtgatccacccactttggcctcccaaagygctgggattacaggtgtgagccaccatgcccggctgaatgtttcttttcttcttatattgatatttgtgtatgtgttataacaattccttcttttaatgttatggagtggcttttttagggaaagactttttttctgtagatgtatctatattgttgctggggaaaggtgttttggctttgattctgggtgggtgcagtagtgtagtctccgtatgatttcttcacctttactcggactagtttcttggcttctcagtggtgtaggctataattgttggcggaggctgtgacaagactttgctggggactgatatgccagatgggctggtcctctggaatcagtagtagcagtggcattctaggaatgccagtctttgggctcccttgggcctccaggtggtatgcttgggtgctggcagtgccagtggctgaccaagtgggtgggtccttggatccccgcggtgacgtgtgaggagttgacagtggtggcagcagtggtgcgccagtccttgcaccactcagcagcatgtgtggcttttagtggtgggagcaggcttgataagctagtccctagacctccaggaggcatgcagtgatgggtggcactggtggtaggataggctaggttttgctctggagaactgtcctgcatactgtagaatgtttaccagcatccctgttctttagccagtaaatgccagtaacatcacatgggaacttgttagaaatacagtttcacaggccctgctgcactgcactgagtctagaaactaaggtgatgtggcccagcattctgtgctttaacagccctcaggtgattctaatgtatgctcaagcttgaaattccactgccttggtagattgcaaggttccccctgcccccagaaagaacctgtattagtcaaggttctctaaagggacagaactgatagggtgtgtgtgtgtgtgtgtatgtgtgtgtgtgagtgcacatatacatatatgcacacacacacatatctatatatgagagtttattaggagaattgactcatatcatcacaaggtgaagtcccacactaggccatctgcaaactgcggagctgggaagccagtccgagtcccaaaacctcagaagtagggaagccgacagtgcagccttcagtctgtggtcaaaggcccgagagcccctggcaaagcacaggtgtaagaccaagagtccaaaagctgaagaacttggatgttcaagggcaggaatcatccagcatgggagaaagatggaggccagaggactcaggtctgtcttctccttccgcgttcctctgcctgcttttatcctagttgtgctgtcagctgattaaatggtacccacccaggttgagggtgggtctgtctctcccagtccactgactgaaacattaatctcctttggcaacacccttacagacacagccaggaacaatactttgcatccttcacatgcaatcaagtggcactcaatagagtgtcacattacagaaccattattatcactatatcgttgactagcataatggcaaatttatgcttattgaccaattagtaattgcagagcttaatctttttaaggtagctttagccaggctattcagagagatgtgtatgtactttctacacatttgtgaaaaagaacaccagttgggaagaggatttgaactgaaatgggactacaaaaggtagtctccagtgagagacagactttgtttcaataaaaagaatagattttagtaaaatcctgtctgaaaatggagaggacgtgtgaaaggtacagaatgacccatctcttagaagtattaagcaggacttggatgttagttaaggtgaagctttcagtagtaatgcaggataaggagaatggcagacgtatactcttaagcatcctttccaggttttgtgttttagggttttcttcacctttttttttctcctgtggcacgtagctctaatcttctttgatagctacttggtgctttctgagatttagcagttttcctgcatgtatggtctttgacctttcccaggagttggcatgtgcactccagtgtgggattctttcctgtgtagttctctactgcctttggaaacagcgctttgtgattacattgacaggagctcctcttactatctgcttattttcagaaagaagttatttctcattcttgttttaaaggttattatctagatctggcctgttatgctcttcttttggtgtgaacagaatagaggggatttctatgctaggttttaawtaaggaacatttgtaacttaaactttcagaagatatctcacatgaaactggctgcctgccacaggagtaacttagatctctccaccttgttgtcaggagcctggaacagagatttttgcattggatatgagatcagattgacttttaaggtctcgtctgactctttgcctttcaagttttgatcagaagtctcagctttttttctccaggtttagatttaacaatctaaacctagttctaacattggtatgtagtgcctaataaatgttgcttaagtaaaatgaacttggaaacattcttcatggtatcctcttttttctcttgcagttaaaagggccaaattccagggttcaccaggtaaggccagctttctattatgtcttttcctcttgtatttgctgttatttcaaagcaatttaaaaaaattattaattcattgatcaaattcagtaatttgattcattacttcactaaattaattcatgaaatcattaatctagtgaaaaattagttttcttacctcttggctaacccaattctacttctcaataataactatatatttagaggttttgatataccttttccgactttttctcagaaaaaagtctgaaatagtgtaaaaggataaatattgacaattagtggaaacaatttttttttttttactttaagttctagggtacatgtgcacaacgtgcaggtttgttacataggtatacatgtgccatgttggtttgctgcacccattaactcgtcatttacattaggtatttctcctaatgctatccctccccccgtcccccaccccacgacaggccccagtgtgtagtggataaatattgaaatatcagtgtatcatgtcttgcagttcatgaacctgtttcagcttgagagtgtgtgtatatgtatctattgggtcatatataaaatttcttaaaatttaaaatattcaaatagaccatgtgaaacatatcttatgcaacctgcttttcccccagcaacacatcatgaaagtgtgtgtgtgtgtgtgtgtgtgtgtgtgtgtgtgtgtgtgtgtatgtgtgtgtctggttcgttcttttaaggtgctgtacagaattttgttgtagatttgtaccctgattaataggtccctgattgattaatacttgattaatatttaggttcccaagtttttgctattacaaataataaatgttcttgtgcacttctcattgcttgcttttgcaaatgtgtctatgtactagattcagaagtagaattgctgggtcaaaagtgtatatatatttttaaaaatttggtaactcctgccaaattgttctcttgcaagtttttactatatataccgagaccaaaagtttatgaacatttattttcccaaatccttatcaacatttgatatgaaactttaaaatctctgtccatctgaagattaaaaatggtatttccttattttaatgtgcatttcctcaattttgattgtcacattaggaagacttcctctggttactgctggggaaggagggaggggagctggagggttactggaaatatatgaatacgcttgagaacccaggaaaacctgaaaaactggaccttgggtgcaacagtaatgaaagcagtttctgagcagtttcttgttttaaaggttattatctttttgtctctgctggctctttttttctgagaatctgctctgttgtttctctcccagctggttttctatgcttacccatcttgtacccataatagctgcctcagtggaatttataccccttccttttagcttcagcaccaaccaccaattgtcaatatttatctttttaccctatttaaaatcttttgagagggaatcaggtttgtttcagcttttggccagctcatggattggctgctcttgggttatttactcttggtctggtcagctatgtgtgattggatgttggggtggagtacaaaataatgtaatataaaacatagctcagtggcctactgcactactactactggatatggatggagattccccttgtatgggcttttatcctcatatatctttaatataattataaattttccatgttgataagtataaaaccacaccattttaaatgatatttaaaagaaagacttaccttcagctgaaagtgtatgacgggttccattttctcatatcttctgtaacattaggtaatcatgttaagcaatgtttgccaatttgatgagtcaaagtgatagtttgctattttttcattgtataacattaggattaatttcttacatagaaaagcaaaccctcaattcagtgcccctaatcatggctgatgtggatgtagtgaggtgagtgccaaatgtgctgtaataagaattaggtgagacacctgagtttgaagtttcaggccaccacctttgtttagtaatcaacttgtttagtactcaactctcaggttagagaatttccttttctcaactctgtgataatatttctttttttggctgggcctggtggctcatgcttgtaatcccagcacttttggaggccaagatgggtagatcacttgaggtcaggcatttgagaccgcctggccaacgtggtgaaaccccatctctactaaaaatacaaaagttagctgggcatggtggcgcacacctataatcccagctacttgggtagctgaggcatgagaattgcttgaacctggtaggtagaggttgcagtgagccaagatcatgccactgcaccctggtctgggtgacacagcaagactctgtctcaaaaaaaaaaaaaaaaaaaaaagatttctttttatgtaacttgtgctttaggccaaactgagtagatcgagcttgaaatctattttctttgtgaagatttttccttaatttttgtccctgttaacagctcagctctgcagttctttatcactttttcttttttccttctggtatgtatctctttctacattttattaaatttacgtaccttatctttcctagtaggtcaattagatttggatttttccccccagatggcaagtgggctatataattaacatagtaggttaggattaacattgtaatagattaaataaattagaacaggaaatatcaatgtatcatatcttggcattcatgaatctgtttcagtttgagtgtgtgtgtatgcatatctgttgggtcatatataaaatttcttaaaattaaaaaaatagtattttagattatgctcttgaagatagcacgtagttttataatttcggcaactctgctatgtcttgaatgaggctatgttgtacaatatagcttaattttttcctgcacatgtaatactttaatttctatattgcttaattccaagggctttgtgagatgggtaacaatctgagcactaagtattatgtctccattttgtattttttcaaagataaatttaacacatatgtgaccctgaaagtacagaatgtgaagagcacaactgtagcagttcgtggtgatcagccttcctgggaacaggatttcatgttgtaagtattttgcagcagcagtgtgcctacatattttataatctttttaagggaattgcattggatgaaacaattagaagattttgtgtatttttgagatttataaaatgtactgrcactgttaaatactgttttgaaaactgtggagttatagaaataagtgaggttcatggtacatgaagcacaactgcagttttgttttctcatggattcgtaatttgttcttagagatgaatgataatgcaggtaaactcccaattgatttgtgttggtgaaaaactacataggcagattttctcagtggtcagaattagaatacagtacaacagacttagcatgacattaaacataacttcatctttctttgattctgagaaggctctttgaaggaatgtggccatgcatgtgagagactgtatcttcatgtgtacctcagtcatctgttttagaggctgaagatttctgtgcttataatccttttgctttatggagtaaaatgtcctatattcaattaattaaaatgaataaatattagtagaatttctcgtgtatgacaaagtttagtatattatgattttaattaaactttggctttaaaaacttgttatttctttcttttgtccctttagtttcaggatttttttgttcctgttctacaaaaggggagaaaagtatagaatatattgaaggactgggcaaatcatttagcttcatagggcactagtttccttatctgtaaaggtcttcctttctcagaagattatgcttgttttttctgggagttggaggtgggcatgaaggggctgaatgagaaaacgtactgaaatttgctgtgaaatttgaaactgaactgaaatcgatttgcatgttttatagtgcagctcagagggacatagggatggttattatttttaaggggagacatttccaatcctctgggctcttggtatattgctgctttttttttttttttttttttttgaggcaggatctcactctctcacccatcctagagtgtggtggtatgatcatagtttactgcagcctctaactcctgggcttgagcgatcttcttgccttagcctcctgagtaatggaaactacaagcatgtaccatcacaccttggctaatgtttttattttttgtaaagatggggtttcactatgttgcccaggctgatctcaaactcctgggctcaagcaatcttcccgccttggcctcccaaagctgtgggattacaggtgttagccactgcacccagcttatattgcttcctataggaccattattgtgatagttaaaggcaaagattataaggttttgggctaggacaatagcagaagacatagaaaaggatgaatagaaggtattcaggaagtagaaccaaaacattttcttggaagatgggttgggtggtatgccattcagtaggatagggattaatatcagttatggacaatcttatatttgagattcttataggacagataggaaggatgagaggtacagaagatagttagaaacctaaagctggcactcagggaagaagtctgctttggagaaatattttggtcagttgaagccataggtgaagatgagaaagcttagggagagaatgtgtatggtgagaaaagggactggagtagaagctggagagtggcagcatttaatgaggggacagagggaactaaaaaggattgaacagagaggtaggagagccaggagataatggtgtcttggaagctgagggagaactgggcttcaaagagaaggaggccaatggtgtcatgtttctttctcactggttgcttctctctcaagattatataagcctcatttattccctctctcagtgacagtgatatgagaccgagagcacctgtttccttctttacacatgcagtgtacagagtcagctacaaatggtttatgcaagtctctttccataccagtatgttagccatagtcctggctatggtttataaacctagcacttccagttggctataaccataatttccagttataactcttcccatcatatgaggcacagtgatcttctgcagcctctcatcagcatagccagcattattcttatgtgtttattttccaatttcccatagcacttccccttttgaccctgctgtgatatgtgtgaattttcttcctgtctctcccacgttgagatgctgtgtgaattttgccctcttcttttacacgtgggttttattagctactttctctacttttctgctcttcctactccttattcctcctatcctgtcctattttagttatttacttattttttttggttcactccttgcagaacttagtctactaccctgtccttttgtcaccggaatctccagtgctggtttcctatctcccgttctcctttttccttctccatgatgtattatgtggcagtatctaatattcgttttggtatttcttatattatttgtttttaatattttcatatcttgtttttaggattagattgttcatttcttaagggtaaggtgggcatcttcactatttgtgtgcatttgtgtagcccagagtctgctatacacgtgtttatgtatattgttgattgaattaacagaaaagaaacttccctagggtcctgggtatgaagcataaacagagctctcagacctctcttagctggacctgctgagcaaatgtaggtgagatgagaagcttcttatagaatatatactcattgtttgggccttctccctagagagttctctgaagagcagattttcttctttatctgttcaagtcaagctgttgaagacctctggctatttcttctgtctgttggcttgagatgctatttgggagttgatttgggaatattatatatgtatccccaagcaaatttctttttttctttattttgtgggacaggrtctcactctgttgcccaggctggagtgcagtggcagcatcttggctcactgcagccttgatctcctgggctcaaatgattttcctgcctcagcctcctgagtaactgggactacagatgcatgccaccatgtctagctaattaaaaaaaatttttctgggagacactagrttttgccatgttgtccaggctggtctcaaactcctgggctccagtgatcttcccacctcagcctcccaacatactgagattacaggcatgagccattgcacctggcccaagcaatttttcgattccatattcaaatgatggataagtccaatggatttgaggatgtcacatatcttttccaagactaattggttaattaggctgaattaaattatgtgacaaaaagcttagtttctccactgtgaacactgtaacttagtggctaggcttattcatctactttgtggctctgaacagctctccagatagcttagaagtttttggacacaaaaactgagtcctatattatgtttctactccaaagcactaagtcatatgtcttgtaagtgctcaggaaatgctaattaaatgaataaattaactcagtacattctatgctgtattatatttatataaaagggacaaattttctttgctttattcattttcaacacctgacatgaattctgtggctgtcattctatatctcaaacttgtgaatctgagaacatttattttatagcacaacagggaacccaagctttctctaaagtacagacttgaagcttctacttgtgataaatagctgttgttttcctgagaatgcctttctgctttctctgctggaattggtcttttctcatctttcttggattacccctcaagtaaccttgtgtttcaataagagctttctggagaacgtttttagcattaacacaggtactatttgcgtattctagtttaatactgggattatgtttgagttagtccttccaagcagatattcaaccatgtatgatactgcttttaaatagtgcttatctggctctttatggaatgatttcttttcgaattttttcccctggttattattataggaaaatcattgtatttatcattatcccatggtaataattttgcttataagtgacagtgcctagcttaataatgattaatgagtctccagggactgagtggtgtgaactagcacactctagagcccctcacttgcctgtgaccacatgttcctatcaaacttatatgttctcagggaccctacttctacctggactccctttcataaatcccccccgccccgccccggcttttttggtggggatggagtctggctctgtcactcaggctggagtgcagtggcgtgatcttggctctgcctcctgggttcaagtgattcttgtgcctcagcctcccaagtagctgggattacaggtgtgcaccaccatgcccagctaatttttgtatttttagtagagacagggttttgcaacgttggccaagctggtctcaaactcctgacctcaggtgatctgtgcacctcccaaagtgctgggattacaggcttgagccaccatgcccagcctgataaatcttgtaaagtagacttacctttcctaaaagtttcctgtatacgatgtgtagtttaagttgaagcagtgttagttaacaataamacatataaaactgttgcctatgggtggaaattggcaggcaggcctggcaataatgtccttattacttggcctcatattgtgtgaaactgcattagtctaattatgattgtatctccaaagcggaaagaatggatagacaaaggcatttttctttcttttcccgccccccctccccactgaggtttaattgggatataagaaactgtacataattaatgtatacaatttagacatttatatacttgtgttaccatcaccataatcaaggtagtaaatatatttatcacctctaaaagtttacttgtgtctccttttttttgttgtatgtgtgtgttaagagcatttaatatgaaatctaccctcttaaattttgaggtgcacaataccttattgctaactggaggcactatgtggtatagcagcaggtctctggaacttatttaactgtaacaaaggcagttttctatggatacctattataggtttcttggagcctaaaaatggtcgtggcattctgggaaattttgatttttcctgaagacaggatcctggtgagaaagcattcaaagtttagcaaaacaggagatgtagttgtttctttcatattgtctagctttcctcaaagggctttcctctttcccttagtgagattagtcgcctggacctgggtctaagtgtggaggtatggaacaaaggactgatctgggacaccatggtggggactgtgtggattgcgctgaagactattcgtcagtcggatgaggtcagtcattgcattttctgtttggaagtatggttcccagcccatgcttctccccatgctagctccactttagctaatattcatccatgcatcttgrattattcttccccctttctaattagagggcatgcaacctgcctgttcctaacttcacctgaaggttcagatgattttatttatgtctggcctaccctgtgtcctgtgacaactcacaggctccagagcacctcttcagccttatcaggtagatagccccttctgaggtatgtgtgtgtcggtgtgtgtgtttacttagggtacttgtggtttctgtgttctcttctaagtcactgccctgggaggagtcccattaaacttccttagccagctggctggctattctctgctttgtttctttgagttaccaatctccaaggaactagttttcagtgcccttcttctgcatgtaagcctgacagagtttaaggaactaccaggcttggcaatttgtattcacactgtctctatacgttatttctaggattgaactcttgcctcactttcctagactagaccataactcagcatcatttccccactttggacctggacaaaatctgttatattcctgtttggtgttaacatggaccatgagttttctctgggagtggggaagttgaaattgcctgtattttctgtatttcttttagttctagctaagtctctactccccaggcagatgggcagttcattttcattgctgccccagttcaatcctatttagccagcaatgttagtagctttttactgactagaaacagtgacacagtcattaagaactgtgcaggttaaatattgatccacagaggtacttagttttagagtatggtactccagacattctgtcctcgttagacctgcagagctgagcacagtgaaagctgctctccccaccaargagggaaaacagaagccacatgcagtggaggcaggtggtgatagtggtgtgtttgccttatcaggatgtgaatggccctcagaagctcaaacaaggaacttcagagaaaaaaacctgactcttgaactaagagggagccaagaaagattaaactttaatcttagatctttgtttcctaggaagggcctggggaatggtccacattagaggcagagacgttaatgaaagacgatgagatctgtggaactagaaacccaactcctcataaaattttgcttgatacaagatttgagttgccttttggtgagtaaaattttaaaactatttaataatttttaccatattgtttggaattgtttgctagttgtttcattaatgtatattttgtcacctcagccatctcctttgaggatattttgtcttcattcactctctttctcataacacttcacccagggaatggtgcaaagtagaatatagaatagtgctcattaaagaatctacactaaaaagcattctcttcaactcatttaattttctgtgactatttattataatgacttatgaaatatttgcttgttagatttattattttgaaaataaacatttattgtcttgaagtgactatatataccttctgatttgttaatttaagtattaaatagcactgataaatagaataataatttaaaatgtaaattaaatcacaatacatgctcatgataaaaattcaaatagtaaggaaatgtacatggataaagttaaaagtttattttcccagttcctttaatcttctctgcattctccagtgtgaaaccactgttaacattcttgtattttggtttagacacatgatatttattttccaaaaacttattttggcaaaatttggatcataccctatgtaatatttatttgctgatatatagtgttttacaaactgcttagacatttatcctgaacatcgctccatgttatactttaagatctgtcttattcatctgaacagatgcctctaccataatttatcttttttttttttttcctttttttgagatggagtcttgctctgcccaggctttagggcagtggcatgatcttggctcactgcaacctctgcctcctgggttcaagtaattctcatgtctcagcctcctgagtcactgagattacaggcttgtgctaccacacctggctaattttttgtaatttttagtagagacagggtttcaccatgttggtcaggctggtcttgaactcctgacctcaaacgatccgcccacctctgcttcctaaagtgctggaattacaagcgtgagccaccatgcctggcctaccataatttatttaagtaatcctttattgattgacaggtgggttttttcatttttttttttttttgatgttatataccgcaaactaataactctgtatatctttgcccattttgagtctagaataaatttcttaaagtagaattgctggatcaaagtataagtacatcattactttttatggaatctactaagttccttgtccaaaaggttataccaatttatactcttataaattatatctggggagtgcctgtttctgcacatccttggcagtcttttgtgtttcccaatggttaatctttatttgattattttgtatgatatcttatcaggggaaattcagcccccgatatttcacgtgggtccttttccatttttcctaagtgttggccggtctaagaaataaagggaaagagtacaaaagagggaaattttaaagctgggtgtccaggggagacgtcacatgtcggcaggttctgtgatgccccccaagccacaaaaccagcaagtttttattggtgattctcaaaagaggagggagtgtacgaatagggtgtgggtcacagagatcacatgcttcacaaggtaataaaatatcacaaggtaaatggaggcagagcgagatcacaggactggggcgaaattaaaattgctaatgaagtttcgggcatgcattgtcattgataacattttatcaggagacaggctttgagagcagacaactggtctgaccaaaatttattaggcaggaatttccttgtcctaataagcctgggagcactacaggagaccagggcttatttcatcccttatctacaaccgtaaaagacagacgtccccaaagcagccatttcagaggcctccccttagggacacattctctttctcagggatgttccttgctgagaaaaagaattcagcaatatttctcctgtttgcttttgaaagaagagaaatatggctctgttccgcccggcccacaggcagccagacttcaaggttatctctctttttccctgaacatcgctgttatcctgttcttttttcaaggtgcccagatttcatattatttaaacaatttgtgcagttaacacaatcctcacagggtcctgaggccacattcaacctcagcttacaaagatgacgggattaagagattaaagtaaagacaggcataggaaatctcgagtattgattggggaagtgataagtgtccatgaaatcttcacaatttatgttcagagattgcagtaaagacaggcttaagaaattataaaagtattaatttggggaactaataaatgtccatgaaatcttcacaatttatgttcttctgccatggcttcagcctgtccctctgttcagggtccctgacttcccgcaacagtatcttgttttagtttagttgatttctattagttttattttaattttttactgttcatattattgatatttgcatattctattgttattgctgtcattttatgatctcagtgtatttgtatcttgtatcctatggtgatttaagcaaaaatgacatgattttccagctagctcagaaagaactaaactcagaacaactattatttcagaaaaatagaaaggaagtctttcttgtgggactgtagaccaagctgcaagtgaagggaaaatcaattggagggagtgggtcttggttcaaataccacagatattgaccattttcaccaaattttagtagatattcttgaataaatgttttttcttttgctgtatgcacttagaaccatttccagagactttaaatcgttgtttttttaatgttgtattactttttgactgatttcactcactaattacatagttacaaatgttatataaaatagacattattcttctacttttagtagttgattttatttaaaaatcagggcctggcatggtggctcacacctgtaatcccagcattttgggaggctgaggtgggtggatcatgaggtcaggagttcaagaccagcctgaccaacatggtgaaaccccatttctactaaaaatacaaaaaattagctgggcaaggtgtcgtgcgcctgtaatctcagctacttaggaggctgaggcaggagaatcacttgaacccaggaggcatggaggttgcagtgagctgagattccaccactgctctccagcctaggtgatagagcaagactctgtctcaaaaaaaaaaaaaaaaaatcagtaataacaaagtaacatttatggtgaattattgtgtgttggtgggcatgtcactaagtatttacatatgttagctcagtaatcctcatttcagtcctttgaggcaggcccaactattattccccactttagagataagcaaactatggcagagagtatttaagtattttggccatggtctgactctagagcctgggcttttaattttaactatttgtataatacatttaaccacttcctgttgggtattttgattgtttgaagtttgtactgttataaatagcactgcaataaacatgcttgtatctctctgtatttttttcttcttaaaactatttttgtggaatgaggcaggaataaattaataatggtttaaaaagttatccagtgaaaagtcccttcagaaatccattttcttcctataggctaccactattaatactttcttgtgtatctttccagagtcagtttctgaatataagcacacacacacacacacacacacacacacacacacaccaccatcttctttttaaaacgcaaatagtagcatattctaacacattccctgtgccttgctgttttgcacttastatatcttggtgaatcatcccacatcagagcatatagacctgcagcagcagcagctcctctgccaccttgcacttcccactctccttctttgtaacaggtgcatagtataccattttatgggtgtaccatatggatgagaaagcactatacaaattacgttgtagactatttgaaggtgtgtgtaagtgtttttaaataagactttgaaatattgctaccagttgttaaagagctagttgaagggaaggagctgaagttttggacaggtggaacaaaggagaaaggaaagggctatatttgctttattcatgtggctactagaaagtgtatctgttgaaatgtctctgaagttgatatgatccatatattgcctgagtgtttctcttcagtgctggttagatggtcatacttgatgtttttaaaaggtgagttttggggagaagttgttatagtcaatgtaaaatgtttaggaatgaggatataccattataccattattttttaagaattcaaatattttcacttagagactcacttaacaaatatttgagcatctaatattttccaggcataaaacctgtgagtattttttaatagcttcttttaaaaaatttttaattgtggtaagagacataactgaaaatttagcatcttaaccatttttaagtgtacagttcactagtgttaagtacattcacattgttgtgcaacagatatccagaactttttcaccttgcaaaactaaaactctgtctccatcaaacaacttctcatttccccctccccacagccactggcaacgaccattctttcttttctgtgaatttgactactttagttaccttagagaagtgaaatcatacagtatttgtcttttttgtgatggactcatttcatttagtgtaatgtcctcaaagtttatccatgttatggcatgtggcaggattttcttccttttaaggctgaataatgctccgttgtatgtaaatctctcattttgttaatcctttcatccattagtggacacttgggttgcttcaactcttggctattgtgaataatgctactaggaacttgggtgtgcacatatctctttgagatcctgctttcacctctttcgtatatataatccaaagtgggagaactatgtcacatggtaattctacttttaatttttttgggagaaaacctttgaattttgagcatctcaatatctcagcatataacttttcttttaagctaatcctttggatggttttggtcttgctgaggggaaggtagtatggttacatagaaagaatgtagtttttggaatcatacaaaccatggtttgaatcatggctcatctctttataaactgtgaccctgaccagattattttagctctctgagcttcagcttcttcatctacaaaataacaatgggaataacagtacattgtattggtttttgtgaagagtaaagataatgttcatgacaagaaccaaaccatcagttaaaacttgtgcatcactaccaccttctgacttcagtcattagacagagtaaagtgttatctgctgatgatttattacctgctgatgtgatttcttttctttttcttcttttttttatggtagatatcccagaggaggaagccagatattggacctacaaatgggagcaaatcaatgccttgggagctgacaatgaggtaggagcagccttatttgcagtatagagagatgggggaaaatctccaatgctctttataggttgcccagggaggggcccaagagcatgttgtcctgagaatgaaatcacttaaattgcattgaagaaaaaaggcagctagaagattgcctgaaatgtcactagaaggttccatctccaatttattctgttcttcccactctcccatactgtggtactagtctggctgtagactcttagagagggagcttgtaccagggaatctgtcctcttttgttacacctgtgagttggaggcatttcttttgcttctactgtctctcagttttttggatattattcttatttgtgtcctgtttttgaggatgtttagactattgcattgtttgttcttgctggtcctaacttacctccagagatgaggctggtgtgtataagagaatgcattcagctcaacctggggcatcaggattggagaatgtttttgttattgctgatggagggaaaagatgataaatttgtttattttggacatgtgggctactaaaaaatgggtctgattataagatatactttgagtgccagaggatatttcagcagaaattgttgataaacaatttcatgagataatttgaagttgaggtttgaatgggtagggagctgtaggcatagagcttcattaatatattagtaacaattgatgtcataggaatggaaaaacttgctcaggtagagcgtatggagacagtattaaagaacaggaacaaaatcttgggaaaccttagacatagaattctgagaaacaaaggagactgagaaagggcaaccttaaagagagagaataagataaccaggaaagattaatggaacaaagaaaaamagagattcaaggcagaaattcttgacagtatcacatgttaaatcaagtgaattatgaaatagagctattggatttggtgattgatgacgagtatacatccatagactagtacagaaagccaaaatgcagtggtttgatgactgtatttgtttcctacagctgccatcacaaagtaccacaaactaggtggcttacagcaaccaaaatttgttttcacacagttctgtagactggaagtctgaaattaggctgtcagcaggatcagttcagctccgtctagaggctctgaaggaggaagcatcctgtactcttctgcctctgatggttgctggcagtccttgctgttccttagcttgtagatgtatcattctaatctctgcctctgttgtaatgtgcctccctgtgtgtctgtctgtgtcttcacaatgcattctcctgtctctgtgtgtctgtgtctaaatttccatttttcttgtaagaacaacagtcattgaattaatttgattatatctgcagagaccttgtttccaaataaggtcatattcacagatacttagggttagaagtctaacatatcttttaggacatagttcaacccacagtgagttaaatgaaagatgaagaaatggcatttgggacaagcaacatctactcttttcagggttttccgttacctcctttattcttggtaggctttctgttattaagctgtataactcttctcatgtccacaccaacatcctaacttttcttcattgttgaaagctccagtcctctttctccacttagtaactctgagcatttgtgctatctttgcatgtactttactttgtgttttcgttcttcccaagcctggctgtggagtggtattcagcctttcagactgccatcatctttgttttcctagtaaagaagcatgttgtacttttcgttttataggctttgctctgtgtcattatacagaatcagaagaagggattaaaacaatttaaaaaccaaatataacttatacaaaaattgtggaattttataagttctaataataatggttcttggtctgtggttcccaactgcatatcagatttttgctttctgttttttttttttaattttattatttttatactttaagttttagggtacatgtgcacaatgtgcaggtttgttacatatgtatacatgtgccatgttggtgtgctgcacccattaactcgtcatttacattaggtatatctcctaatgctatccctccccccctccccccaccccacaacaggccccagtgtgtgatgttccccttcctgtgtccaagtgttctcattgttcaattcccacctgtgagtgagaacatgcgatgtttggttttttgtccttggtgatagtttgctgagaatgatggtttccagcttcatccatgtccctacaaaggacatgaactcatcattttttatggctgtatagtattccatggtgtatatgtgccacattttcttaatccagtctatcattgttggacatttgggttggttccaggtctttgctattgtgaatagtgccgcaataaacatacgcatgcatgtgtctttatagcagcatgatttataatcctttgggtctatacccagtaatgggatggctgagtcagatggtatttctagttctagatccctgaggaatcgccacactgtattccacaatggttgaaccagtttccagtcccaccaacagtgtaaaagtgttcctatttctccacatcctctccagcacctgttgtttcctgactttttaatgatcgccattctaactggtgtgagatggtatgtcattgtggttttgatttgcatttctctgatggccagtgatgatgagcattttttcatgtgtctgttggctgcataaatgtcttcttttgagaagtgcctgttcatgtcctttgcccacttgttgatggggttgttttttttttcttgtaaatttgtttgagttcattgtagattctggatattagccctttgtcagaggagtagattgcaaaaattttctcccattctgyaggttgcctgttgactctgatggtagtttcttttgctgtgcagaagctctttagtttaattagatcccatttgtcaattttggcttttgttgctattgcttttggtgttttagtcatgaagtccttgcccatgcctatgtcctgaatggtatcgcctaggttttcttctagggtttttatgattttaggtctaacatttaagtctttaatccatcttgaattaatttttgtataaggtgtaaggaagggatccagtttcagctttctacatatggctagccagttttcccagcaccatttgttgaatagggaatccttttcccatttcttgtgtttgtcaggtttgtcaaagatcagatggttgtagatgtgtggtattacttctgagggctctgttttgttccattgatctatatctctgttttggtaccagtaccatgctgttttaattaccgtagccttgtaatatagtttgaagtcaggtagcatgatgcctccagctttgttcttttggcttaggattgacttggcaatgtgggctcttttttggttccatatgaactttaaagtagttttttccaattctgtgaagaaagtcattggtagcttgatggggggatggcattgaatatataaattaccttgggcagtatggccattttcatgatattgattcttcctattcatgagcatggaatgttcttccatttgtttatatccttttttattttgttgagcagtggtttgtagttctccttgaagaggtccttcacatcccttgtaagttggattcctaggtattttattctctttgaagcaactgtgaatgggagttcactcatgatttggctctctgtttgtctgttattggtgtacaggaatgcttgtgatttttgcacattgattttgtatcctgagactttgctgaagttgcttatcagcttaaggagattttgggctgagacagtggggttttctagatatacaatcatgtcatctgcaaacagggacaatttgatttcctctttttctaattgaataccctttatttctttgtcctgcctgattgccctggccagaacttccaacgctatgttgaataggagtggtgagagagggcatccctgtcttgtgccagttttcaaagggaatgcttccagtttttgcccattcagtatgatattggctgtgggtttgtcatagatagctcttattattttgagatacgtcccatcagtacctaatttattgagagtttttagcatgaagggctgttcaattttgtcaaagrccttttctgcatctattgagataatcatgtggtttttgtctttggttctgtttatatgctgaattagatttattgatttgtgtatgttgaaccagtcttgcatcccagggatgaagcccacttaatcatggtggataagctttttgatgtgctgctggattcagtttgtcagtattttattaaggatttttgcgtcaatgttcatcagggatattggtctaaaattctctctttttgttgtgtctctgccaggctttggtatcaggatgatgctggcctcataaaatgagttagggaggattccctctttttctattgattggaatagtttcagaaggaatggtaccagctcctccttgtacctctggtagaattcggctgtgaatctgtctggtcctggactttttttggttggtaagctattaattattgcctcaatttcaaagcctgttattggtctattcagagattcaacttcttcctggttcattcttggaatggtgtatgtgtcgaggaatttatccttttcttctagattttctagtttatttgcgtagaggtgtttatagtattctctgatggtagtttgtatttctgtgggatcagtggtgatatctcctttatcattttttactgtgtctatttgattcttctctcttttcttctttattagtcttgctagcagtctatcaattttgttgattttttcaaaaaaccagctcctggattcattgatttttttgaagggttttttgtgtctctatgtccttcagttctgctctgttcttagttatttcttgccttctgctagcttttgaatgtgtttgctcttgcttctctagtccttttaattgtgatgttagggtgtgaattttagatctttcctgctttctcttgtggccatttagtgctataaatttccctctacacattgctttgaatgtgtcccagagattctggttcgttgtgtctttgttctcgttggtttcaaagaacatctttatttctgccttcatttcattatgtrcccagtagtcattcaggagcaggttgttgagtttccatgtagttgagcggttttgaatgagtttattactcctgagttctagtttgattgcactgtggtctgagagacagtttgttataatttctgttcttttacatttgctgaggaatgctttacttccaactatgtggtcaattttagagtaagtgcggtgtggtgctgaggagaatgtatattctgttgatttggggtggagagttctgtagatgtctattagatctgcttggtgcagagctgagttcaattcctggatatccttgttaactttctgtctcgttgagctgtctattgttgacagtgggtgttaaagtctcccattattattgtgtaggagtctaagtctctttgtaggtctctaaggacttgctttatgaatctgggtgctcctgtattgggtgcatgtatatttaagatagttagctcttcttgttgaattgatccctttcccattatgtaatggccttctttgtctcttttgatctttgttggtttaaagtctgttttatcagagactaggattgcaacccctgcctttttttgttttccttttgcttggtagatcttcctccatccctttattttgagtctatgtgtgtctctgcacatgcgacgggcttcctgagtacagcacattgatgagtcttgactctttatccaatttgccagtctgtgtcttttaattggagcatttagcccatttacatttaaggttaatattgttacttgtgaatttgatcctgtcattatgatgttagctggttagtttgctcgttagttgatgcagtttcttcctagcatcgatggttcttacaatttagcatgtttttgcagtggctggtaccggttgttcctttccatgtttagtgcttccttcaggagctcttgtagggcatgcctggtggtgacaaaatctctcagcatttgcttgtctgtaaagtattttatttctccttcacttatgaagcttagtttggctggatatgaaattctggttgaaaattcttttctttaagaatgttgaatattggcccccactctcttctggcttgcagagtttctgccgagagatccactgttagtctgatgggcttccctttgtgggtaacccgacctttctctctggctgcccttaacattatttccttcatttcaactttggtgaatctgacaattatgtgtcttggagttgctcttctcgaggagtatctttgttgctttctgtttttattctagggtatggcactcactacattttcatctttcatcctctcttccactgtgctgtttatctttttagcagttttattgaaatataatttttatatactgtacagttcactcatctaaagcttacaattcggtggctttcagtatcttcatagttgtgccctatggatatcaccacaactccaaatcagatttttgccttctgtttttattctagggtatggcattcactaagtttttatctttcgtctttcttccactgtgctgtttatctttttagcagctttgttgaaatataatttatatataccatacagttcactcatttaaagcttacaattcagtggcttttactagcttcatagttgtgcccatggatatcaccacaattttgaatattttcattgccccgtaaagaaaccctgtgcccttagtcatcagtctccattcttccctatcctcctcagccctatacaaccactaatcaaccttctgtctctatggacctattctgtgcatttcatataaatgaaattatataacatgtggtcctttgttttctttcacttagcataatgttttcaaggtttcattcttgttttaccatgtaaataaattcctttttattgccaaataacattccattgtatggatgtagtacattttaaattcattcattagttgatggacagttgggttgtttctctgcttgttagctgttatggataatgctgcttcgaatgtttatatacaaaatgttgtgtggacatatgttttcacttctcttgcatatgacttgggagtggaattgctagatcacatggtaactctgcatttaactgatagactgccagcctattttccaaagtggctatgacattttatactcctaccagcagtgtataagggtttcaatttcttcatattcttgtcaacacttgttattatcttttttattatatccattcttcgattcttagcatgtatgaagtggtctctcattttggttgctattccatttaaaaacttttttattatggaaattttgaagcatgaaaaaatgtagagttactcttcctttttttttttttttttttttttgagaaggaatctcactctgttgcccaggctggagtgcagtggcgcgatctctgctcactgcaagctccacctcccgggttcatgccattctcctgcctcagcctccggagtagctgggactactggcacccgccaccgcacccggctaatttttttgtatcttttagtagagacagggtttcaccgtgttagccaggacggtctcgatcctctgacctcgtgatccgcccgcctcggcctcccaaagtgctgggattacaggcgtgagtcaccgcgcccggcctactcttccattttttgctggagtattttaaaaccaatccagccgggtgtgttggctcatgccagtaatcccagcactctgggggggccgaggtggtcagaccacttgaggtcaggatttcaagaccagcctgaccaacatggtgaaaacccgtctctactaaaaatacaaaaattagcttggcgtggtggtgggaacctgtattcccacctacttgggaggctgaggcaggagaatcacttgaacctaggaggcagaggctacagtgagccgagatcacatcactgcactccaggctgagtgacagagcgagattccctatcaaaaacaaaaaacaatcctaggtattatcttgtctcacccataaatatatcaatatagatctctaacagataatacttttttttaaaaaaaaaccacaatgccattatcacactgaacttaataatttcttagtgtcatccaatacctagtcttttcaattttctttattatctagaagatgtgttttcatagttgattttttcatttcaagagccagataagatgtgcccatttggctgtcatgtctcttaaatcattttactttattttatttttgtattttttgtagagatggtgtttcaccatttgcccaggctggtcgcaaacttctgggctcaagcgatctgcccgccttggcctcccaaagtgctgagtttacaagcatgggacaccaagctcagctccttgaatcatcttagctgtaaaatcattcactttccctcatctgttttgtagacttctgcacattctggattttgctgattgtgtccccaggttttatttaccatgttcctttatctctcttatttcctttaaactgaaaagtgcatctattagtttgaagattaggttatagttcatttttgtgatagaggtgatgttaaaattcaacagtggattcaagtattgtcagcccatttcattcattatgatgttttcccatcagcctttcatctaatggttttagctgcaaataataatgactattttattagagtctgaaaaatgatgattttctttctttcttttatttatttatttttatttgagacagtcttactttgtcacccaggctggcgtgcagtggtgctgcagtctccgcctcctgagttcctcagcctcctgagtagctgagattacaggcgtgcactaccatgcctggctaatttttgtattttttttatagtgacagggtttcaccttgttgcccaggctggtctcaaactcctggcctcaagtgatctgcccacctcggcctcccaaagtgctgggatttcaggcggaagccactgtggctggtctgatagtctaattatattatcccttcagcatttattagctatgatttgtctataaaaaaaattttctcaatcccagcactttgggaggccgagacgggcggatcacgaggtcaggagatcgagaccatcctggctaacacagtgaaaccccgtctctactaaaaatacaaaaaattagccgggcgtgttggcaggtgcctgtagtcccagctacttgggaggctgaggcaggagattggcgtgaacccaggaggcggagcttgcagtgagctgagattgcaccactgccctccagcctgggcaacagagcgagactctgtctcaaaagaaaaaaaaaattttttttctgttaccagctattcagttcacagaaatatagtctgtataagaaaaacattctcttttatatttttagaataatgaactgttgcctcagcaacttctcaaggtgaccagtaagttattttcttttttaaatggaatattactatgtatttataaatttgggtatatttgataatgtatttcagcccattgcaatcattcttttttggagacagggtcttgctctgttgtccaggctggagtgcaatggcacaatcatagctcactacatcctggaatatctaggttcaagtgatcctcccagttcagcttcccaagtagcagagactacaggcacacatcaccgcacctagctagtttttaatttttttgtggaggtggggtcttgctatgttgcccaggctggacattctttttgatactaaaatgatctcatctttggttaatgggagtttcttcaagttggcttttttctcttctctttttctatttttatcatgaaaaaaatttaagtatacatacaaatacaggaataataaaaggaaacccatgtgtatacctacccctaagattcactaattattaagatttcatcatacttgctgcaaaatcattttaaaaatacaatatagagtctaacttttttattctacagtgtgtaacgtttcccatacacctcgtgggcctagaagtgctaatcaagactgatttgggcacctaccactttacagagttggattgtaccacactgtattacttttcctactcatgggcaattaggttttcactattataaatgcgtgctgcagtgaacatttctggacctgtttctctatgcttgtatttgacagagtctctgggtgtatatctggaaggatagttgcttggttgtaggatatgctctgttcaaccttagtagatattactaaattgctttctgaagtgattgtgccaatttacatttacccttttcctgtttcactgtttccttactgatacttgatgttatcagattttaaatttttgttaatctaacaagtatagaaattgttttaatttgtattttcctgtttattggtgagatttattcatttattcaccaaatcagttattacgcatcaggtaccatgcactattctgtgtttaatatacatcagtggttgaagatccctaccctcatggatcacataggcagaatcagacagtaagcaagaaatataataaatatagttgagtattagaaggtgagaagtgctataggggatttcttagtctatttggattgctataacaatgcaaactggatagcttataaacaacagagacttatttcttatagttctggaggatgggaagtctaaaatcaaggcactggcacattcattgtctggtgagggcccatttcctggttcatagacagcaccctgctgtgttctcatgtgatggaagcatgctctctggagcctcttttgtaagggtgcttatgccattcatgaagtctccacccttatgacctaatcatctcccaaaggccctacctcctagtaccatcacacaggtgaatttttggtgggggcaggggtggtgggatacaaacattcagactatagcagaggggtgtatattttttctccatgtaggtattatactacttttgttagatttttttccctaattgttgcaaatggtacattctaaaaattacattttctagttggttatcacattactattataagtaaatgctttgctgctcatctttttaaagtattgatcttactcatcaactcttattattaatagttctgatactttaaagattcccttagattttctgtgcgactaggttttgcatctttaaattacagtttttattctcctagtccttacgctttttctaagtgttgaattgtttatacattatttatatatattatatataatatacgtatataatatataatatacatatattaatataatatatattaatatatgtatataatataatatattatattatatattaatatatgtatatattatatwatattatatattaatatawgtatatataatataatatatattatatataatataatatatattatgtataatataatatatatattatatatatattatatatattttttcttagacagattcttactctttcacccaggctggagtgcagtggcactccagtgatccgcctgccttggactcccaaagtgctgggattacaggcgtgagccattgtgctgggcctgtttacgcatatatttttattaacagacttcattttttagacgttttagatttatagaaatattgagcagatatttatcccctcccccaccccatcttatagtttcccttattattaacatcttacattagtgtaactgcccaacgggttcaccttgtgtgctgcctattcagagctgatttatgaagacaggggaactgcagaggagaaagagtaattcactcagagccagctgtgcaggagactgcagttttattattactcaaatcagtctcctggagcattcgggcatcagagtttttaaagataatttgacaggtaggggtttgggaagtggggaatgctgattggttaggtcggagatggaatcatagcaggtagaagtgagtttttcttgctatcttctgttcctgggtgggatggcagaactggttgggccagatgggtggtgtcagctgattgatctagtgcagggtctgcaaaatatctcaagcacggatcttaggttttataatagtgatgttattcccagaagcaatttggggaggttcagactcttggagccagaggctgcatgacccctaaagtgatttctaatcttgtagctaatttgttagtcctgcaaaggcagactggtccccgggcaagaagggggtctttttggaaaatagctattatcaattttgtttcagagtcaaaaccatgaactgaattccttcccgaagttagttcagcctatgcccaggaatgaacaaggacagcttaatggttagaagcaagatggaactggttaggtctgatttctttcactgtcatactttccttagttatgatttttgcaaaggcagttttgttagtgtgatacatttgttacagttaatgaactaatattggtacattattattaactaaagagtattttttatttattttattaactaaaaaataaagctaaaattccatagtttattcagatttcctcagtttttaccttgagtcttttttgttatttcaggatctcatccaggatattgcattacacttagttgtcatgtctccttaggcttctcttggttgtagtattttctcagacttttcttgtttctcatgaccttttatttaaaacattcaatgcctaagacatctagtataatttttaacattgtaagagtggagagccttgtctgtcttctgactgtaaggggactgctttataagttttaaagtatgctgtttgccatggattttggtagatactctttatcagattaaggaaattctattttctttcttattttttaagcatttttgtcatgaaaaagtatggggttttatcacatctttttctgcatctgtttgatcacatagtttttctcttttgatctgtttaatatggtgaattatatgagtagattttcagatattgaactggcctagcatttaatacccacctggacaggctatatgtacatttatatgctaacacacatatgtgtgcacacatatacatacatattcacatatgaatattacacacacttatttaatatgatagatttggcctagtaatctattaattaggatttttgtctctatattcataaatgaaattggcctgtaattttcctttcttctactatccctgtctgttttttgtagacagattttgtagcttttttcttagctgtcttaacattattaattatactctagttggacttaagctttctgttttgggcctggaagagattcattaaatatagcttctgaaaatatctactctgatctcttaggtctgcattcttcttaatacttaaaattttgggattcctcatggttatgtctatgtactgtctacaaaaatcataattatttgtagtggctattatttataaccaagtccttttgttactttggagtggatctttgaccttcaagatgttttgaacctggctgggtgcagtggctcacacctgtaatcccagcactttgggaggctgaggcgggtggatcacctgaggtcaggagttcaaaaccagcctggccaacgtggtgaaacccccattttttatatttataaaaatataaatatttataaaaatatttatataaatatttataaaaatatttatataaatatttataaaaatatttatataaatatttataaaaatatttatataaatatttataaaaaatataaatattagccatgtttggtggctcacgcctgtaatcccagctactcgggaggctgaagcacaagaattgtttgaacccaggaggcgaaggttgcagtgagccgaaatagctccactgcactccagcctgggagaaagagtgagaatctgtatcaaaaaaaaaaaaaaaaaaaaaaaaaaaaaagatgttttgaacatttttgtgattggcaattttgctagtgctatcatattgtttacattgtacttgacttttcttattctccatggaaattagtaataacagtatctacctctgacatttgtaccatattctattgcttataaagtatattttatatacaaaaagtgttttgtattttggatcccaaccatttgaaatgctcttcaccactgatactcataagagtgttacgtacaacaccatcaacttttgtctggattattgcaataattatttaccctcatgttccctacagttcatctcatacagcagccagattgatcttttaaaagtataatcaaatcataattctctcatgcttaaaaccctaaagggcttctaagtacactagaaaagttcgaattcttaccatgatttacaaattctgttttgccagtgcctagaacaaggccttgcacgtagtggatactcaatcaatatttgttgagttaataagtaactcattcattggcagttttagagaagcattgacttgcctcagatctcatagcttatgaataagtgaccacgtcaggatgagaactccaaatctcatgtttgcaagttgcctggctgagttacatttttctaattatccaatggaccctgaaccagactattctcactgtcttccagactctgtgtacccctgttaatttgtttgtgcctttctctttctgttttgccttctaaatcgggcccatcctcaagatttggacataattcttttccttttatggaacattgtcttatgtcttcagtaccgtgtacttgtttttgtggtggttgtggtgggtgggatggcggaggttacagtgctagtgggagaggaactcttataaataccagatattgcaccacatgcttaggtaagcagttccacttatttcccatgtgaccttatgagcaaagaagcactattacttaaaaatgagaaaacagccccagacaggttttcacttgcatcacctgaatggggaaatcttctatacattagccccaggaaaactcagagggctgtgaaatattctaaggattctaaggccaaaccttctccagctgcctggcagagctaggtgggtgcccaggtgcccttggtcaggacagttcttcattatcctgctttatttagcctgtctcacttggccagggccataaccaatagtctggcctatatgtcaacatcacacagagaaaataggagcaggatgttctgtttctgttcaataaaaattttgtttccaaacactaaacctttttataggtagttgtgatttttttccctgtctttacttgggcttctgattgtatttatttatttattttctcctttctgcttctagtattctagtcaagaagaaagccagaggaagccattgcccactgctgccgcccagtgttgtaagtgagaaacttgtctatgaatctcttttaattgtagctttctgtcgcttctctgaacatgggttattctgagctggggagggtggagatgtcatgtgtgtaagcagaagatattcctgaagcacatctgttcaggcgcctttctctgatggctgtctatctattagctttagggagacgtttttcggttttgtatggggggagtagggctcatctttttttctacatttgttagcttctacccctggaggaatgatttaacyccctctatccctgtttacctgttattattctttaaggctcagtttaaatatcatcacttctgggtaatctttgtgctgttttctccttctcccaagtctaacttaggtctctcctgtgtgcttccattttactgtgtgcacatccatcatatgacatatatatatttctttgacatgaacacaaagttttaaaagacatagacattgttccattttatattctttgcatttggctcaacacctatgcatagtatacctcaataaaatttgataaatgattgacttatttctcctgagattgatttgtcaagatcacacagattaattattgaaatgagccatacgtttttggtatattgttaccctctccccagtttccctcaaaacagcttgagacactaaaggactgacttagagtctgatctatttcgctttttcaacctgtgatatgtgtgtgtgtgtgtgtgtgtagggggatgcgggggggggggattttgatacttttgtgttgctctgttttttctgaatctcatgccaaactccatcaactacaagttgaagatgatggtaatgattgtagcatttgttgttgtaatattagtaataataagaactgtaggctgggcatggttcccagcactttggaaggctgaggcaggaggatttcttgagcccaggagtctgagaccagtttgggcaacaaacagatacctcatttctacaaaaaaaaaaaaaaaaaaaaaaaaaaaaccaagtgtgatggcatgtgcctgtagtcccagatacttgggaggctgaggtgggaggatggcttgagcctgggaaatcgaggctgtagtgagctatgattgtgccactgcactgcagcctgggcaacagagcaagaccctgtttcaaaacaaacaaacaaacaaacaaaccatagcagctaacactattgaggtcttacagtatgccagatgccattctgagactttaagtattctaatttatttaaacttcacaacaaccctaagacagattttactgttgttcccatttttgagagcaggaaactgaagcataaatagattgagtaattcgccacaaatcacatagctagtaactggtgaagtaaatattcaaacacagaaaatctgacttagtagctcctacctctgtgtgaaccactgtgttatattgattccttcatattgtttctgaaaaggaaaacctttgtccatggtttgtgaatctgttggttgccttcaatttggtacattctataggcccactttcctgataaaagtaaaggccaatggtagaggtgaacttttttttctttatttaaagaaaacctatttttcatatgatttattactaacttttgttttttgctgtttaggaccgaacatttaaggtcataggaggtcagaagaatctgaatccaaaaccaggttttcaggtttacaggtccttttcaaaactcattgtaatgagttcattgtgattgatttaatcttttaaacctttttccacgactgctaatgagaagcaaaatgtaaagattgagattttacttcctactccttcctggtctcattgatgaaatataattgaagcgattaaagcgcaaatgccaagagggcaggaggaaataaaaaaccttaaataatcaagcaactttattcccatacatttttcatatgtttacaggctattttatttttctgtgaataagccattcttgtcttttgcctgctccctcgtatatttttattttgagaaatgttaaacctatagaaaagttgaaagaacagtaccaagagtgctcattaccctttactaggttcagtgacaagcattttgccagatttgctctttccctcatccccctcttatttttctctcatgtttctttatctctgtctccatacatacatacacaaaaatacaagtattttctgaatcatttgaatataagctgcacatgctataacacatcagcgtgtttctgctaagagctaggaaagtcaacataactgaaataccatgatcacaatcaagaaatttaagactgatacagtaatattgtctataatacagtctatattaagaactccctaattgtccccaaaaatattttgaaagctttttttatattttaaaaaattttatttattttttaatttttatgggtacatagtaggtatttatggaatacatgagtattttgatacgggcatacaatatgtartaatcacatcaaggtaaatggggtatccatcacctcaagcatttatcatttctttgtgttacaaatattccagttatactcttttagttatttaaaaatgtgtaataaattattgttgaccatagtcaccctattgtgctagcaaatactagatcttactcattctagataactatttttgtacgcattaacygtccctaatctcctcttacccctaactccccttcccagcctctgttaatcatccttctattctctgtctccatgaattcaattgttttaatttttagctcccacaaacgagtgagaacatgtgaagtttgtctttctgtgcctggcttatttcacacaacataatgtcctccagtttcatccatattgttgcaaatgacaggatctcattctttttttttatggataaatagtactacattgtgtttatgtactacattttccttttccattcatctgttgatggaagcttaggctgctttcaaatcttgcctattgcgaacattgctgcaacaaacataggagtgcagatatctctttgatatactttcatagccttcccccgccatgatctaatcaataaccatacatttcatttattgtcctgtctctttaacctaccttctttccttcattccttttcttttctttgttcttttctttctctctccttccttctttcctttcccttcctttcctttccttttccttttcctttcttttccttttctcttttcacttttctcttttttctttctttcctttcttgagaaggagtcttgctccatcatccaggctggagtgcagtggcatgatcttggctggctgtaagctttgcctcctgggttcaaccaattctcctgcctcagcctcctgagtagctagaactacaggccatgctaccactcccagctaatttttttgtatttttagtagagacagggtttcactatgttggccaggctgttcttgaactcctgacctccagtgatccgcccacctcagcctccaaaagtgctgggattacagacatgaaccaccgcacttggcctagtcttctttaatataataaaaaaaaatctggccacgcactgtggctcacacctgtaatcccaggactctgcaaggtggagacgggtggatcacttgagcccaggagttctagaccaatccgggcaacatggcaaaacatcatctttataaaaaaatacaaaaattagtcaggcatagtggtgcatacctgtagtcccagctacttgggagactgagccaggaggatcacctgagcctggggagattgaggctgcagtgagccgtgatcatgccactgcaccccagcctgggtaacagagtgagaccctgtctcaaaaaaaaccaaaccaaaccaatacaaaaacaaaactttgcctttttggtcatttatgatattgatctttttttatttacaaaaatagtttattctaattataatctctattcatatgggggtataccttcttacaggtttctgggaagcagtttagcaatatgtaccaagtctttgaataggaataggctttgactcagcagctgaatttctggaaatttatcctcagtcatcacagcagacaaagatatatgtgcaaagatgttcactgcagaattatttaagtagcaaaatttgaaaatgacttaatagttaaacagcagtaaaaaataatagtccttaagatagaatattatgcatttattaaaaatcatgctttgaataataggaacattttcatggaacttggtaaaaaaaaaaaaagtattacagttatccctcagtatacttgggggattgcttccaggacccctgcacgtacyaaaatccgtgcatactcaaattcctcacttggccctgaggaacccacctatatgaaaacttggccctctgtatatgcaggtttcacatcctgcattttctatctgtctcattgaaaaagatccataagaggactcatgcagttcaagcttatgttatttaagggtcaacttaaaaccctcagtgtgtgtgtgtgtttatgtatatatatacataagcaatttaagacttattgctgagaacttaattgtgtctaccccccatttatatattgaagcctcaacactcaatattattatatttggagacatggcctgtgaggaggtgataaaggttaagtgaggtcataatctgatagggctggtgccctcataagaagaagagatagcagagctccatccctaccaagtgaggacacagtaagaaggtagccatctgtaagccaggaagaaagccctcaccaggaattgaatcagctagccagccccttgatcttggactttctagcctccagaactgtgagaaataaatttctgttacttaagacacccagtctaagtgatttcgttaaggcaatccaagaagactactgcagattttggtactaagaggtggattgttgctgaaacaaataccaaaaaatttgcaagtagctttggaactgggtgatgggtagaggctggaagagttttgaggtgcatgctagaaaaaactgagatttccatgaaggggttattgttagaaatatggacatgaaaggtgattctggtgagggcttagaaagaaaagaggagagctacagagaaaacttccatcttagagaatgtgtaattaatcatgatcagaatgttggtatgagtgtagatattaaaggcaatttttgtgagatctcagatagaagcagttaataataataataaggaaataactggaagaaggatgatccttgttataaggtggcaaagaacttggctgaattgtgttctagtgttttgtagaaggtagaacctgagagcaattaaattgcatatttagcagaagaaatttctaagcaatgttttgaagatgtgatgtggctttcccttactgcttgtagtaaaatgcaagaggacagaaatgaatgaagaaagactgttggacttcttaggttctagaagactggaccatagagctatttgactgtgaatctgtgctattttccagggaaaggaaagaattaccctcaaaggtgacagaggtcatcagggctgcccccctcaccacagacctgggggcaaggtcatttacttcattatgtaagagggcaggcttatcacagtgaggcagctcctgaaaagccaaggaggcagatatatcaagccaaagagaattattcttgagtcttagatctaatggaattcaccttggtaggctttggacttgcttaggacctgtcaccccttcctttcttccctgtttctctcttttggaatgggaatgtctagcctatgtctgccctacgattgtattttggaagcacataacttgtctggtttcgcaggtttatagctggaaatgcatttcgctttaggatgactctttactcaagatcactcgtcttatttagatgataattagataagacttgggactttagactttgaagtggaaattgaatgagttaagacttggggctgttgggatggaatgaatgtatcttgtgtggataaagacatgaattatggggggctggggcagaattgtatgaacttgattgtgtcccctccaaattcatatgttgaagccctagtccccagtttgactgtatttggacataggacctgtgaggaagtgataaaagttaaatgaggtcataaggatggagccctaatctgacagggctggggcccatttaagaagaagagacaccagagcttgctctctccaccatgtgaggacacagcaaaaaggtgaccatctgcaagccaggaagagactgttcaccagaaaccaaaccttatgggaacattgaccttgggctttccagcctcagactgtgagaaaataaattgttgttgtttaagctccccagcctatggtattttgttatggcagcctgagcagatgtatacactatgtaaatgcatctatacaattataagaaaaattactaggaaaagaatgatcaaaatattaaccaaatttgtctctaggatatgggattgtggccttaaattttttttaatagttaaaagttattattggccaggcacagtggctcatgcttgtaatttcagcattttgggaggctgcagcgggaggatggcttaaggctgaagttcaagactagtccaagcaacatagtgagacccccatctctacaattaaaaacaaagttattattaagaaaagtaattgagttcttgttcattctttttcctttttttgcgatggagtctctctcactctgtcacccagactggagtgcagtgacacgatcttggctcacggcaacctccgtctccctggttcaagtgattctcctgcctcagcctccgagtagctgggaccacagtcatgtgtcatcacacccggctaatttttgtatttttgttggccaggctggtcttgaactcctgacctcaagtgatctgcctggcttggtctccaaaagtgctgggattataggcgttgagccaccaagcccagttgagtccttgttcttaacctgggtttgctgctctctctctgtgactttggaagtcatcccactgttaacttcagtttcttgaagtaataaatggaggtggtgttctagatgatctctaggacttttccagctgtagcacatcatatgactctattacttcctagtcctcagattccttcatgtggatggcccctccactacccagtgtgttaggatcaatcctctgcggccatttataagatgtttccaaagtattttcagaaatcactgggctactgctctaaagaaactctccctttgatacaagagttactgtggctggaagtggtggctcatgcctgtaatcccagcactttgggaggccaaggcaggagaatcacttgaggccagcagtttgaaaccagcctgggcaacatagcgagaccctgtctctatttaaaaataaataagtttaaaaagtaaaaaaataaaaggagttactctagccccagttatttggatatactcttaaaggtgatgggattctttaaaagtattgaggcaaactatctgcttttcccctttgtctcaggtcaagcctttctcttttagcattcagtaacaacattctgcattcacttttatcctgtgaagtttttgtctcatttggtaactgatatatttattttaaaatgttgtagggtaattattgtgatttattatgtccatctgttttttatcccccattttattaccatttctagcatttaggctgacttgtgcccatttcttgaaagaaaggwaaggcagagagcagaagaagtgatctttgtggttttaacttcccaaagcctaagattttaggagagtatgcaaagtgttctggacaaatattatgagagggagcagagtttcacctgaatctcccaatttctaagaagagcttcttttgacttgaatgagaggagagaaatgcaagagaatgaggagagaaagaaagaaagtgaccagggkagatacattgggaccttgtgtctgctttctgtgttagggcactggtgaagcagcaggagtcaaagaggggatggctaggtgttgtgtcttaggcagatggaccatcacaaagagattcctatgctccaagttgcacttgctccaaaatgagtcttgggctttctagaagtgggaaagtgagcctctggtcctattggaaccacttgggcaggaataagaaatgtctctctcagaagtgttctctgtgtccgagtgactaaggactggaggagacctggactatcttgatgaatgccagttcacaaagacacatccatgccatgggcagtcacttcactgcagtgtctttttaaaaattattatgctttaagttctgggttacatgtgcagaaacactgcagtatcttattcacatgctgtgtcagtattcagagcagtcttcatgggacaggggcaagacttaggttgagactgaaggatgaatatgtcttctaagagtgataacattagttttcctaggagacatattgatctctttgttggtggttgttgcctctctggctgatattgcttggttgttcctgccctctgaggtgtaggtgagtgctggctttctcaatggggtgcaggtgtgagtctccaaaggttacttttggggactccctggggtcttatgtgagtgattgctctggttcaacttcttttgtcctgctattgactactaccaaaagatgtacttagcttgttgctgctggtatcctgttacttagaggcttcttgaatggggaaatatcaagataactgggactcacccacattccacagaattcacatgacccatgggaactcaattattcttgccctgagaaacaaaggatataggcaagcagttccattctcttctctgtctcccagctctgcctcctctgttctttttggctgcttagaaaagtacacagttcacatcagcaagtctcctgtccaagcagacatccaacctgtctggctccactcccattcttgtaggcatccctaacctttgtgaattatgaagctcctcctcacttggattcagagcagaaaaacattcgtttttcccctccccaggaggtggagaggggaaggagtgacctctcttcaccaacaattgctctcccaaaggttgctgggtcccacattgacatagacattctacaagacagctgacaaggatctagttaaattgtcttaacaaaatttcctggttgggcacagtggctcacgcctgtaatcccagcactttgggaggctgaggcaggcagatcatgaggtcaagagatcgagaccatcctggctaacacagtgaaaccccatctatactaaaaatacaaaaaattagccaggtgtggtggcgggcacctgtaatcctagctactcgggaggctgaggcagaagaattgcttgaacccgtgagacggaggttgcggtgagccaagattgcaccactgtactccagcctgggcgacagagcgagactctgtctcggaaaaaatttcctaaaatctggatttgtctgattatttcctcgtaattagattcaggttactgcacagctgatgtcaatttgtccctttatttgtgatgctgatgttaattattagttcagatgatgttttccagatctctttgttgcaaagatatttttctcctttgtaactaagtgtgtagtggcagtgatactttgagactgtgtgtatactgcttttatttaaataaacttccatgcattagttttaggatgtattatgatcattgcctaaatttattattacactgtggttgcaaaatgatgattttctaattctgtcattcttttttaaaaggaaaaaatggtttctctatacttgcacaattctgacaccaagtatgttttccataccaagcaattctctgctaacatcaactgagtgtctcatgacttaattctgacactagagatgtggagttagtgcagaccctacaggttaagggctcagtcccacaagactgcctcccactttagagaccaatcataaatcccaggttactgcctgaacttctgaccaactggctataaactggagttcccacaagcccctcctcaggttcaataatttgctaggatggctcacagaacccaggaaaacagttaatttggtattaccgattgattaaaaggatattttaaaggatacaaacaaatagccagatgaaatgatacattggaggaagtccagaagggtctgagcacaggaacttctgtccctgtggagttttgggtgcactactctccctgtgggtgcatttttgttcaccagtgtggaaactctctaaacccctttggctggggttttcacggacacatcattatgtaagtatgattggttaaatcattgatcattgatgattaattggctcaaccttcagcccctcttttctccctggagtttgtggggtgggactgaaagttctaaccctctaatcacaaagttggttcttttggcaactagcctccatcctccaggagttatcacattagcattaactcaggtatgattgaaaggggcttactatgaataacaaaagacagtcttatccctatcactcaaggagttaaaagggttttagaagctctgtgccaagaactgcaggcagagaccaaatatttatttcttattgtgtcacactgttattatactgaacagttgccagtcttttgtaaagaagagctttccttcttcgcatacccccacccctcttttaaaatgagtatcactatggacacatgatttttttttttgaacccagtgttttgtaatcctgttctgccattttctttgatgctcaaattgtcctgaatttggcctatgggtgttccttttaactagatcctgtgtccttttgacatggccctatcattctttgaccacttccttccttccttagtacaaaatattccaagctcatcttgtactttgccttctcagtcctagaataagtcatttctccaatgaggctggttatttttagtggggaatggtatttaaaaatcaagatcttggcactagttttgctcgttgctacaggagggctcttgcttcttggctctttggatggaactagggaacacactatgttcttcatactggtatcaccaattaacaccctcatcacaaggttttcctggtctcctttcatatattctctctctctctatgtatatatatgtgtgtgtgtgtgtgtgtatgtatgtgtttgtgtattatgcacatatatatacacatatatacacacatgtgtatatacacacacatatacatgtatatcttccagtgagaacctctgttcccaagaacatcaaattatttattcatttgctgtgtcctgtaatgtacacaaacaaattttaggattaatatacccagtgctattatcaacaataagacaacagtctttaagattcttgaaagtttttttttaaccttagaatataaactcacataagattacaaaaccaccagcacaccaaaaatttaacaaaattttataatgtcatcagtrtctatcctatattcaaatatccccagttttcccccaaactttcttgtcctttttgcaccattgtagaagttaatcaaggttcacacattgcatttgtatgtggtgtgatttgagtgaagatcgtctttttgcatgtggatttccagttgtcctaagaccatttgttaaaaaggcattttcggccaggcacggtggctcatgcctgtaatcccagcactctgggaggccgaggcaggtggatcacgaggtcaggagatcgagaccatcctggccaacatggtgaaaccccatctctactaaaaatacaaaagttagctgggtgtggtggtgtacacctgtagtctcagctactcaggaggctgagacaggagaatggcttgaacctgggaggtggaggttttagtgagccgagattgcgccactgcactccagcctggatgacagagtgagactccatttcaaaaaaaaaaaaaaaaaaaaggacatttctccccccattaaattgcctctgcatctttgttaaaatcattcttactaccaccacatgttcccattactttccttccttttagcagattagattttatatattcacattagaaagtggatatactttcttttaggatatgttcttcagatgtggcctcagctgggagttggtagcagatgccaggagacgcatgyggctttttgcatgcttgagcctcagtacatcatgtttacttttgcaggtcttattgctcctcaatttatagagctgttctgaggctgtgcaatctgatttgcatatttgatacaaatcttgcaacaaatggtatcagtataatataaacatttagccacaaggctaaatggtcagaagttgagctagagggataaactggtctgttccttttccaaacatacctaaagtttctaaggtatttacacttcactcttcaataaggataatatttctacctatatcttgtcaaagaatgtagcaacacaccatgttgccataccagtctgactactactaaattcaacaactttctgctcttttcaatttttatacatgtctgccttgcccacccactgtattaatgacagtatcactggctacaattgagaattgaatcaaaagtgatttagcatgtgatgaaggtttggtgagatgactacttacatcgaaaccatcctggccaacgtggtgaaactgctagggtgtgtaaattagtacaacctttctaactcagtgattttacttctaggaagtattcaaggaaaataactagaggttcaaaggaagatttatgtataggttttatttataatagtgaaaaattacaaagaaaggaagaatggataattatggtatttccatatgatggaattgtatacttttacataaatttttaagatagaggaaatatttatgtgtataagttctaaaaaataggatcctaacctgattaagatgatctcagttatctaagaaataaattatatacatatgtacgtagaaaaaccacaaggaaatataatttttttgttttttttttttggttgtttcgttttgttttttttgtttttttttgtttttgttttttttttttgagatggagtctcactctgtcgtccaggctggagtgcagtggcagaatcttgggtcactgcaacctttgcctcctaggttcaagcaattctcctgcctcagcctctcgagtagctgggattacaggcacctaccaccacacgtggctaatttttgtatttttagtagagacagggtttcaccatgttggccaggctggcctcgaactcctgacctcaagtgatctacccacctcggcctcccaaagtgttgggattacaggcgtgagccaccacgcccggcctgttttattttttctttatactttattgtactttccagatttcctccaaagaacatgcatttgttttataataattttaaaagggataaatattttaaaataacccaagcctgacaatacagaagcaagttattgtagattcacttttttagtttgaatttgagacttagttgaatgataatttattgttgagattgacatagtttagttcaacaataccagtgattccttcactgaaaattccacgtagcttttagagttgcagtgtaccttttattaatgatatccctaaagcctcccttaactacttaccgtgtctgaaacaaaaagcttctggggtctatgttatttctatatgtattatgatctaaaagatagcttgaacttttgcttgagatatagcccaccttggagtttcaaagagatttttctggttatctattaagggtttgtttcactggttttcttacagtattgcctataattagtgatctatacaaatcataaaccaaaatgtcctgagtacgaatcattcttttaaattagtaaaacggcataacccaacatattgtttaaaaattttcttgaagaatgaatcagttcagaacagttggatgtgagtcatatcatgaataacaagtgaccaaacattcagaagcattgtcagtaatatactgcttagttgctgggttgtgacaaattatttgaccaccacaaacttcagaagaatttcttttaccagcatatccaaaagaggcatgtttaataaaattacttacctttcctcattttcaactcttactgtcaaatgtcctggtcctagtgtccattgcgttgatatttgttgattcttagatggcaagcagtaggttttcaatgctttccactagttttcagccattagacctgatattcatattcctagtgtgcaccatattcaaatactcctcttatagcctcttattattcttggtctccatctaaaactgttcactgccactctattacctgtcttatttctaatattctacctgttaggggaggcagagaaatgggtcattctgtatatgtaactaggtattccccacttggacgattaggttcctgcctgctctacaagtgatgatggtataatccccaactaaaatcaaccacaaaaaaaacgctaggcaggtactgccagtgcttctcttagtctcattttcacacctaccagaaacaagactagctttaggcctgtgggctgtgttggccgcctctcaatggaggctaggacttgctttcgtagttgggtcttatagactttaagtagaacaggaaatgttgtccactcgtttttggtccaggatacctttcttttattctggacccaccacagccagagggagctgacccaagtggcaattactgtgtcaaagcttgatcatgtagagtatgggactatcactccaccatttcatgccagagaacaccatcttgagaggatctagtgcttcctgaccatcagacctaactacctcgcacagctccaagtaaaaaagaagcctggttagaaatctggatctgtattacttattttccgtatgacagtagccaccatactgataacccctgcctatcaggagatatatctcttagagagctttgtggcctcgcactctcaactagtactagcattcttttcttttctttttttgtagaaatgggggtctcactatgttgcccaggctggtctcaaactcctggcctcaagctatcctctgccttagcctcccaaactgctgtgattacaggtgtgagccaccacacccagtcaagaatttgcatgtcttacagattcaagagcatatagtagattaatccatgttcctaataatgccttaaagagaaccagaatctctcaccataattgaattttgaagggacagaactcagaaaatctgtcctctgtatccccttataatgacatgttcttattctgtggcaggccctttgaagacattaggatggcctgctaggacttctgacagccttcataaagaatgccccacaatgaaatttgggggacaaatgccaaagataatcctgggagacctgagagattattgaactctctcctgatgcccaggttcctctgggacattgctaccttgggtttaattataaatgtatccacttcttgaagccataatataatatgtatgctgttcacttaaattcagggccctgtgagtgggctatttagtccctacaccagctggcctttggctgcatccaaattgcagtgctcccccataaaagagatgtccagctccataactttcccaatcattttttgtcatactgtgaaatcatacttcaatagatatcatgggtttggagctttttgttcagtgtcctctaggttaaaattctgcactctcaaagtcatttgtgatttaaagttgtagaatgtattggttttcttgttagttttgaattctttttttttcttttctttaccttggctggataaagttatgaattcttgatggccactttgcatggtattgtgaagagcagctcagagtctttttttctcccaagtctcccaaccagttatctttttctgcatcacttgtttctaggaaatgggtaaactagagttaaaactttggtcagcttgactcaaatgtctgtgttctttccgctataccaccaccctgtggtggcaaaaatctcatgggatataatttgccattcagaaatatgtgcttttcttacgtggctactgccctttgttttaattaaaattaattcatttattgaataggtaatatactttgtataggagttttaaaatattaaagggagtatagtaaaaagtctccctcctgttcctattccccagccacttgggtcttctccccagaggtaatcatcgttagcattttcttgtgaatcattcaagaggttttactgctgttcgaatatacaggtatatacattagagagatcttttgattattctttccatcctttgaattggttttatttactcattcatttattctgagatggagtctcgctttgttgcccaggttggagcgtagtggtgtgatctcggctcactgtgacctccgcctcctgggtttaagtgattccccttcctcaacctcctgagtagctgggattacaggcgcctgcaaccacacctggctaatttttgtagttttaatagagacagcgtttcacaatgttgactaggctggtcttgaactcctgacatcaaatgatctgcctgcctcagcctcccaaaatgctgggattacagtgagccactgtgcccggcctgaattggttttagagtaccaaatactacaataaaatgtccacagctaacttatagttgagatttgaatacttcttgatcagtgtcttttttgggttctcactctgttctaaggatttatttaaaagccacaggggctaggtgcaatggcttgtgcctgtaatcccagcactttgggaggctgaagtgggcaggttgtttgagctcaggagttcgagaccagcctgagcaacatgatgaaacccgatctctacaaaaaatacaaaaattagcctggtgtggtggtgtgtgcctgtagtcccagctacatgggaggctgaagcgggaggatcacttcagcccaggaagttgagactgcaatgagccaagattatgccactgcactccagcctgggtgacagagtgagagcctgtctcaaaaaaaaaaaaaaaaaaaggcatagggaatagatggtttattttattttccctgttgctttccatagcaaagatctgtttcccaaaatcctggccttgagtacaatagaaatgtttcctctgtctgcactcaccctcctagaatgactttcacacatttattcctgggtcaagaacttctgcagtttatgtccatagaatatgttagtttcctcactaattttgaattcgttgtggtcactttttgtggtgttgtgaagagttatttttttcctcttccaacatactgagtccctttcttattttaaactttgtaaaaaatagaaatacgtaacatgggtactataaaagtcttcaaatgattcagaaatgtgtaatatagaaagtgaaagtactcttcaatttccccctctattccactccgggataactagtcttcacagtttcgtgtatattcccccaacattttaatttttatttttaaaaaatgagtcaaaaatttaattatgcggtgtctttcaatgataattgttttccctcccacaaaggccaaattgttctttttgtctgaattacaaaagaataaatgtaaaatacaaaagttttagagcataataatgaaactaatacccattagcctaccactcatcattatcctttagtatagtttagtaatgtactcagaagtttttcttagatttatcatgctccctgagtgacagtgttttccttcatatgggactggtgaattgcaagtgtagggacatagtctttggtttcttagttttgctgtctgatatgttaggtactcagggagtgacgcttggttgtttgcccctgagggacctcatcccatccaggttttagggaaagacaatttaacctttagaggaaaaaaaacaatgatcattgaataagagtgtaatttgcagtattttctggaagatggcatcctttttctttgggttggaaatttactttctccagagcttgtagattgctagaaagcttctgtaattgtgactactagactcatattcaggcgattgagacatgagtttggcaatagctaaagctttgttggctatattgtaaggtaatttataagcattagaatgctcaggggtatccctagtagaaatgacattgaagcagatgccagacagagaactgtcatacttttccwaatttttcctgtgaagctttgagacttcagcattacagaaaagaaatccagagccctgaagtacaaaggagcttatccattatagagcttttcattttctcctttgcaaaggcttttatattttctcggggggttcttgttcttagtgagtagctatgtaaaccagggagtatatttgcagaggctaggaaagaattaatgggagaatgcaaaaacaatcaaaagatctgaatcacaacctagactcaagtccgaagaggtaaatatacaaagacagcaacttgaatatgtaatttataattacatattcacattgtgtacacagtaataccatggaaagtaccctcaatgggtacacagtaataccatggaaagtaccctcaatgggtacacagtaataccatggaaagaaggaaagtcccgaggtggcaaaggaataaataaatggttaagaatggcataaagtttgttcaagaaggctttccagaaacatatgtttagaaattacttttgaaagaactaatcgagatgtgttcattgaaatgagagattgttcacagtagtataaatgaaaagaatgaggagaggattacaaagatgcaggacacactggcttagagtacagtgatgtcatagttgtacttgctaatctgccagaggaaatgaatcctcttgttgttgttggccttcaaaaagccaagatgtacagggctcgcccagtttggcagattcatttctttgggagccttttctttcttttactccagatacgtagagtcctcattatcatctatcaccttctctctgtttaaatgtgtcgtagaattgaaagttttgagccgcttaagattttggtggctaaaattttgttgctgtgatggaagacctgtttctgtgaacactggaagcagaagagccttatgattactttttacttatttacccaggaccacatgccctgcaggaaaataggattgcatgaccagctggcctccactctgcagattcatccacttcttcaatgtcctctatttctccttctcatttttaaaatcccagaaggcataggtccccaggtcatatacttcttttgccaccttcttctacctttttgccactttttttttttgtctgagccttctatattggctcttgcattaaagcatcctaatcattctggagttccataggtagctgattcttgtttatcttataagtaggatattttccccattttattttattttttgaaaggaaacatgtgcataaggtacaaaattcgatgtaaaaatgtatgctatgaaaaacagctttttttctgtaccctgtcctttagccatacagtttctacccagaggtaaccactactgccatttactgtggatttctctagaaagagtttatgcattcacaaacatataaatatatattcccccacccccatgaatggtagtatgctatgaactgtgtttagtgtcttgctttttatcatataatatgtatgactacatgtagggaacaggttcataataatggacattttaaaaattgaggtgaaactcatgtagcataaaataaaccattttaaatatataatttagtgacatttagtacattcataaattgtagaaccattacctgtctagttccaaaacatttttatccccctcaaaggagacctcatacccattaaacggtcactctccattctctccacccctcaccgctggcaaccactgatctactttctgtctctatggatttacccattctcgatatttcacataaatggaatcatatagtattaggccttttgtgactggtttatttagcagcataatgtttttgaggtgcattcaccattgtggcatgtatcagtcctttatcccatcttatggctgaatactaattcattgtacagatataccatattttgtttatccattcatagttgatgaaatatgtttttttttaaaccacttttggctattgtgaatagtgctgctatgaacaacagtgtacaagtatttgaatagctgttttcagttcttttgggtatatactaggattagaatggctattaatgtacatttaagttgcttccagtatttgcagttacaatactgaaattgatattttatatacataattttatacatgtgtgaatatatctgttggatgaatagctaaaagtgcgattgctgggccaaagcattgtacatttaacaatgcatttgaattttgaaatatgttacagaattgcccactatggaggctgtactatttatattcccacttacaaagtatgagagtgcttcatctttccttagcttttaggaatagtcamccttcctacaaaattatattgcagagatggcacactgaggatagccataggcaaacagttcctgtgccatgattcactgagtctcctttctgcttgcctgcttatcctgtctttttctcctctaccatctgggccgtctgattttctgattccccaaaaagaggtcttgataactgggccttttgtttagtgtcctggtcaaagttcttcctctggtttaacttctgtctttctgcttacatgttaattttgggtaatcctttgatttcattttcaataataatattgtggaagtagagaggaaagtgctgaggtgacagaagaagaagcaaatggttgagaatggtataaagtttgttcaggaaggcattctagaaaagatgagtttcgagatgacttttgaagaagttatttgcaatgtaaagtttgaaaggagagattattcctagtaggataaatgaaaagtaggaagaaagggttcaaaaggtaacatactccatctcaccccactccccatgtcctggtcaaggtatctcttactggctggaacattctttttcctattaccttatcccattggggagtgggaagtaaaggatcagacagggtatagcttctggtacctccagtctaggactaagactctgagagacacgaaaatatactagttatggactccttagagtgagtgcacagggagtattattttagtggtaaggcagtgcaatgggtctaggactgtcagtaagggtgggtgatgagttttacactagatatgtggtatcagtggaagcagctgatattgatgctaattataggtgctggcaaactaaaaagaaaagagagaaactattacaatatggtttggctgataaaaataatgttaattgtagtcttctgactcatttatttatttctatcctggcttcctctaaaaagaaatttgaggtggttaattgcagtcattacatcaacttattataatttatgttcagttacaattatacacaattaaccatgttaaaaatgtcagattaatgtatcaaagtttcatttgctagcaacacttaggtgtctatgctgagtacagtgtgtgttgtatatgcataaaggtcagttattaccataaaagcgtggtcatctgatggcttcttgttataggtttcattgggaggctgaggcgggtggatcacgaggtcaggagatcgagaccatcctgaccaacatggtgaaaccctgtctctactaaaaaatacaaaaaattagctgggygtggtggcgtgcgcctgtagtcccagctactcaggaggctgaggcaggggaattgcttgaacctgggagacggaggttgcggtgagccgagatcacgccactgcactccagcctggtgacagagcaagactctatctcaaaaaaaaaaaaaaaaaattagctgggcatggtggcactttcctgtaatcgcagctactcgagaggcagaggtaggagaattgcttgaacgctaggggcagatgttgcagtgagctgagatcacaccactgcactcgagcctgggagtgagagactgtctcaaaaaaaaaaaaaaaagagagagaggaatgaaagtccctgacctcagggagctcaagtccagagaggaagaaacataagtagtaccatttgataagtgaatgggaacgtaagtacttgatattcaaggaatacagagaaagagaatgtaatacaaatttgggatggttaggaactgcttcccagaggaaatgatatctcaaacaaagtctgtagtttacattatggttctctctttgtattgtacattctatggattttgacaaatgtgtgatgacacatatccacccttatagtatagaatagttacgctgccctaaaaatcttctgtagtttacctattcatttctacctctccccagatccttggcataaattgagtcttaaaggatgagtagcagacagttaagtgaagaaggagaaaagagttcatagtacaaggacactaagatgaaaaagcatgacttaaggtaccttggggtactgcaagttgaaaattcttgatggcttcggtggagggaataagaagagtggggaagggtcagatgaggccagagagacacagagaactcatatcacaaagggcttgaatgccatagcaagctgtttatattttatcttgaaggcaagggggaacctttgatgactttatgcagaggaatgaaacaattagatagcagtgattatagtgatgtgagcagtttgctgcattaaaaatctttttaatggtagaatataacacagatatatagacaactttataaaacaaatgtttaaatgtattagtataaggtaggtaaaagatagacctttgccaaccaccccagaaagcctccatatgcctcttcccaatcacaaccccctcttccctaaaagtacctactatcccaacttttataataattactctcttcttgttctttatatgttgtcacccaagtatgtatctttaaacactagagtttgtttttgcttgttttcttgttttctctttttgatatgtcttacaattttttttgtttgttttgttttgttttgtttttgggatagtctcactctgtcacccaggctggagtgcagtggctgtgatctcggctcactgcaacctctgcctcctgggatcaagagattctcctgctttagcctcctgagtagctaggactacaggcacatgccaccacacccggataattttttttgtatttttagtagagatgggatttcaccatgttggccaggctggtctcgaactcctgacctcaggtgatctgcctgcctcagtctcccaaagtgatgggattacaggtgtgagccaccatgcctgatcatgtcttacaattattttttattctatgggttccccctccgtctcttgcttttttttccttacaatttgtttattgaagaaatcaggccatttgactatatggttttgtttgacttacagagttttttacattcccgattttgctcaaaacattcctataagtttagcttaacacactcttctgtcctttgtatttcctgtaaattgtagttgcacattgaagattgatgatattgatgccaggcatattccatagtttgagtatactataatttaaaattttttccccaatttgtagacatttggattgttccccagtttttgctgctaaaacacaatactatagtgagcaactttatacacttttttttgtaaacatgttcaaatgaatctcccatcctctattacacagtatgtatttttcctctatggcactttctcagtttgtatgattatttgattaatatttgttcccttctttaggccatacatttcatgagtatacccattgttcataggtattttcctttgatttattaatatgcttatctgtgtatccatagtacctttgcccaataaatattagttgaataaatgcatttctataagtggaatcattgggttaaagaatatatayatttataattttgttagacactatcaaattgtataaaaatattttacctatttatatttctgctgctggtacttattttcacatttagcctcactggcccactcaacaacaccgtgccccccacccacctcttcaccccctctcctcttttccttttgttactttcttctacaaacatttttttgacacttacattccaggttttgttctaggtgtttaggatatatcagagagcaaaacaaagatcctgggtgggaagaaatagacaattaacataataaggaaataatataggatgttagagagtgaaccaataaaagagtgaaaggcagttggtaatgctagaattggagttgagttgcaattttaaataaaattctgagtattggccacatgagaaggtgacatttcaatagagttgaaataggtgagggaattaacgtggctctctggggaaagagtgtgataggcagcgtgaacagctagttcaaaagctggtagctactgaaaaggagtaggaagagttttgctgggtcctgggaatgctgtttcttgatctgtgtgctggttacctgagtgtgttcacagtattcattgagcagtacaggccgggcgtggtgtttcacgcctgtaatcccagaactttgrgaggctgaggccgggggatcacttgaggtcaggagtttgagacaagcctggccaacatggtgaaatcccatctctactaaaaatacaaaaattagccaggcgtggtggcatgcgactgtagsctgtagtccagctacttgggaggctgaggcaggagaattgcctgaacccgggaggcagaggttacagtgagctgagatcatgtcactgcactccagcctggttgacagagcaagattctgtttcaaaaaaaccaaaaaaacaaaaacgttgagcagtacggttatgatttgtatatttttctctatcttatacttcagtagagcttgcatatttaaaaatattagtggatgttgaacatttcaaaatgcattaatagtacttaaccaattcatggatatttttctttgacttattaatataatgaatgcattaatcagtttctattaataaatcatctttgcctttctaaaatataacctacttggttatggtgaattattcttttactataatgctaggcttgatttgcttgtatttcattttggatttttctatctatatcacaagtaacgttggtgaatagttttttgttattctcctatgttagatttgaagtgttttccttaattataggttctttactactgtcttccgtagaaagagaagttctacagtacttaccgaatcaactgtctagaaaaagggaagagaataatttctagtgtttgagtttatggtccttatgagatacctggtaattactacaatttagtagttgataggtgagttcctgtcattgcctagacagatggctgttcacatggagtctggggcttaagtattccatcattttaatgtcatggaaacattagccagtactggactactaatgggtggtgtaacagttgcctgggggtgttttgtttgataattgtagaccttactttttaatgtgactatttctgatttcttacattttccactagaaacaagataaaatgtgcagaagaagcagcctgtgagtgtgttgctgtagcctagtcagccagcctaggggatggggataagtgcagaggtttaccttctaggaaagaggatgtactttcgtcttagaactgctagaattttttcactgtatgatgacattgaacttttcttcaggctcagtaggatagtgggtctggctgccttcttcctccattagcacaggagtattattcttctgtctgggagactgtggctttttcatataggaaattctatagctgtgtttttcgcaatgtaattcaagaatcattggcatgagagtcaccaagtttcttgttgaaaagccctttgaattagaatctctgtgagtagagtttaaaatttacattctaaacaagagcctcaagtaattattaaaattaaaagatggccaggcacatggttcactcctgtaatcccagcactttgggagcctgaggcaggtggattgcttgagcttgggagtttgagaccagcctgggcaacatggtgagaccccatctctacagaaaacaaaaattagtcgagtgtgatggcacgtgcctgtagtcccagcttctcaggaggctagggtaggaggattggttgaggcagcaatgagccatgattgtcactgcactccagcatgggtgacagggcaagacctggtttctaaaaacaaatttttaaaaagtccagtcaaatatctgtaataattcagaataattctgtaatctctaataattcataaggtaataagtttcttgataaggatagttaaatcttcaaggaaagcacaaaaggaaggagatttcagcagaattaactactaagtttgttgactgattggacatgggaaataaagaggaattttaagaatggtcctgtggtttctgatttcaaagtattgggagtttggtggttttggacatgaggtgtacttgctatactcccgtatttctagagaatttttaacactgtaaatacaatgccattaccactgggggctgtgatactgtgattttataataagaaacatatattttggtctttgtccctggttcctgacacagagctcctaatctcttagaattttatggatactaggaatgtctgttgttctaatgagggactcttgatgggcttccacataggaaccagttatcagacagaccaagccatgtttggaagcttggaactttttttttttttttttttttttgagatggagtttcactctgtcacccaggctggagtgcagtggctgtgatcttggctcactgcaacctccacctcccaagttcaagtgattctcctgccttagcctcccaagtagctgggattacaggtgcctgccaccatgcttggctaatttttgtatttttagtagagaagaggtttcactatgttggccaggctggtctcgaactcctgacctcaaatgatccacccaccttggcctcccaagaagcctggaaattttagccccattccctttccttcaggaaagggagaggaactggagattgagttaataattgatcatgccaggtcaggcacagtggctcctgtctgtaatcccagcactttgggaggctgaagcagtaggatgactccagaagcttgagaccagcctggacaacatagtgaggccctgtttctacaaaaaaataataccactaatactacttataatagattgtgtctatatgataaagcctccataaaaatcccaaaactgtggatttttggagcctctgtgttggcaaacacatccgtgtgctgggagggtggtgcatcgcaaatccacagggcagaagctcctgtgcccaggactcttccagaccttgttctgtgtatttcttcatgtggctgttcaactatgtcctttgtaatatcctctaccgtagacgggtaaacataagtaaaatgtttcgttgaattctgtgagttgtcctgcctcagcctcccatgtagctgggaccacaagcctgcaccaccatgcccagctaactttttggttttgcctgtttttgaacttgttataagttatcataaattatctttcctttagagttagtttcatttctttttctttctttctttctttctttttttttttttgagttggagtcttaatctgttgcctaggctggagtgcattggcatgatcacggctcactgcaacaaccagctcctgggttcaagtgattctcctgcctcagtctcccgagtagctgggattacaggtgcccatcgccatgcctggctaatttttgtatttttagtagagacaggtttcaccatgttggccaggctagtctcgaactcctgacctcaggtgatctgcccacctcaacctcccaaagtgctgggattacaggcaagagccaccatgcccgacttcactgtgcattctcgctaacaatgtacaagagttccagttgctccacagcctcactgacgctttggattgtcaattgttcctcttcctcctcctccttctcttcctctttttcttcttctttttaaaatttctgtctgctttttaaatgtgattgttccttagggttcccccacttcatatagtctttttttcttggcctgcactctgccttagtgtttttatttacttgcatttttatttatactcatttgtaaatattggttgaacttttacattgtgccatgcattatcaggtgctgaggatacagcaaaagaacaaagcagaaaaatccctgcccttattggaacatatagtctgaaaacttccaagtctgttccacatctctttcctgagctccacacccgtatatctggctgtctactggccatgttcatttgagatgttccatagatatctcagagtcaatatacctaaccctgaattaatcatcttcttcagcctgcccccatgttgtatttttttctcggtgaatgatgtcacattcatccagtagctcaagctaaaaacctaagcaatattatttaatcctcctttccacattttatttactcattaaatgctattgattttccctccagaatatcttatgaatctatccccttctctctacccactctgccacttccctagtccaggctatcaacagatgagtgcaccattctccttacgagcctccctgacacctcctccctatgaatcaccagtcctttctacccaaccaaccaccattggccacactgttccactgttctctttctaaaatgccaaatctgatcctgtctttcccctcttaaaagctctgatagctctgtgttgccctccaggtaattccaaatccttaatattacttgatttctaaacattacctaagacccatagtcattaggttctttcataactctgtagcctctcactctagatattctggaactattttcagctcactgaacatgcctttgcatgcataatttccttttcctgggacattttccccttccttttctcagtactaatgcctagcaaaacctaactatcctcagtaattgttctgctggctagttatgtgttttaatgcatttttgggatagggaaggaaacttgcttatttaaaccggtgtaatttatcttatgacggttctgagctaaagtggtgagaatatggagctggcttgtcagagaacatgacttgttttttcatgcgttagagatgggcccagtagatgggatcagattattcattcaatttattagtacagtagatatttactgagaacttttatgtataagaaactgctgtggggtgctcaaagatgaggggcagtgtcctgcccagaaaggcttctttgggctcacaattgtggtgagaaacagcattgtcacttgcctggagcaatctaagttgatagacatattctgaggttctatgtgatttttttttccattttctttttaaaagaaatgaagtaattaccctctagcagttgctatggcaactgttctacaggagagtttttttttttgcctcccctccccccatggttagaaagtgaaataaattattacaattttaaaatggcacactaagccaacatatcctttctgagaggtgagaagaagagacataggtggtcggaataaagtaagtgcctaggaagaaaattggctgtcagggtatcactaaattaaagtctgtgattgattagtagtcccgtatgcccaggattgaggattagctcaagtactgaaaacagcctgggttggcatcatatgatgttcctagaatttcgagtcttactgtagactttcaagggagtcacacactcagaaccagtttgtgggccttgtggaccccacattgaagattccttagcagaccttgggactgtcagagggtgcaattctaggagttgtgtctttttttctgcttcttatttattaggactctgtaaggcaagcaaaaacctggtaacgtgacaaaataacaacaaatgctagttgctcaccatcttccagggactgtgcctagcattttacatattttttcctgtataatctttacagtaacccagtgacacttgtgttattgttattctcatattacagatgaggaaatatctgtaataactttctcaagatcatatagctagtaaatcgcagagccagaagaactgaatgttgactttaaaacccatattcttggctgagcatggtggctcactcctgtaatcccagcactttgggaggctgaggcgggtggatcactggaggttaggagttcgaggccagcctggccaacatggtgaaaccctgtctctactgaaaatacaaaaattagccaggcgtgttggtaggcgcctgtaatcccagcttcttgggagcctgaggcatgagaatcacttgaacctggggacagaggttgcagtgagccgagatcgtgtcaccgcactccaacctgggtgacagagtgagactctgtctcaaaaaataaaaaacccatattcttaattatgaagctatttacttcttgtttcttgagattaaaggcctatttttaatgatttctttatcacaattagtttcttgaaattcaatttgggtgtgggataggacttaattaatagtggatttttgattttgaaaaatgaataaaaaatattttcaattttctcctgtccttcaaagcttctgtgttttagtggattttattaaaartttataggtaattcagaagaagtggctctctttaaggacccaataggctagagtggtttattacatattgttttaagcccctttctgatctaggtctctctcagaacaccatcatttaggagctcatatgtctttcctttgtcaaaataagaaaaattagatctctgtctctaagaaacccttccttgtctctgcgttcaccaaacctgagcctatcacaataaatctatgagaagctaagccctgataccatgggtaagggagtctgggagcttaattagaagattaatttcttaagagataaacattgccattctttgaccttttaactttcagtagagaacagcaaaattgactatcttcgctcccagacaagggaattactcccttacccatggtatcagggcttagcttctcatagatttattgtgatgggctcaggtttggtgaacacagagataaggaagggtttcttagagacagagatctaatttttcttattttgacaaaggaaagacatgagctcctaaatgatggtgttctgagagagacctagaccagaagggggcttaaaacaatatggaagaagtaattttttgttgttgttgttctgtgggttttttgggttgttgttagtctctctctatagtgaaaggcagagaacaagaatactttgtagatttgtctcacatttggtagaaggcagaaactctatgttatgtaaagttagtagaatacaagtgaggtaggcttaagtaaggtaaggcacataataattgctgagatggggaaatgacttttgaattccttcaaaaaagtattttcaaaaattatctgctgcttctttgtggttttcttaggtcactggacctatttgggctggggagaacaacagagtacgtaagaattgaaattccttatcattttcttgatcttacccacaaagtacatactccctctgaactgtgaagctggatattcatgcatagacttccatttccctctcctctcctacttaaatatcgggagacaatgacctgtggtggaatgttatatcctttcaggctggtttcttgacgactttgtgtgtgtttaygtgtgttacaaatttcaaaccaaagtcccagtcataatcctgacaagatctcctaatttttattccccagaggcaagtagtagcatcagccccctagtgtggccttctcctttggtccctttggctaaggagtgcagtgaccagaaggagaaggttcattctaggatgaacyagagtcaaggtgattggtgtgcattctgatttggctgattttcttgactaggaggatatgcagaacagactgctgtcttgggtttattggtctagcaaattgtgaatgccatttcagccaaaaacctgcttttgttaaggaaacaagaggctgaggacatggcttggctttccctgaagcagcccagctaaggccacctttgttctagagcttagagagtgggcagccagttctttgtggcaaaacatgtagccctaggctgacattactggttgtgttacccatcttacaggatctggttgagtctcagtgattaggtatccagtaggtactaagacgggccaaagtttgtcctgtcactggaatttctcatgaagtctgtgctttctgtgatttgaatcctgagtacttctgctattaggaaagtactcaaaagcagcttgacccatttatgcctagtgttccattattggaactctaagcatgtgggagttatttatatcctactgctcaaggtcatcgccaagcagtaggtgacctcaagcataaattgcaacctcaggcataaatgggttaacagagctcaggtaagttaaggttttcaagtagaaaaagcaactaagccatgaaaaaaatgtgaatgaattttctttcctttctttggttgctgaagttctattaataggtgtgctgtggatttaaagaccaatccaagactcaatccaggaataccacatactagagggcctcatttttctgtatttcactggattttgtttgagtgcctgctgtgtgcttggaggcccatctttgtttgccccaggttagatgaccttcccagcctacttttgcaggtttttaattttccataatttcctctatgtctttttatttacctatcaaatgaactacaaaatggtttctcaaaaatatatagcctttcctaccactgggcctttcatcatgccactgcttttatccaaattctagaagatatttcccttctgcctccaatcttcacctattaaaaatgaaccaattcttcaaagccatctcctccttaaagcttccttagttaccctatcaggaagtgattttacttttaattcatagcacttggtttgtactaactgccttgcatagcaattcaatatttgtgtctatatattctgtctcctattagactgactctatattctgagtcttctgtgttgtttagctttggatatgtaggcagtcagtgaatatttgagtgagtaggtgttcccagccttttaattttccatctttcaaatagactttaccaggggcttttcaactgttaccctcaaactggctctctagttccttcttaggctgagccaaccaaacctgcactcagtttctctctgcaaagccagggcttttctcgtctagccgacatggtgctgtgggatagattatggaggcagtaagagatcgtcagtgacacattaaaaacacagttatttaattcaaattgaagtgttacatattttcctgaatttccctttttagtttctaatcaggcttggtgccaggaggtttactttttaggaaaactggaggtgattgcctctcactacttttttctgtttctctcctttgtctcactttattccttastatattctctctcttgccctctcctgcttttcatattctcttctactcccaacctcttctttccatggatgctttgtttcttaatatttgccctttatttctttagtgtagaaatgttgttagcctttagtaaagttgtagagtatctctgtttagcctagcaaaataaacaaaaagcagactattatttaggagtaataggtcacatgcagggagaaagtaaaacctgtggatttgggttgtgggcttctaactctggctgagctgccctctctggcctcaaaagtgataggattgtctgtcgcagttgcctccttggagactgaatcttgtttctctgggttatgtgctaatacttttcctgccagagtttagtagacctctggttttgtctcctttgttgcctctgccccttcatctgtatgcatgaatagtccagcactgacttctacagacttgctctttctgtgggttcagaaagaattaagtctgagtggcatatggttttgtctctgggtcctatttttcttgtcttcagaacaacagatgcatcaagggctaaaaacagtgcttccaaagtctctttttcttaatatatcatcagaatgctttgtaagcagaatgctttgcatccctcttgtttgcttttgttttcaagctttgctactcctgccctggtcagtggactacttgctccaaatgtcaagtattaactaatacttgttcctgaccatttgaacattagcttctttctcatgttgatatttttcctcccggagttctaatccctctcctctccttttttatgttcacatgtaaccataaactcaaatargaaaagctcataagatcatcttacccctgtctcccatctgtacccacaaatgttattgagagtccaatgctcagattttcttccttacctataaaacccacatgtttgtgctctcttttagtggaattcttatctaccaacttgtctaatgaagccaaggggggtcatttccctattatcttcaatatggccccatgttttacaattctgtctggaattttctttttctagttcattaactcttttctgtttccgctgtatagatgcaggtccttatctcctgcctgagcaattgtaaaagcctaatcttacggtcttcaggaggtttccactgcccacattgctacaagattatctttttttttttttgagacggagccttgctctgtcgcccaggctggaatgcaatggcatgatcttagctcactgcaacttccaccctctgggttcaagcgattcttccgcctaagcctccctagtagctaggattacaggcatctgccatcatgcccggctaatttttgtatttttatagagatggggttccaccatgttggccaggctggtcttgaactcctgacctcaggtgatccacctgccttggactcccaaagtgctgggattacaggtgggagccaccgcgcctggccccaagataatcttttaaaattactaacatgagttcattttgtgctaaaagtatctccattttgggatggtgaacattccttttcctcattgtaagccaaataggaacttgtcaagaaaggacacgtggaaccctgttaatcatacacataagggtatggtgtcagatacgacttcctctctgtaaaacaggcttcaaagcactcttaggttgagctccctttccaagcacagcgatgatttgtaagtgtggtctttttagttaactttaacaaaaaaactgtagccagtcaggtgctggtctgaaggacaaataattctacgaaattgtagtcactgctgttggataaacttggctgcattgtcagcaagatcccattggcagtgcataagttttttcttctctcagcccatcctctggatgggaattctgagcctagggtgtaggtgcttgacaggaattgttaggaaaagctaacactgcagcagcacagtaagagtgctgctgttctcagctgcatctagagcctttgacttgatttccaggccttggctttgaccttcctgatttccaggaccagcttctgatgttagacctgcttatttggttcaatccatatgtttaaaagtctgaaaacaccaagacaacgttaaataaaagttttggggtttttttccccaagatatgaaaaagckaacttttttaaacctctgctcctttcccctttctttaataacaggggaccagactgtatttgtgacatttaaaagcagtttttaattatggttatgatagttggagaagcagaattccaaagaattctacagtgggaaaatgcaacctagagctcctctaagaataagcactaaaattaaactaagtatatatctcatatgataaggaagagaaacttgtgggtattaattgagacagttctgctcatggctctgaggtcgtcactgggctcatgtgaagctcagcttgcttttgttctcaaggtccagacttgttactactaagttagaagcagaaataattctgaagaactaaataaagctggggtgctttgattgaatgtgcttattccatagcttttgaagaccctgatagtgccgtcgatgaccgagatagtgactatcgcagtgagaccagcaacagcttcccacctccttaccatacagcttcccagcccaacgcttctgtgcaccagttccctgtgccggtgcgatcgccacagcagctgctacttcaaggcagttcccgggactcttgtaatgamtctatgcaaagttatgaccttgattatccagagcggcgggctatcaggtgggtattgagcacaaagtactttctcttcctaatatccaggtytcatgatgcaaytggcaagaagaatttggatgctttaacctgaagaggtagcgtaagtgtagcagtatcaccggccaaactacagtcattttgtgtagattattagtcttttttttcttccacatgtttatacattgccataaggaattttatgtttatatattgccataaggaatacttctcttcatgatcagtgattctcaactgatcagggcgatcccacttggggtgtatctgccccacttcctgactcagtgagtttgttataccctttgccaagattaaaaacagaaaaaatcacagattggatagtccttcttgcctaaatatttccctgggaactttagaagaaaaccagtatgatttcttatagcagattcagtatttttactggaactttgttttaatttattttatttcttaaatatataaaacaattatgtggttaaaaaatgtcaatacagcataaagagtttcccacccacacttaccttcctccaccccatcttcttcctgtttcataattcccttcctactgttgtttcttatgtatccttccatagactgttgtcatatatttatgagtataaaagcaagtacatacatatgtgctctcccctgccctaagattaaaaaaaatttcagacttaaagaaaatttggagacataattcaatgaaaacccatattcatgttgcctagatttaccagttgtgttaacattttaccacatttactttatctcattctccctaatatgtattcatatacacatacattttctctgaaccacttaaaaataagttgcagatattgtgttacttcatcagaaagtatttcagcatgttactcctaagaaaaagaactttatcttatataacctcaatatcatgatcacactcaagaagtttaatgatgcaatgttattacctaatgtttagaccatatttaaatttctccagttatctccataatgttctgtatgtatatttgttcctttctggtccaggatccaatccagaaccgtgatgcattgcatttggttttcatgtttccttagcttcctttaatttagcaaaaatttcattaccttggttttttggtcttttaagaagcttttttttttttttttgagacagagtctcactctgtctcccaggctggagtgcagtggcgtgatctcggctcactacaacctcagcatccccggttcaagtgattctcgtgcctcagcctccggagtagctgagactacaggtgcacgccaccatgcccggctaatttttgtatttttggtagagacggggtttcatcatgttggtcaagctggtctccatctcctggcctcaaacgatacgccttcctctgcttcccaaatggaattacaggcgtgagccaccgtgcctggcctaagacacattttttttttgaagagtgcaggccagttgttttgagaatgcctcttcgtttggttttgtctgattatttcttcatgtttagaatcaggttaaacgtttttggcaaaaatgctggatgtttccttcacatgcattcaggaagcacatactttgtcttttttttttttttttttttgagacggagtctcgctctttcgcccaggccggactgcagtggcgctatctcggctcacggcaagctccgcctcccgggttcacgccattctcctgcctcagcctcccgagtagctgggattacaggcacccgccaccgtgcccggctaattttttgtatttttagtagagacggggtttcactgtgttagccaggatggtctcgatctcctgacctcgtgattcayccacctcggcctcccaaagtgctgggattacaggcgtgagccaccgcgcccggcccctactttgtcttattattggtgatgtttagtttgatctcatggttaaaaaatttggtatatgccgtatttctccagtgtaaagtttcctcttctcctttgtaattaataatatctggagtgatacctgagactgtatcaatactctgtttccccaatagtcttttactcaatgatattagcatccattgatccgtgcctgaatcaattattttattgattggaggttagttttcaagaaatcattccaatttagcttatccttttagtttctaaaattcactagactggctaggtgcagtgactgatgcctataatcccagcactttgggaggccaaggcgggaggatcactggagtccaagagcttgagaccagcctgagaaatatagtgaaacctcatctctacaaaaaataaacaaaattagctggatgtggtggcgcatgcctatggtcctagctacttgggaggctgagttgggagagattgcttgagtctgggaggtcgaagctatagtatgccaagattgcaccactgcactccagcctggatgacagagcaagactctgtctcagtcaatcaatacaaaattcaccagaccataggatgatgtccttttcttgcccacctcaccaaactgctacatggtgagtttagacacagggtcttgcgttgttgctcaggccggtcttgaattcctgggttcaagtgatcctcctgccttggcctccgaaagtgcttggattacaggtgagagccactgcacctggccttctggaagatttttagtgactaagtgtctgctttgatcttgcttctgtttcctaaatgaatgcttttggatgttatatctataaagaacacactgaactmataagctcctagcctttaggttctttctccatccctaccttggtacacagaagaaggcagtctttaatctaagtgaaagaaagttcaggctatcttcagtattcattgttttaaggtgggcatgtagcttctgctgctataatcagtatagggaaagattttcttttcactgtgatcctcaatgcatatagcctttagatttcacaaacaacaaattataatgccttaggctgggcatggtggctcatgcctgtaattccagtagtttgggaggctgagggcgggtggatcacctgaggtcaggagttcaagaccagcctggccaacatggtgaaaacccacctctactaaaaatacaaaaattagctgggcctagtcgtgggtgcctgtagacccagctactcgggaggctgaggcaggagaattgcttgaacccaggaggcggacrttgcaatgagctgagaatgtgccattgcactccagcctgggcaacaagagcaaaactccgtctcaaaaaaaaattataaggccttaaataatttgttatttttttgtagtataacaaagtttgacttctgctgatagtaaaaaatggttttatatgtatttttttcttattaaaagaaatatgtttgactatattcttggctacacatcctcaaatataactttcagaaagttaacagcttggcttctttttagactaaaaatttatcagcaaatttcgttttcttgaaatcccttgatatattttgctggtatactttaatattgcaaatacattctagatattggtacaacatgtttcatttttttcatttgtttcttagaaaaataaaagaattctaaaaagctcaccaatgaaaaatgattgcaagttgaagcatttaaaaattgatattatagctgttctttttctcatatggaataaactatttgactacattgatataatatttaagaacatgtggatttccttttcatatttttttagtctgaatgctttttatcacattggcaattttattgttctagtcttctcattgaacatgtattaaatcttataacttctttcttccttttccctgtctcttcctttttctttgctttattgttcctccaattttatcccttcacatcagacaaggctcacaggctaaagatgaaaaaattaggattatttcagctttctctgatgttgactatgaagagcaagaagatatacataaggagatagaggggaaaatatcacaagagtttctagaaaataataacataaacttgaaggaagcagagataaaagaaattagaaccctttcaaaagctgataaatactacagccaacaaaaacaaccaaagtataagaacaggaaaaagataccacctcagagmcaacaaacagaattctctactgagtttaaggttgaaacttctgttttctccaggtatgctcagaaatatgatacactagatagaagaagaaaaaagaaatccttatacaatcattttgaagacagtgaaagaaggcaatatggtgagagatctgaaactaagactaactacaaaagtacatattctaatactgaaaattgtaccctttgccatactgaaaagaaacaaaatatggggtacccagttttgyacccctacaaaaatggatttgtggttaagagtggcatgcagcgcattaagttggaaagtcatgattatgatctgtccagttgtttaaggcactgtgaaaagtcatctggctcaaaccagcatgtcactaattttacctcattagatattcttgaagattctactagtagtacttctgatgaacttctgggttcccccatttctgataagcaggaaaatttacagtcaccaacatggcattcatccaatgtccaccatattggagattttcctgaggaatattatgtagcaaattcagcattgccattacaaaggatgaattgtgatgcaaaaacacttggagatctgtctgagtgctctatagaagagataaccccttcctctattgaggagcccaaggaggaccgtattgatacaatggatgagcttcagtgtttggtagaaacrgtgtcagaatatttagcagagaaggaagaggagattaatagatttggttcactttcaaaaactaaaaaatcacataaacaaaatagtactcttgatgcagaacagagaacgcctggggatcaaataccacctttaactattgtcaagaatgacaaggacacggccatctctttccctgagttgactggagtacaatgtgctgttggttctttgtttagttcactcacagaaaaagtgggttcaggcacaaagcatctaacaaactctgtggaaaagttggtttccttagttccagaaaaaacagaaactcttaatcaaatagaggcaattaattygggatctaaacccagagccatggcagtattggggaaggatctttccatgcaatctccattatcctctcaaaaagatgataatgtgaatatagacagacatagaaaaacctctgaaaatgagcacatgggtaataaaactgggagtttatactttcagaatacaacagaaagtattgcaaaggacttggctccacagagtcagagttcagttataaagtcggttttcagcaggttaaatccattgaagatcttttcagaaaaggaggaaacaaaaaaagatgatgaccagagtaagccaccaagaaaagaaagctttgttgagtgtggtttggagttaaataaaagggaaggcactcttgacaattacagtagtagcatcattgctttaaatgggagtgatgaagaaactacgggctggttccagatgcccacaagtgagaatttgttgtcctcccaagtaaccagtgaaccttcaaacttagttagttctgcaagtaaaaatgatgagagtctattggaagaaaaactctgtatagatctgtctcttttaccagatcaacaaaaaatatgtgccaaagatactccaggacatccttgtatagctggcagtagaactgcaaataaagaggtattttcaaagccattagaggaggacaaagttacaggtaatgatgatttccttgagccactcagaaaatcatttagccagtttttgctcacttcccctgagacttgttcaaaggaaagtttgtcagaacctgtgaaaattcgccaggtggaggaagatrgtttagaaaggggctctaagaaagatggtcrttccttttcctttagtggaaaactaaatcttccattttttagaagtcttggtcattctgaaaagcaacaggagttaaaagagaaaggaagcatttttccyttgtttaaattttctttcactgacagcaaggttactgttaatgaccagagtttacgtggctcagcagtaaccactgatgaggagagcaaaaaaaattgccatgaagataccaaacatagttcaataaaatctagttctgttccaaatattcatagtgatctaggaaaatttgacagtacagaggaatttaaaaagaatgaccagataaattgtcctgaagatgccaaacttaattcaataaaatctagttcagttccaaatattcatgatgatctagagaagtttgacagtataaaggaatttaataagaatgaccaagtaaattgtcctgaagatgccaaacttagttcaataaaatctggttcagctccaaatactcaggataatctagggaaatttgacagtacagaggaatttaatcagaatgaccaaataaatagtcctgaagatgccaaatttaatataataaagtctgattcagttacaaatattaataatgatctggggaaatttgggaatatagaggaattaaatccaagtgaccacacagcaggacagaattttgaaagggatggcttagccatccctggagttgtgcccaaagaacatataacttcagatcctttaggagaagataagaatcttatacaagcagcatcttcagtagcatcagactcttcattagagtgtatttctaccacttccaaatccactttggttaatgaaattaatgaagatgaggttatagataagacttccaagaaaaatacccaaggaagcttcctttctggcctgtttaataggttttcttctgctgaaaatttgtctagtcaagaattaaatttgaaaaatgatgactcccatcacaagaataataccccaggtttaatctctggaatatttaacctgctatcaaatagcggtatgattgatcataaaccagaggaagcaaagttcatgtctttaggcaacatgaagagtttgaatggagataaccatttatccttggatgaggtccctgctacttcatgtgtgacttctgagaacccgaagaaccatgttgaaaaacatgaaacttctagcttcatagaagcctccttattacctaaagaaaacataccattatctgatgctggggatgataatcattattgttcccctacagagaaaaaccagcaaagtgaaaagcatcacccctcctctgagaacattgtacttcactgtgctccaagtgctcagctaggttttttggagaaatctatggctaagaggcaaatgccaaaccatgttcttgaggcaaaactacatgaaaattcaaacaagttaaattcacctgtactaaataccaacattctcaataaatcaaacaactatcaggcttttgaagagatgaacagtcctttctgttttgaatgggactctgacataaaagatttgtctaaaaattccagaaaacttcagccagtttattatatgttaaatcaaaatagatttctatcagccgatgcttgcttgtggcttgactcagaaaactcagtgataaatttttgccaaaaagatcaaaatgcaaacatcttggagtggagaacaaatccaaacagtgtcatttggtgtgacttaccatatgaatcattcaatcagttagcatttaatgaagattacttattaagagrtgatgtgtgggcagctaactcattatatggaaactctggtcctcttccaattaatgaggctaataattcactagaagaattacccattgacttaagttcttcatcagatcatgaaaagactacatgccccgtagttgatcaagaatcattaagaatggatgaaaactttgttttttcaagttttggttatgagtaccaggaatggttgtcatgtcttgaacatggagtgtggtggccatcagaggatggggattatggatattatatgtttcatgatggtcaatatatctattctcttctcactgattctactgggcagtatgcatatttatttatacctgattcttatcaagagtatttggattgtgatttacagacaaatggtctatcaagtattacgttggatgacagcattatttctgcctgtagttttaaagtacttgataaggaagatgaaatattttggtatgttgaagaggaaccaattgatgaccctcttgatttatctttagctttgccaagaagtgaggaaccattgtatctaaatttagaaaccttttcacaagtacttaaagagtcaagttgtgaccaaagcgatcagccactagatttttcaggctataatcgtcaaaagtttaaaggagactttagatctttcaaagaaaggccgtgtggttctgaagacgctgaatgtacattagatctcagaaatcagccccaaactattagtaatcatgtctcaagcagagatcaaattatagagagagataaaaaccagcctctagctgaagattcatcagttcacctttccagtttccattggcttcagtcttctgttgaagaagttaccactttggttcatcctgaaaatatgactaaaggctcacaacaagcagaagagacatcattagtgaacaaagtggcttcagtattttctgttttgggtgcctcagttggwagtactttgaagtttgataagagtgaatccttagaggctttggccatgcagaaagtgaatcagcagtcagatttagcagagctcacaaatgatggctttcagtcattaatcatgagtaagcaattagagggtaactccccaaatgtggaaaaaagtcttcttaaggattcagaaagacagatagtatccaatgttcagcatccagaattgatcaaaaatataaggcaagaattctctttaaataaaaacaaccatgtgaaaaagcaaagtttgttaaaatctggtttccaggtaagccaaacaactcctcaggctaaatcaggtgtaaaagatgatgaaatcattacaacagactctatttcagtttctcctgcacctcagcatagtggggatgagcgtgagaattatgagcttccccagggccagtcatccaaagagtctgataaaacattatttaaaagttcattgaaactcttcagtcaagaagaatcgtcagttagtatgacagcaaatgaaaaacagtcatctggatttttgaatctttttaagactcaggtgaataaagaaggatcaccaaacttagaaaagattggtgatacaaatgtcaagataccacctcaagaaaagaaagaatcttctggtgtttcaaatttttggggtacccttggggatttctttaaagccaatgtatctcctatacagacaactgaaaatacgtctgtttcttcaatgactattaaggatgaggtcaggtcaagtcctactcctatggagctagctagccagggtgctgggaactttcctgctgcaccaatttcctctaaagggaaggctagagttagaagactgaacaaacagactactatcgatgacagtaggttagaggaatcaactagagggatccagggtaatgatttgactgaaaaagaggtaccattcagagaccatctaatccagcagtcacctaattcatctttttcaacaagtagtctcaaagagtcttccagggagtcttcagtagaaactagtggtgtgactacagtgacagaagtttcaaaaagtaatgaaatatcctttgataccctgagcaagagaaattcaaatgaacaagatcatttttctgacaaagactggagtttctctatggctgcaacatcttcatctcaaccagagttatcaaccaaaaagagtatattttcttttctcactggatctgaaaaatctgagaacagagcctctgctactctaccaagagccaaatctcaggcagaagggctattcacacttccttcatttttttccactgctagctcaagcattaagaaggatgcctctcatagtagttctacttttagtttcttcagcttgtcctttttggatcaaaaaaaggagacctctggggaaaaacaaagcatttcaactgttgttccagtgacctcccagcccygtaagaagacaaatgtttttgtagagagtggtagcacaatgaccagagaaagttccagtggtcatagagatagcatagcccaagaagtagttcatgaacagcaaatggcaccttgtatttccattaacaacaccattgaggttacctcccttgcagatgrgctcagtgtagacaaggactgtcaggaaaaactgagttccaatattgtaccagggacatcagtggatttccagatgaatgaattgcaaaaagacattattcctccttcaccagaatttcaggcacaggctgaaacattcctcactggcccagagaaccttgggatagctccccatgaagaagaggctttsaaccacaaagccttccccagtgactcactgtccaactctttttcacatgctaaacagttaattgaaaaattcaatgatttagacacttgtactaactgccaccaaaatgagaaatttactactgacccagtgaacttgccattagaaaaggcccccgatgaggtcttaccacagatcctagagccagcctcttcctctccagagccagggtgtgcagggaaccttcagaaccaagatgcagataaagaggaagacaaatttgcattaggctcttcagtagacatgctttcagggtttgtgaccaaagtgaaatctttctctgggagcttaattgaacctcccaaaacactctctggacttttctcctctcctaaatctccaaagaaaaactcctttttctctcttgcttctgatgtatcatctcagcccctcaaaggtgaattatttggaattttcaaaagtcccaagccagagccatacaaacaagaatcatctctcccagctacttcatggcttcaaaatggttgttccagagatgctgtaggatcagtacctccagaaaggagagaagctgcctttacagcactaagttcagaatctactctcagtgactgtagaatgactgtggttagtgcaaagccagaatcagatatcttgacagatgatcctaaactaacaaccaaaatggaagacaataatactcctgaaaatattctggaacctcaacgttctgaaacaattaatacatcttctttctcgggtgatgatactgggcaaggagtattgtctctgagtgatgaaggagacatggggatattgcaagctacagacacggaggcatcgttagaagcagagaactttgcgctgccagcacagttgcatccagatcctacctgcattgccgaagagcttcctcctccmattcagccacctcttcctcttgagccagagccagctattcaaactgcctccacaaaccaagacttactggagctgcatccagccagttcactagaaactgatactatgctgttcaatgatgcaagtgtgagccagagcaccactctggaaaccgaagggcacttttctcatcctctgctggaggaccctgtgcttgctgccagagaaagttgtgagataattcatgcccagaaagatccacctgtagtaccccaggaaacagagcagtcaagaccacgttttgagatcccaaatgtgaccacttggccaaagcttcgtttgccatcctctgctactaaccatgggaaaccactgagctctttcttttcctcacctctcccctctggcaatagagcagcagagactggtttaatgtccagttttaagaagttgtcaactctatttgagggaagtagtgaggggaaagggagtgtattagcaagtgattcaaaactaggatttggaaaggtagatctttcatttccatggccaaaagagaacaaaggggtccctgaacaaatgcctacagaatcctcccctccagttttagttactagcagtgatcaggaccttaactccagtgaggctaacaaagctttgaagtcttctcaaatatctggggccagtgctcagccaggtaaagtctacactcagccctctgggacctctgagcagctggtggccagtccagaggtctgtgctcaggggctttcagggtctggagaagggggaaaccagcaggaaatctcagcatctggagaacactgggataccaaagccaacctgtctagccccgcctgtccttcagggaaacatgaggaagaaccctccactgtctctgagatatttcaccagctagaaaaacaagaagaggaggcagtacctgccagtactgactctgatttgaatgtacagcagccagtcactctgaatgacatcaaggagcccatgaccaacaaaaggcctgttcttaactcaagcatcataaatggctttaaggaattgaccatttatgatgcaagtgacttagtggtagattaatcatagcttgctttttatccttcttgtgtctttcctagtacccgagcttcatgttaattaggggttaaataacaagaactcagtgtgtgggtattttcatcctccccttctctctctgccaaatgtaattcatttactggaacaaggagcttcctgcttaaagcaaaagctgggcccccgatatttactcactctggtttgctctgccttgtataatgtgaaatggagaaaggagggcaggaagaggtagtaagtagttggtggtatatattaactacaactacatgataggctaggatgcttccttgggccttaggcacttatatcttgtaggagatggggatagatctattttgctttgttttttcaagtcttctaagatgctttctccagtggcaatgagtgtattaagcaaaatacaaagtgcaaaggatgccttgggatagtctgtattcccatatcctattccatacagatttgcatagtttcttccatggtatcatctctgccttttactaccctcaaggctgatgtctgataaatgctttgagtaaaatctcacaggaactcagagctgtcctttgctgtagttcttcagtctcgagcagtgtacaggatctatctgcagagggtactgttatttcccctaagaagcagtaccatacagtacagattaagaatgctaccttgacctctggcccaaacttgttcaaaggggttggtcagggtcagtgtgtgtgtgtgtgtgtgtgtgtgtgtgtgtgtgtgtatacttatgtacaagtatatgtgtttgtgtgttgaactactcagaacagtgacctggtacctattctgctggcatgggctagaggatcagaaatcagcctgaaaataccaggtaattaggaggaactttagggaaaatcccattggaaaataacagtgatttctcttctttgaccaagggtaaacacaagccctttagttaaaggcttgactctgtggtaagaaaattcttcaaaagaactgaagcccttagatgacagggccataaaactcaaggaagtaacttctagatactgctcttctttccaccactctgcccttcttgccactgtcacattctctgctataactgctttctctcatgactttctggatatgggaatacaggtgattgagaaaagattggcttgctggtcttcagatatagagatgcatgaatacggctctgacccagatcctggagttggactttgtccactctttccaaaactgagccttgccctgaaagaagctcagttacagatgttcatctttgggacgcttcctatgctgccagggatatcattgtagcatttatgttgatgagaccattcgtttgtgtattctcttggtcctggcctctatcttccaatgggttctattaactcatcttgcagatgaggaaactgagatgataactgaaagaacatgtctgctctcctttgctcatcctaaggtacaggcgtacacatttacaattgtagaggaagaaatgatgacctcaatgtaataagtaatagaaaaagagtggagttcattcattccattttactgtgtggaaattaaagaaagattaatcacagccactggacaagcttctttagaagactgaataaagaattttaggaataagtaacaggccattttaataatttttaatcctactcacaaatagcctattaagataaaatatacttcaaagtcaagtgcagaactgaggttaagtgtcgttggagaacccagcatgttgtgttgttttcctgttgtgttttcgctgaatagagactaattcttctagattatgaagtttggtcctctcttcccaggaacctcctatttgattcttgctactaatgtagtcattatttcctggatgtctcctttcttttgtcctggtccctgattgcatttatttacttatctgtctttctgtcattctcacagccccaccagcagcagtaggtatggctcctcctgtaatgtgagtcaaggaagctctcagctaagtgaactagaccagtatcacgaacaagatgacgaccatcgggagacggactcgattcattcttgccacagctctcacagcctgtccagagatggccaagcaggttttggagaacaagagaaacccttggaggtgacaggtcaagcagagaaggaggcagcatgtgaacccaaggagatgaaagaagatgccacaacccaccctcccccagatctggtgctgcaaaaagaccacttcctaggtccccaggagaggtaggcaacagctgccttgaggagctcacatggcttcctcagtacctgccctgtggtattgctgaaaataagtgattgtcatttgtttccctgcagctgggtatggtggtagttaacacctccaggctcaactctgtattgcttcctttgatttatggtgcactttccaagacattttggagatctctgaagaatatttgggtttttgtttgtttgcttttgagatagggtctcactctgttgtccaggctggcacgatcttggctcactgcagcctcaacagcctggtctcaagcaattctcccacctcagcttcctgagtagctgggactactaggtgtgcaccaccacacctggctaattgtatgtttatagagacaaggtttcaccatgttgcccaggctggtcttgaactcctgagctcaagcaatccacctgcctcagactcccaaagtgctgggattacagcggtgtgccactgcacccagccagcacttgggttctttgtagttagtgagctgcagtgtaccagggcttcttgagtctgcagttcatagcttactagttgaccttgtatatggcagcctctgagtcaggaactgacttgagccaggttatttcatccactggggctgtggtaggtactttggctgacttcctaacctattaagaatgctactttgacctctggcccaaacttgttcaaaggggttggtcagggtcagtgtgtgtgcatgtacttatgtacaggtatatgtgtatgtgtgttgaagtactcagaacagtgacctggtacctattctgctggtatgggctagaggatcagaaatcagcctgaaaataccaggcaattaggaggaacttagggaaaatcccattggaaaataacagtgatttctgttgtaacttttttggtgaacattttgttttgtttttccctggctgagaaacccaggacagagttaagaaagaattgatctagaagtcagatttaacccacccctcagcctcctcagggcctagcaatgtgtctgccaattggtatccataggaagaaaaatttaaaatgtatcctctttaacatctcataatgaagctgagtacagagtctgaatgttattactgagctaaatcggttagactagctgataggttggagcagagccagagttctcagtctcggcactcgtgacattttgggccagattattctttgttgtgtatattataggatgtttaatagcatcactggcctctacacactagatgccagtagcaatccttgcaaccctcagttgtgacaattaaaactgtctcctgacagatttcccctggcggggacagttgcccactggggtagagtgataagggatgggtgtgacttagagtttcaaatttcaagatctaataataaagcctctcactgaaacaccagagcactgaatgcagattacatggtaaaaattagggagtgactggtgcttctactttaccactggattaatagatgagtcgcaaacctttctgaagatattaacttattttctctcttcttcccttttttggtttttggtcatctctggtarctcatctaatagatgggacatccaggaggtgagctgtggaccaggcttcttattgggttgatgactcactgaaaaactgactctggctctccatagaccttagacttggcagtcactgttatcagggcagagttcctggtggagaagcagaagtgcccagcacaagtccttgtccttctctactggttgtgtcctctcaggtcctagctgtgagagtgaaacccagttctaccttggccagaagtgcccacaaatgttttacaacagttgacacatttagttggcatcagaaacgaccatatattttaacatgtctagatggtggacacttgtctgctgaattggctgtagacctcaaagagagaaaggagaaacattgttgccaagaattaaccactattctagttaataatgtggataatgagttgttctaatgcagggtagtgtttctgtctcaaaggtattttgttatgtgtattgttcattttactgaggttgttctagaagcagctcaaggaacmagatcatggcagtaaaagggctgtgtgttttttttcttttctttcttggcacttttcatgtaaaaaggaatgggtaagccttctaaaatacttagtggagcaggaagggtttgcaggaacaaaattctgccctaaggatgctatgcaaaagccccaagggaactgatcgttttaagaagtgcagtgagaggggttgaaaggcttattccacccctctctgcatggtttctatactacgtattgactcagggctctygccattgcctctagagtcctgatcccagactgttccagggagctaccacattgggtaaatgacaaaaacgagtaggaaaagagggaacagatgaaaagctaaaaggaattgtcattttagagatgaattattttcacattgagtattcagtactatgctgctcattgggtaaatgaaaaagaaggaaaagaaggaacagatgaggcgcagtggctcacgcctgtaatcccagcactttgggaggccgaggtgagcagattgcttgtgctcaggagttcaagacaagcctgggcaacatggcgaaacatcgtctctacaaaaagtacagaaattagctgggtgtggtggcacgcacctgtagtcccagctatttggaaggctgaggtgggaggattgcctgagcccaggagattaaggctgcagtgagccgtgatcatgccacagcacttcagccgaggcaacagggtgagaccctgtctcaaaatwaataaataaataaataaataaataaataaataaataaataaataaataaaagagggaacagatgagaagctaaaaggagttatcgttttagagaggaattgttttcacattggatattcaagtactatgctgttttagtagcctgaatcactaaataagtgtaggcatgagtacaaaccattttattttagacatttggcagtcttgccttgagcagtgtcaccttgtggccttggctatttttaagaaatgtactttttctctgttacaagttttcctgaggagaatgcatcttcaccatttacccaagccagagcacattggatccgagcagttaccaaggttcgactccagctgcaggaggtaggaaatctgttctagtactggttgggacaatttttcctttgaaattgggagacatatggtgctggagaagcaatcagtgattagtcatcttcttacagtgtgcttctgggaatgcatgacaattaagccagagctttaagggatgggaagtggccagtggctttcttctgtgctgattaatggaaatcaaatagacctagtgggctgagagcctgactgtaaagttagatgcttattttcaagtactgttcattgtctctttgaagccgtttgagtttagggcgagtttagggcaagaaatgatttcaagcccctgaggatagttgtctcccttacctagccggtccatactggctcatctgtagggccaaaacagggtacaaaaatatctatggaatttgccagtttaagtcccaaagtatcagcacactaagatctgaaacaacgtcaaaaaaatgtaaaaacaaagataaatatttttcattttcagtgttacaagtttgaagtgtctttatctgtgtgttaggaggtaggcagtctttaggcagaaggtacttttttttccatataaatttaggaggtacccgtgcagttttgatacatggatatgttgcatagtggtgaagtctgggctttgggtgtagccatcatctgaatagtgtacattatacccattaagttatttctctttccttacccgcttccacccttctaagtctccagtgtctattattccacactctaaatccatgcgtacacattatttagctcccacttataagtgagaccatgcagtatcccatggtgtgtatatatatatatatacaccacatttttaaaagccaaacatctgttgatggacacttaggttgattccgtatcttttttttttttttttttttttttttttgagttcaggtcttgctcctttgcccagctggagtgcagtggtgtgatcattgcagctttgaactcctaggctcaagcaatcctcctacctgtgcctctttagtagcagggtctacaggcatgcaccaccatgcctggctaatttaaaaaaaawtttttttttttttttttgtagatgcagggtcttgctgtattgcccaggctggtcttgaactcctggcctgaagtgatcctcccactttggccttccaaagtgctgagagtacaggtgtgagccactatactcagcccataatatttttgctactgtgaatagtgctgcaataaacatatgggtgcaggtatctttttgatataatgatttattgaagttacatgtttaatgacaattggctgtcagtagtataatatctggcagatattaaaagcacaatcatgctcacatatgtgcacatatactttaaaaattaatttattttgaagcaatttcaaacttaaggaaaagttgcaaaaacagtaaagaactactatgtctcctcacccagatgctccaactattcacatttcacatttacttcattgccttccctccattatgatcaatctttttctgaatcatttgagagaaaattggagacatgatattctgtcattcctaaatcttcctttgtatttccctataaacaaggctacagttctgtataaccatgatataaccattcaaatctgccaaacaacaataacaacactattatcaagaccctatccatattttgccaaccatcccaacaatgtctctttttcctttctaatccagaatccaatccagaatgacaygttgcatttagtcgtgatatctctttagcttcgttcggtgtttcccatccttagcagttttaaatggtataggcttttcattttgtagcatgttcttcagtttgggtccattcagtgtttcctcatgtccggactgaggccatcctttcatggcaggaattacacaaaaaaaatgatgctgtgctcttttcagagcattgcgtcagaaagtacctgatgtcaacatgtcctaccatttataatgtcagccttgatgacttggttaagtttgcattggccaggtttctccactgtcaaggtaccatttcttccctctgtaattgttaagtgccttgtggtgcagtactctgaggatatgctggtattttgttccttatcaaatctctacctaccagctaagtagccgtctcctatctgaatctaccaccactaatgatggttgccaattggtaactttctgtttctattattctttctatattaattaattagttggcactctatttttaggaagagatttcccttttctctcattaatttatttatgtcaatattgcattatgactcttacatttctaatttattacatgagttataatccattattgtcatttattttggtgctcaaatcgttctggcttcatatgagcactcttaatttgacccttcagggagaagataatgttttagtaattattgaaaagatagctgcttggaaaaggtattgtgaatacagatatttgaaaatgctattatttgtatatagatgtgcgtgtgtgtgttcttttatcagaaacaatgttactgataaaaactcataattgcatgctctaaaatcttggaaagagactattaacatattaaaaatatttctaatgaagattttcaatgagttttgaacttacttgttaaaaatatgaaaatatttctcacaattttgcaagaacggctgactgacatcagagaagaggaaaaattactagccaaagtttaacaaaatctctgaataattagtatgttggaaccaattgctcttctttcattagatttgatatatcattatctttttcggctgtgacagctatgaaaaccatgtattgaagtaattgaatgtacaatcagaccttaaagtcattctataacaaaatattaaaataagatttaggaaacaattaggcacattatatcacattgttttaaaaaaaagtatcactgtgaatatttttagttacagcaaaaaaatttttgttaataaacattaaaaaacttttaaatttgttatgcttttcacattttaatttttataatatatattaatgcagttatacatctatataatttttaaatgaataagcgtacatatgttgagaggttcatgctaaaaaaattttccatggatagggctgcctaactgcaaacactgggagtctgttgatatagactgacgtgaggcaaacaaatgtttgtttatttatttattgagacagggtcttactctgtcgcttaggctggagtgcagtggcatgatcatagctcactgcagcgtcaacctcctgggctcaagtgatcctcccacctcagcctcccttgtagctaggactataggtacgcactaccacacccagctgattttttttaatgctttgtagagatggaatttcactgtgttgcccaggctggtcttgaacttctgaacttctgagctcaagcgatcctcctatctcagcctcctaaagtgctgggattataggcgtgagccactgcatctggctaaagaagcttttttttttttttttttttttaagacagagcctcactctgttgcccaggctggaatgcagtggtrtgatctcggctgattgtaatctccgcctcccaggttcaagcagttctcatgtctcagcctccctagtagctgggactacaggcgtgggccaccatgcctggctaattttttttttttttttttttaatttttagtagagatggggttttaccatgttggccaggctggtctcaaactcctgacctcaagtgatccacctggctcagcctcccaaaatgctgggattacaggcatragccaccacgcctggcctaaacaagcatttaaaatgaacatttatggaatgaatgtcataatacttactgattttttatttctaagttttttaaaagtaagggtcttgtaattcttcctataaagcaaagcaaagtaattagccttatccatgtaaaaggaaagctctgaattagaaaaataagaatatattggagaagacacagtttaagttatggccttttctttttcagaagtataataattcrgtctctcaaaaagactagctgaaaacagttgccaaagcttggaatcatacagacagaggcatggtttacctaagagtaactaagaacttaattgaataagagaacaatagtaaagatattcttaacacaggtaaagtaactggcaactgattagaaatgtccaagaggagaacaagaagccagagtttaaagagggttctgataacagtttaagattgaagcagaaatgtaccatttgtacttaagatgagatttagtaacatattggttgaagttatgtgagagaaagaagttaagcacaacaccaaggatttttttgccccgctgccgccccgccaccccaatcactccttcaccctccactcaagataatcttgttagtttcctatttatcgttctagaatatctgtctacaagtacaagcaaatatgaatatactaatgcttctttacccgtttttatacaaaagatggtatattatacataccaagcatttcttgattttgtatttggagatccttccatatcagctctaagaaaatttttcattcttttttatagctgcgtaatattccattgaatgaaatatttgttctgcaagtatttagtcctttgttgatgttcatttggttgtttccagtcatttgctgttaaccatgttacaaatgaataaccttgtacatatgtcattttgcatgtgtgcaggtataccaaggggatatgcatttataattttgataaatattgccaaattgccatccatttgtctatggcttaaaataacaagggcttgtttcttgctcgtattccacatcaaggagttttgctttaaagttgtcttctctctgcaatccaggctgatggagcaaccaacacctggaacactgccagtcacaatggtaaaaggaagggaaagataacaagtgaaagaaaatatagcaagttgtactttggctcttaaaacttctacccagaagttattaatacatatgttgcttttgctcatattttcctagctaaaggaaatcatgaaaccaaacttaactttttaaaaataatttcaacttctattaatattttagatacagagggctgagtgcagtggcttatgcctgtaatcccagcaggagtttgagaccagcctggccaacatggtgaaaccctcatccttaccaaaaatacaaaaattagccgggtgtggtggtgcatacctgtaatcccagctacttgggaggctgaggcaggagaattgcctgaacccgggaagcagaggttgcagtgggccaagctcatgccactgcactccaacctaggtgacagagtgagaccctatctcaaaaaaaaaaaaaaaaaaaaaaaaaaaaaaaaaattagatacaggggatacctgtgcaggtttgttacataggtattttgcatgatgctgagatttggggtatagatcctgtcacccatgtagtgaacatagtactcaggtagtttttcaatccctgccatcttcctccttcctccctctagtagtctacagtgtctattgttcccatatttatgagtacccaatgtttagatgccactcattttttaaaacttttttttttaattttatttttttgagatggggtctcactctgtcacccaggctggagtgcacgggcatgatcacagctcactgcaaccttaactcctgggctcaagcaacccttcacctcagcctcccaagtagctgggaccacaggcatgtgccacttatgcccagcaaattaaaaaattcttgtgtagagatagggtctcattatgtttcctaggctggtcttgaactcctggcctcaagcaatcctcttgtctcagactcccaaagtgctgggattacaggcatgattataggcctggcccctagctcccatttataaatgagaatatgcaatatatggttttctgttcctgcattaatttgcttaaaattatggcctccaactgcatccatgttgttgcaaaggacatttcactgttttttatggctgcatagtattccatgatgcatatgtaccacattttctttatccagtccactgttgatgggtacctaggttgatttgatgtctctgctattgtgaataatgctgcgatgaatatatgagggtatgtgtttttttggtagaacaatttgttttcttttcattatrtacccagtaatgggattgctgggttgaatgctagctctgttttaattaaagtggagcagtatgacatacttttaaagagatagagaaggatatttgtcartggctttaatgcctacccccaaaagtatatgcttcccatagggagtgtaccaatttatactcccactagtaatgtcttaagagtggttttctctttcctaacccatcagtaatgtatcaaacttttggattttcacttatctgctaggctctttttgctatcctgtttaggtgaaatgcttccaacatatagaattatttatatttcaaaaattctcagagactttatatttgctgtttcccatgcttagaatgctctttctcttaattcacttagctaacttttcattcacatcttttaaaacccagtcagctgtcagttttggggtaaagtttctagactctttgcatatttttttctactgcatgatgatgtaatggagttacttgtttactgctatgtcttacttttctgtgtacttcttgtaagatcctttaatgtcaggctaagctttttaaggctgatattcaagagcccagtatggaatctggcaaagtgtgtttagctaaccttttgtggatgcttaaccagccagagatgccccgcattatttccacagaagtctccatgtgcttctttatcttctaattaatactatttttaattattcccaaggcccagcacttaaagtcaataatagcagaatattaactattaacattagctatattttcttatataagctttatatacatgaacataaatttactgaatttagatcataatatgtgtggatttaaacattttttttctcactttgtttttgtgaactttattctgggttattaaatatttttgaaaacatgatttaatgacttaatagattaatattctcttatataggtattttataatattcctcttgtttctttcttttcttttttcttcttttcttttgagacagcgtcttgcctgggctggagtgcagtggtacaagcacagctcactgcagccttgaccttccaggctcaagtgatcctcccacctcagcctcccaagtagctgggactacaggcgtgtgccaccatgcccggctgatttatttcttgtagagatggagtcttcctatgttgcccagcctgatcttgaactcctgggctcaagcaattttcctgtctcaacctcccaaaatgctgggattacaggcatgagccctcatacctggctcctcttgttactattatgaataacgctgtgatgagcatcattgtgcatacatctgttttcatttctgattatttctttaacttaaaatagattaaattactgagttgaagggtataagtttttaaatttaaattttattttttatttttaattttattttttaaaatagagaccagktctcactacattgcctaggctggtcttgaactcttagcctcaggtgatcgtcctgtctgggcctcctgcaatgccatgattactggtatgagccatcacactcggcttcaggggtatatatatattttaagacttctgtcaaacttcttaatttattttcagaaaagcttttccrgtttgtactttcagtatttgagtgtgctgtaccaacattaagtattcttattttagaaaatttttgccaatttgacagaagaatggtataccattgtttaatttgcatttctttgattatctgtgatttgaatatatctcataagtttataggtcacttatacttcttcagctaatattacatcaaagagactttgagaatcatagaaacctagttacacttatgctattcctataagattgtcagtcacttgagggaagaggttatatagagtcatctctgtgtcttctgggctggctgagtacatggccatatgtacttaataagtgtttgatgacattgctattgctgatgaggcagtaatgttggtagtgtgggtgggagtggatatgaatctgtaccttatttggcttagctgcagaaaaatctgggggaggaggtgagactttagctctagaaacggagattgcggtggcagcgggtgggtgggtgttccaggtggaagggacagttcaggagaaggcatggagataggccaggaagaaggcttgacaggagctcttgggttgttgaagaaagctgaggaaggagagccttggtaagcagagacagaacagcaaatagatgagaaggcctgggtttaaatggagcagtctcaggagaggtaggattacagctgccagcctgagaggtagatcagcattttcttaggggcgatcattaagacagagaacgaatcgaaactcttctgcaaagttccgttctcacttgttactccctcccaagaaaagtgacttccttcttgttctataattgaagcctcaaaaatgggtccctaggggaaaaataatgaggcttaaggagagggcttttgagaactgcaccattcagactttgcaccagggaaatactctttccataatcttaaactctggaattttttctgatcatgtctgcctatcttaacttctcaactctttgccctcatggagactaccaatttccgatccctcctttttctcacaacttttcatccctctccctaaccattgccattctaacatttctaaaaaaaactgaagaatgttttgaataagtaataaatgtaaaatataaaattgaaaaggatattatatatagatatatatttataaatatataatgcacagttttcctacttcagattcccaggccccctcatctccttttcccccatcttattatttgtgtctcatggatcagtccagagttaatccatccatttatgagcatgtgtgtgccccaaaacttgtatgtgtgtattacacacattgtcctacaccttgcttttttcatttattgctctatctcggagatttttttccttattagtataaatagagttcatactctattaacagctgcatagtttttctgttagtataaatagggctactgctttgtaaatagttatatagtatttctttctgtagatgtgttataatttatatactctgcccccattgatggatctttaggttgtttctaatgtagttgcaatgcaaatcctgtacataagcctgaatacttcaagacttatcttagccacagcttttgagacccctcttcaaacttcatggtaagccctacccaagaacaggccttactattgcttcacaaaccagagtgaccttccctggccctagctgctcctctgaatgctgtgagacaacccttgttctcaacagactgttttcgccttctgagaaactgcagtgcctttacctgatatctgagaccagaaccaacatattctctaccttctgaccttgactggacctggctgttccttgaagccctctttggtagagactatgccttttatatgccccatgcattactgggtcagaagtgaggtttggttttctctggcttcctctgccacttccaagccattactagatccttgcctaacctgtttctacagccaccttccttgttgcaattagattacaactttcccataattccccatttattcattgaaaattttagtacctgcatcacagttttcctttttaatctcaactcttgccataataataatatcattatagtaaccacatttattgaatactactatgtgtaggcactatatctttacatgcattacctaatgaattcataataataattctgtgaattaggcttatgttattaggcccactttattgattaagcaactgagtgtttagaaagatagaaacttgttcaggatcacccagctagtaagatttaggaccaggattcaaatctagatctatttaacttcagagcttgtctttttaacactaatcttagaaccctactttccaaagcatgttccacaggactccagtttctagagtcattaataggtatcatattatacacggttctatgtcaaagaaatttgggaaacacagaattcaacagagcacaaagccaatagattgccttatatcttaggacttctcagaaacttcagtatacttaggcttattgtgattctttaagaagggaatataatatgcacagctttattgcagacttatttgaccatgaaacactcttttagagacacattctgtgggactagttttccaaggaatatacttgagaaaagtctgcgtcagagatcccattgtcatttcattaaaactgtatttgtgaaggtcatcagtgagctcctaactgataacttagtggttgcttttcagtgtttatcttattggacctctttgcagtatttgacacttctgcacagtccctcctgttttgacatctaagaaaccatctccaactctcctctttgatctgtcttcagtctcttttctgatttctctgtttgctcatttcttaaatgttgttctttccagagttctttcctcaatgctcttttcatataaatctatacatttttcttttgaaatatcatttattatgtcacctatcacctatatgtgggttgctctcttatccagcccagaccctaaacccatatttctaactacttcttggacactcacttgtcccatcagcatctcaaattcagcttgtcccaatcaaaagacatcacctctctaaaacctgttttacgtcctgcattttgttcccatgcttcccaaatcaaccctgaacccactagatgtgattgggctcctgagagataagagaaagcgaagacattctttttaagatgtagaagaatgaggagctggagtttcacttatcctcagagggagagaaggatgaggtaactatcttatgcacataaaaagtactccataaatatctgttggcaggatgaatgaacaggatgtagagtaaggaagcttgtccttttgcattctgggcagttgagttgtgaagaggaatgaggggggttttcttgcctaaaaatctctagaaaaggagaggtccatacccattctcgcctattctcacttttggttgagaaaaaaaattttttttatttccaaattttatcttttaccagctacccatggctcttccctctgcttacacagcttgcctccacttccttttactattctaagtgacatagagacaaggatacactgccgttgtactcttgcagccttctcattcagccctactttcataccatttcccctcagtggcttgacaacaaattcttgttcctttgtttttagtaacaaatatttttaaattcagatataattaatataacataaagccatcttaaagtatacaattaagtggtatttaatatagtcactagatcacacaaccatcaccactacctaattccagaacattttcatcacctcaaaaggaaatcccatacccattagggattactccctattcccttttccaccagcctgtagcaaccatgaatttactttctgtagatttgtctggacatttcataccaatggattcctatcatatgtggcctactgtgtctggattcttttatttagcttaatgttcttaaggttcatccatgttgtagcatggatcgttacttttggctattatgaataatgcagctgtgaacattcatgtacaagttcttgtgtgaacataagttttcagcttttttgggtatgcacttaggaatggaaccgctaggtcatatggtaacgttgtttaacattttgagaaaccgccagactgttttttaaagtggttgtgctattttaccttcccatcagcagtgtatgagggtttcattttccccccatctttgccaacacttattgtctgtctttttttattatagccatcctagtgggtgtgaagtgctaacttgtgattttgatttgcatttccttagtaactaatgatgttgagtatcttttcatgtgcttattggccatttttatatcttctttggagtttagtagtctcctcttaaacataggggatacattcccagaccccaaatgggtacctgaaaccatggatagtaccaaacttcacatatactatgttttttcctatacatacatatgataaggtttaatttgttaattttagagacaggatctcactctgtcctgcaggctggaatgcagtggttcactgcagccttgaatcctgggctcaagcagtccttcyacctcagcttcctgagtagcttggactataggcatgcaccaccacacctggctaagtttctattttttagttttttgtagagacaagagctgtgttgcccaggctggtcttcaacttctgggctcaagtgatccttatgccttggtctcccgaggcactgggattgcaggtgtgaaccactgtgcccagccaatgtttaatttataaattaggcacagtaagagattaacaacataataaaataaaacaattataaccatatactgtaattaaagatatgtaaatatgatctctcaaaatattttattgtattgtacagcaggtaactgaaaccacagaaagcaaaacagtggctaaggagggactaccgtaatatctattcaaatcctccgctcatttttaaattgggttatttgtctttttgttgttgagttgtaagagttcttcacatattttggatagaagtcccttatcaaacatatgatttgcaaatattttctcctactcctgttcctttttaattttttcaaacctcttttgaatttgccatgttttgccttaattatgccctaacttgcaacctttcttctctttctcttgcctatctctggggaaattggccacagcagccaagcctctgaagcaataaggaggagctgttttttctagggtgtggaagtagcttgcctagttggtcagtgtattattagggttctccagtgggagagaaccaataggatatatgtatatataaaagggactttattaaggagaattggcttacatgattacaaggtgaagtcccatgcatgataggctgtctgcaagctggagaaagagaggagccagtagaggctcagtccaagtccaaaagcctcaaaaccagggaagctgacagtacagccttcagtctgcagctgaagacctaagggaccccaggaagcctcttggtgcaagtcccaaataacctgttcaagggccggagaagaggaagcaaatgtccacatgggaagaaaaaagagagccagaaaactcagcaagcaaatttattccaccttcttccacctgctttgttctagctacactggcagccaattagattgtgcccacccacattgagggtgggtcttcctctcccagtccaccaactcaaatttctatcttctgtggcaacaccctcacaacacccagaaacaatacttccccagccatctatctaggcatccctccagtcaggttgacacctaatattaaccattaccgtcaatgaaagcatgttctggagcattgcagccatgaaagcatgttctggagctgccagctcatgtagcatcctgatggtctcagtccctccttttctgtttctctaatatacgcatctagctccgtccttggaattcaaccatttaggtaaaaactaaagttgtcagtagaaaggaattcaaaagatgaagctaagtagatgacaacagtgatttctttaggaataaagcttcaaattttcttttctttttcttttactttttcttcttttctttttcgagactgagtctcactctgttgcccaggctgtagtgcagtggctcgatctcagctcactgcaacctctgcctcccaggttcaagcaattctcctgcctcagcctcccgagtagctgggactacaggcatgtgccaacatgcccagctaattttttttgtatttttagtagagatggggtttgaccgtgttggccaggctggtctcgaattcctgacctcaggtgatcctcccaccttgacctaccaaagtgctgggattacaggcgtgagccaccatgcccagcctaaattttcttttaaacatgagcaaagtccctccacctctcccacctctattgacactgaaaagagcagagctgccagaaggattcatgtggttctcctgcttctgttctccatatctgctaagcagcagcccagagtagggatgaaagctgagactggtctagttctcattctccaaagccaccaactgagatgatccttccactgtattccaaagtttccctacaaaggaaaggaaaaaaccagagtgcctggcttctggttctgaattgtccccttccttccttccttccttccttccttccttccttccttccttccttccttccttccttccttcctccctcccttccttcccttccctttcttcctcccttccttccctttcttcccttccttctgttccttcctttccttcttttcttttcctttcttttccttccctttccctttcctttctttttgacrgagtctggctctgtcgcccaggctggagtgcagtagtgtgatctctgctcactgcaagctccgcctcctgggttcacgccattctcctgcctcagcctcccgagtagctgggactacaggcgcctgccaccatgccyggctaattttttttttgtatttttagtagagatggggtttcactgtgttagctaagatggtctcgatctcctgaccttgtgatccgcccacctcggcctcccaaagtgctgggattacatgcgtgagccacctcgcccagccccgaattgtcccctttcttcccttgccttttaaatatctgataccactgagttcctgatttcaccttttcctcctctcatgggctgagtttgtccccattcccaccccaaagttcataatgttgaagtcttaaccttccccaggggttggatacctaaccccaggtatcttagaatgtgacattatttggagatagggtcgttaagtgggtaattaatataaactgaagtcatatgggtgggctttactccattatgactaatgtccttggaagaagaagaaatgaggacacagacacagagaggaaagaccatttgaaggcagagaagatggccattgacaagccaaggaaagaggccttgggagaaatcaaccttcttggcatcttgatcttggatttctaatatccagcattgtgagattttttttttttttgagatagggtctcactctgttgcccaggctggagtgcagtggtgcgatcttggctcactacagcctccacctcctaggctcaagtggtcctcccatcccagcctccctagtagctgggaccacaggtacatgccactatgcccagctaattttttatattttttgtggagatggggtttctctatgttgcccaggctggtctcgaactcccaagctcaaacaatctgccccccttggcctcccaaagtgctgggattacaccacgcctggtcaaaaataaattttagttggttaagccacccagactgttctactttgttttggcagccctagaaaactaatatacctcccatggcagaagagggaagagggtggcacaagcctcagtatttctcgcctgtcaatatttgtttcctgaggtccacttggagagaaatagggtttccagactggtagacacagagcccaagagcccattcacaatattgtgtcttttgtatccgtttactgttaaattgttactaacaaaatttagggctggatagaaatgccgagaactgggtttttgtattagctcacccttaaaatctgaaataactaacaaattcatatttgttgttcttctcagttataaaattagggatagcgacttgttctctctcacaggattttggtgagatcacagaaaaatgcatttttgagtacaaagctctacaagcatttgcttaaaagtctctagccagcctcctagtactttccagaactgttggcttttagggatctgtcatgacctttctagcctagacctgaggcaactgaatgacccatcaaaggtcattgctgaccatggctggaacctttgctgctaagtgaggatccattgacactgctgtttttttggctgatgtggcaatgagccaatgccataggatttcaggctgttatagggatctaggccaccaggtctcccctgtggtaacagggttgctagggtaacttatctatggatgactccaatgaggctatttggtatgttagtgcttctctgggaccaccaaagaagaggaagaagtcaacggaagccaaaggctgacctgtgcaatgtgggaacattttcaaagagcagctttcatgcacttgtcagtagcaatacggatgttttttgtttgttttacctctgaaatattctggacacatttatggcctggatctggatgttcatcaatggtggatcttctataaaccttctagttctgggctgtgactgagcctggtgaattataggatgtcacacctggactgagatttggggcagtggatcatttggaagggtggatttggctctggtttccaaggagcacatagaacatttccaagggatgccataatgtcatcaacctgtccagagttagagaaaagggtatcagatactggctgcgggccttagctccaaatggtaggtattttctgggcatagtatcaataaagggaggtacatagttaactcttatggaataagtcagattcctctacaaaattacttgcttccaagtaataagcaaagcatcctttctcactctttaccaccaccttctctgattcctgctgcttatttgaccatccaaccaatgagaatattcattgctggctgttcctctgtgaaaaaacatccttttgccaaagttatccaaaatgaagcaacttaagtaattattcagggttttttgttttgttttgttttttcgttttcttttgttttttgagacaaggtctcgctctgtcacccaggctgcagtgtagtggcgtgatctcggctgactgcaacctctgcctccagattcaagcgattcttgtgccttagcctcccatgtagctgggattacaggagtgcatcaccacacccggctaaatttgtatttttaatagagatggggtttcgccatcttggccaggctggtcttgaactcctggcctcaagcgatctgcctgccttggcctcctaaagtgctggtattacaggcatgtgccactgtgcccagcactttttcagttttaaatcaagcccctaataagtgggtactgctgggtactgttgggactatttgtaagacattttcctattctccaagagcttataggccagaggggaggtagaaataattaacagttaagtatttaaatacttttttctctcagtcactttttcctcattcttactttctgtgcagcattccatagtgtttttaaaactcccttttttcgtttcctattttcttctattattcttagattctcccaattctcttccttccttagctcctgcctcatttctttctacagtcttccctcaagcatcacttttaatctcaaaactgcatctcttcagcctctaatcaagaatctttaattaagcaactactctatggaaggtaatgtgcttggtcctacctactgtgataggtaaccagtaggcttccaactagccttttttttttttgaacggagtcttgctcttgcccaggctggagtgcaatggtgcgatctcagctcactgcaacctccacctaccaggatcaagcaattctcctgccttagcctcccaagtagctgggactacaggcatgagccaccacgtctggctaatttgttttgtatttttagtacagatggggattcaccaataatccacccgcctcggcctcccaaagtgccagggttacaggcttgagccactgcacccagcctcccaactagcctttgtaagcagatgttcccaaatctaaaccttccctttttccttaggctctattcttcctgtctagttatctactagttattttcactataatttcccaatgtttaaaacttccctcttgagcctattccttttcctttgttctctatttatattaaagttaccatcattctactagtcacccactcaaaatcacggtgtcactttttattcttccttctctcttgcctcccacttagatcatttgccagctcttgctcttcttttctttgtggtttcttttaccagtctctgtctcttctctgtttccctttgtgttcgggttctctttatttgcttagactatagtattagtcttctaatggtttccttgcttttattttcttagaagccattttatgtattactgccagatttatctttctgaaatagagctcgagtcatggctaccatttataccaagggctcaacttggatgtcacattctttgaagcctttcccaaagtgcccaggccaagttagagtctcatcttttatctttctatagcatttcatatataatcaactttgatgttaatcacattgtcctggaattatgtgagcatttgccctcaagattatatatttcttaaaataatatattttgtatgattctttttgtattaagttcaaaaacaggaaaaagtaacctgtggtgtcagacatcaggatagtgattacctttgggggatggaatttgtagtgattagatatgagcacaggaggcttctggagttctggttatattgttttcttgatctagattctgtttacatggatgtaaaagtacacttttgacttgtttatgttataattataatgtatattatmattcaataaaaagtttaaataaaagctaaatgaaaaatagcattaaaatacagagtagagaaaatgtctgactttatatccctgatgcctggcacccactaaactctttgcagatgagtgagtgagtgagtgaatagagaagtgaatgaaagtttatcctcaaaaaaattaatttttctttacattggtaattaaattatagtctcaacagagcctgagttctccaccacttacggcctgtgtaaccttaggcttaggcaagttacccagccctttggaaacataattttttcatctctgaatatcatagttgcctcagtggatgaataagggtttaataatatcatacatgtagagcagggcatggtgtgttgttagcattcagtaaatgttaatatccttttctttccaacgccttcctccttctccctttcatctctttacccatcctctatcctctgccttaaatatcctttccttttagtttccacatatccaaatattatccattctttggatcaatctcagatatcatgctcttcacagagccttctctgactcacatccaaaccagtgtttctaatgctggaaatatttccctctctcaaattcttgtacattttatctgtgtcccttatgatacatattagtcactcactccaacctttaggagttgctgaaggctgccgtctgacttcaggcccaaagaagaataagcactgtaattgggctaatatgctggaggcaggagctctgtcatttggaacaaacttgggaatgaaaagtcaggttgagaaaactgctttgggcttttcatattcatttttttgtttgtttttttttttgttttttgagacggagtcttgctcttgtcacccaggctggagtgcagtggtgtgatcttggcttactgcaacctcctcctccctggttcaagtgattctcctgcctcagcctcccaagtagctgggattacaggtgcccaccaccataactggctaacttttatatttttagtagagacagggttttaccatgttggccaggctggtcttgaactcctgacctcaggtgatctgcccgctctggcctcccaaagtgctgggattgcaggcgtgagccactgcacctagccctgatattcatttttgtacctccccttacacttggagaaattcagatgtctattaaaaaatatgggcccaggggctaaagtttaagttgcagactgtttgacctgccttttgaaatggttaaaaacctcttctgctaaagacgtcttttggcccagcttggcttatcaaggtaaaaggccatgcagatgtttgagtctcaagtcttaggaattaagagtagacattcacctggagtatcttctctgcctaatatccctagtgcatgtaggtagaaaaacagttcagggaagaccccattcctggccacttattttcttattattttggctttctacgtgtattttccttgcatacttacaggctttaaatcctttgctagattgctcttgaggtcaagaactgatcaccaattcttagcatcaattcctcctgatacttagtaaaaactcagcaaagatttatggaatgaacacttaaaaatattaggtggccgggcgcggtggctcacgcctgtaatcccagcactttgggaggctgaggcgagtggatcacctgaggtcaggagttccagaccagcctggccaacatggcgaaacccccatctctactaaaagtacaaaaattatccgggcttggtggcgggcacctgtaatcccagctactcaggaggctgagagaggagaatcacttgaacccgggaggtggaggttgcagtgagccgagatcgcgccactgcattccagctgggtgacaagagtgagactccgtctcaaaacaaataaaaaattaaaaaaattaagtggtattacacggccctaagtaactgattgcaaaagaaataattaagtcttttaactgaaaatagttgccacaggactttaaggaacaagccctttggattagggtgatcagagaagtcttctcagaggaattcccagagaatactaagttagcagttaagtatcaggaaatggccaagaaataaaataacatgagcttctaaagatggaaatcaagggataacttgcttcctgtgtttgcaagcatatgccatgggggagatccatggcctcttgcaagtggcatgttgcattcttcctgtggacaatgcagctgctatttaccactatgccctgaagtacagtcatattgtaagacttcagtaaacttcctgaagccaaagggaaagaggtaagttgtagcccattctttaagctgcttcttctctttgctggttgtcaccttcaagcatgctaaggaaatgtgtttattcagtcctcacctgagaacactcagacttaaacagccaaagaagacaagttaggaagatcattttagatgaaaaccaacctcctggagcatttgttaacgacagatgagataaaactgttgactgatttctctctaaaatattcttccttcttggcctttttttttttttttaaaggggtcttggtctgtcactcaagctggagtgcagtggcacaatcacggctcactgtaacctcgaactcctgggctcaggcagacctcctgcttcagcctccaagtagctgggattagaatagctaggactacaaggatgtgccaccagacctggctaatttttaaatttttcttgtagagatgggggtccccctatgttgcccaggctggtcttgaactcctggcctcagtccttctacttcagcctccataagtggtgggattacaggcctgagtcactgcgcctggccccatctttgatttcttcatagcatttctctttctctgcttgccccttaaaacttgataattcccaggctttgttttctacctcattttcttttctagttaatctcatccatgtcctaacctgtaactgataaatcccaaattactatctctacctcagtcctctttcatgagttccagacttttttatccagcttcctgtggatattgtcacctgaatgttcatagccacttcatacaatgtgttcaaaccgtacttaccatcttttttttctcctccacttcctcttctatatatcctttcttactaccccgtcaaacataaaatctaacactcctctccctcagaatatataacatgggtataacaatgcctcttgctttaacatttcccccgttaggttatgaacttcttaagggcaaggattgtatcttttcattacgcctgttaacaagatgttgttacttaataggtgttcatttattttttgttttttatttattttattttttcgagaaagagtctcgctctgtcacccaggttgaagtgcagtggtgtgatcatggctcactgctgccttgacgccctgggcttaggatatcttaggttatcttcccacctcagcttcccaagtagctggtggaaggggcaaaagaactcctgtgggcctcttttataaaggcactaatcccattcattagggctctgccttcatgatctgttcacctccccaaaggctcacctcctaatgtcatcaccttgagggttaggattttaacatatgaattttggagtgacacagacgttcaggcaattcaacccattacaggtaccaaagtagtttttcatgtttatttacaagtcttatcttctgacaaagcacttgaaaaggttcctaccttctcaccatcctgatgtttactctctgatggcactctacatagggccatctggaaacagaaaggatgagatggcacattaagtgagtgcaaggggtttgctttgactaaagttagggtgttgggaagccaaattcctctagacatgggcaggtcaagaaagaactttgataacatgtaaagaactaggacttttttttttttcacagtcactgacggattttaagaaaatgagtgacaaaaacttatgtacatcttagaaatatccccctagcaaattgtgcatcacggatcaagggtaaagaggagtgagtgggaggtggttctggaggaatggagtctagggagaatgaatattttgcagtagttgaagtgagaaataagcctggactaaagattgcagaggagacactgatagataagaaggtaaaatagattatggcagaggcacaaagggctttgcaggggcttctctcactgggtaaagaattagaatatatggattccaatgatccagtatctgagcagagaagtcatctctgcatgggttgatatgggtgagctggcagcctagtcctctaaacacgtagttctctcttcagacttacctagttgagtgcttccctttctttccaccatgcttccctcttactgtcagagatccccagtgaaggatacgccttcattaagtcttcttttcccctttgtacattagctaccttcctgtaattcagtacctcatatcagatacttttgaatatttggagaatcctgtagggaaaaacccacctctttgggatcccttcattgaatgtgaagacacttgaaactcatctgctggttagggacatatttccacaagactatagaaacaggggcctaagccaggagaattctccagatttgggtttgccctatatcttattcttagatgtatcttagaacaagccataaagaactgaggggatatttgatcaatattaacccagttagtctccacttagtacaagaggttcatttctccctgggatgtcaaattttggattccttttagaggatcctcggtatatggcctctttgtttcctttgggtatagagattgaggcagggccaatgcactctgtggcttgggctgggatatatatataaacaaatactactttaggaccggcattagtcctaaatctgggagctgtgacttttgatcgggtttatgtgagagggcagtagacatataggtttcttatgatcatgaattgttaattatttggtcctgaaatagatagggggccacagcctttggaggtacaggctgaaaacctaactggttagctggccagttccaagaagtttatcagctccttatgttcaagtttctgctaatcagggatggtccttgacctgattgtaggactaagacttgtcagcaatttatgactcttagggcctgccttgcagcttgtcgggtctgtttaggtaacaaagcagctatgtcttagtgcatcagtaaagtcagcacatctctgccaggcttgtcactcccctaggatggcatgctcctcagggaaggagcaggattacctcctgctgcccgtcattctctgctgcatatgctttctccatggtgtagggagggcatcattctacagcgggaaaaatgacttttcttagccaccagaaaaatcatcttcctcatgaaataaatcccagctgtgtgactatatgtcagctttttcatgttgcttctggctttcctcagcagtagagaaggaaaacagtcacaagctgactcttgcatgatatagatattggccgcacccatcctttgtactctgcgtctgtgttgatattggacaataaggtaagcacctgctggtcctgacccagcctgtctctggcattgacacctgaaaaggcaggccaggtttggagcaggcatattctttgcttctagaccagttgtatctgacgtcagggagacttagactggtttgtatgagtagggagaattgtgattggtgaggccctcctccagtatttctgtgacaccactcagttgctttagctgaagatgaattttgtatgccaggtggttttctgactaacccacccattcggctcccctttagaactcctgcaggtctgaaccttcccacaactctgcgtgagtgtcagtgtatcatgttgagtttccatcttgactcatctgtctctaggcgaagatccctgcaaggatttaaattgggaaccagaccttgagaatgtctgttcagagcatttcacagcttctggataaatgccttttccttcttaacccaatctgtttttccagttctgcccagctagctcctgagcagcctactttgaggaagcttcccaactgaggtgggtgctgtgctatttcttacctctaaaaagcaccccatcctttcggcctactcaggcttccccagggccagatccactgtgatgagggggctgcattgttgcccatgtggctcacaaaacaaattgcctgcttgtcccaaagagctagtccactgaggagtcctgatgtcctttggccatgtggtgtctggcactctgtgggccctgtagaacagtggcagaaggggccatgctcttttacaagagcttccactgactgtttgccacttccccacttactctgtttcttgcttttgctggaacatgggaaggtggatagatacaaaggtaatttgtggtcaaagctgcatgagctctcctgtgaagtttgaagattgtaactggagatggcagatttgttgtgcctcatgtgctaaccacgtcttctactgcctgagcctttgtttttctggaaagcccaagctgcttagaaaaatgggctggatgtgtttgggtgacaagacagggtgggttccattagcctcagaaatgccatctggaggccttagccaggccttagggccactttgtcaattaggcaggaagaagtaggttcttttagcagggtcctacctctggggaatctttcccactcttgaaagtttgagcttctccttagcctaggaagcctgaccaaacctgatagtgacagccactgttctgggctctttatgagtggctgcagatttgggggagggaattctaatttaatcaatcttccctatatttcttgttttaaaccttttacctccttctcctggctgaaggatgggaaactccacagtaaattggctgtgacttccacagaaacttgacagttttcaagttatttttttcctctgtgtttagatgcggttatagttgtgctgtcaggccttatctcttctgtcatctagccagctcccaactaggttaggaggtatgtgctctgctgttagtgttggctgtgtaatgaggtggatggctaagaaatgggttgtttagcatctcttggaatctaaattttcttccttggttgagggggaagcaatgttattggaagaaggcagtagggaggcacatgttggctctgaaatcaaccctttcttctcaggatcttggataagccaaacaaatcattcttaatttaaatgcttgttttatctaccataaagggctgcctgttctgcaatggcagatcctaggatggtccccatagactgactacctggtttgtgggctaaagaggccatactctgttgtggattgccatgaggaatgttgcagggcagcagaagtcacaaggtttgagagcctggtttgggcatgctgggtaaatcaaacttgcccacgtactgttggcctaaggaggaagagggccttttctcttaagatcaagctcaggggagtcagaagaggaatgacttcactggattgttactggctgatcgagctctatattgagaaggattctgaggttatctaggttcattatgcgatgtttttcatgtcctatggttgcagagtggaaaggggatatcacatttcatgtatttggcattttatgctacagagcttcaaggggtcctggcttgtgctcggacattatgttgcagtgaacaacttgagtgttctttgaagataaggacattcaatttcccagtgagtcctaactagaattgttgaattattaggaattagggtcacatgagagccacctggctagtgagtctccagggagatagggcatccattggcaaagaagggttatgaaatttggggtcataaaaggggccctgaaccttaggcagctttttggtcatggtgatatcactttaggttacttcgttcctaattctggattctgaaaccatctttggtctagacttctgcaatacagagttcatctcagctcacctaacttcccctccttctctcgggttgttgctttggcatagcctgagggagctcttattttccagttgattctcttgtggtggttgttcagtaagaactggaatagatgtctactccaagaacatggcactgtttgattttaactgcacttgatcactgtacctatccttcagctttgccaaatgctgacaacagattatatatacacgaaaccaaccaaccaaccaacttagagcttgtctcagtagaagggaagactccctttgtattgtgctccagcagttccacggctggcatgctgtgttccggcttccctctgagactaggagctcctgaaagtataggtctccatctgtgtctgtttatatcctatagcccagatgtgagagaggtggataggggaaaagaaagcagggaggagaagaacgagggaaggaaatggaggaggggagagagtaagatctatatttagcaaaagggagagacacttaccaagggtgtgtgagtgagcttgctggcaagggttgtgtgtgcgtgagtgtgctgggaagggggtgtgtgcgccaggaacgtgtgaggagggctggtgccctatgggaggttgcaggcaggaagcagctggagaggaggaggagcagcagcaggagcaggagctgccctgctttctgcctcagtctcaaagcccagaatcgattgagttagaattccacatccagttgaagtttggctgctgttgccttcagcaggctgatctcagaatcccccttgccagagaggtgtggaccaggttagatttctacgtttgcagccagtgagactcctgccaagcccttcactgaggggtttttttgcagggcattgtttctgtcatcaactttgtgccgtggagccagccagctgggtgcaactgagaatattagctccttgggtctgtttgtcggttgggcaagcagtggtgctttggctcagaaagttcgtcctgtggcttctctgtcaaaccaaggagtgctcctggatggatttcctcttaaagacagcatttgccttctaaaacttgagaattcatggttttaatttttttttttaatttccttaacccttattttggttgcagcagcaaggtaagtggtaccgagtgtgtatgactgactgaacaacaagcagggcaaaaggaaagcatttgtgggtggaatatggagcagctacattaattacgtaattgcttgagtcaacttgctggtgaggggggtcattataatgagtgaaaagtagcatatgccgcactggggtagaatcttcacatgcatgtatttgtgtgctgataatctgaccatccattcctctgtggtactttcctgtatgtatatagataacccagccaccctctggatgtgtgcatattcatatacaaataatctgtttctcctttttcatgtgtccatatgtgtttatgaataaatgacctgtccattcctctcctgcatgtgcatatgtatagacaactcattcatccagcttgcatatatgaatatgcaaaattcgtctctccctacttgcacatacatatataatccatcccttcatctcctatgtgtatgcatgtactcaagtaacctttctgttcttgaatatattctgtatcatttccacccttcctgtatgtgtatatgtgagagagagagaaagagagagagagacagagagaaagagaaaaaaccaccatcctaatgtattaattcatccctttcatgtgtgtatatgccatataaacagaaaagtcatcttgagttttctcagtcttgaatatatgcacacatgcgcaatagacagtctgtccacttgtgtcttgcatgtatgaagaaagagcactaactttgcagattgaagactcacttttaaatcctagctatactcagtgaccttggtcaagtcatttagcctctctgagcttcatttttctcatctatgaaatcagtataatcagaacagtaacaacaaacctcctgcctcacagggttgttgtgatgataaaataggaatcatataaactgaaaattctaaacaaatataatctcttactactgtgtgtccctctagtatgagttggataggatagcgtactcttggtccagttttattgaaattatgttcttgtctgtgagaggtttctaagttttccatgtgaaggggaagcatctattgaggtaaccaggtttatcctgtggttttctgcagagtattggaaagaagcggggtaccgtgaaagggtcaggtggagagggagaaaagctctcatcttctgtaggytggggccttgatactttgttttttgtaccttgaggmggattgaacctcacacaaaatggaaatgggctgcttccagccaggatcaaagtgagcaggtgaaaagatgagtgaaagaacgtaacattcgactgcctctgggatgacagtgtgccctttgcagtgagcttctactgccaggtttggaaggctctccagagtatttcccaccccagaattctagacccatgctgtccaatgtggtagctactggccacatgtgactgctgagtacttaaaatgtggctagtctaatttgagatgcattctaaacataagatacatactagatttcaagaacttagtataggaaacaaatgcaagtatatgattaataattttttatattgattatatgttgaaataatactttggctattgggttagwtaaaatatattaaaattaattctacctgtttcttttttatgtggcgattagaaattttaaaatgacacatgtggttcacattatatttctgttagtcagtgctgctctaaactcacccatcactagcacaaggatcagggcagcttttccaactcggggtaggggatgggagccctgtcacagcatccctggggtaacaggaaccacagcaggatctctccctgccagtctcatacactggagagataccagctaattgatggtctggcagagaccggtgctgccatgcccccacactctttttttgtttttcttttttctttttttgtcctgagtgagttcccagataattttaagtacaactggggaaagatttccaccttagttttacaatgaaagaggactgtaagccatcaatctagaaggaaacctagaacttgaatgcagcatgttgtcatggaaacagaaatggatgagaaaattaggagacctggattctaattcggctctgccatcaattcatttatgctttccatgacaatgaattctcactgtgtgtcaggcatagtaatgccctgttctaggcactggaaattcagaaacaaataagacacagcttccaatgtaatggagttcacacccgctgcggatctttgaataggagcctcccatctagtagtctgccacagcaaaacagattaatgacaacaagggtctcattctaggtcaagggtagtagggcttttgagaagctagagcacctgccctgcctaaagactttcaaattcaaagtatagaaaagcactatgatggtaagactactccataacctagatcacaatgtagtgtgagattccaggcctagacaccctctaaagggtttgtccaactatgttctggtttcttttattcaatgacagggttggtttgttttgggtttttgtttgtttgtttgtttgtttttagcacaggcactgttttaggtgctgaagatacagttatgaacaaaacaaagtccctgctcatgttttgggatacagaggtcagggagggagacagataatgaacaagctatcagatgggaatgagttctatgaaggaaattctagaggaagaggatagagatgggtttttttgtggtggggtgttcagtgagtagattctcctgcactcgtatctttttcagtgtactcacaagagcaggaggtagtaaggaaaaagagggtatgtgagtgttaaacaaaaaattattttgacacttgttaaagatgataagacagactttatgtggggggacgacaatactggggttttgtagtgagggtgaacaattgagctcaactccaaatataaggaaaagtgggaatttagccaaggagcagggtggggtatcagtggacggaaattactaagatgaagtatcaaaggggattttggctaaacttacttgacaggatttttgctgaaggcaggccaaggtggtaagatatcaggggtaggggataagaaatttggtcagataccaagcatagacagatactaagggtgaaagatgaggaatttgatcagaaatcaagggtgggaattttcaytaaaatgacctggctggattcttgttaaaactggactaaatgagccaatgtcaagggcctactcagaaagaggactcagaggagcctgacttatgtttcgtcaaagaagagtctttgtcatgggttagattctgggtgtgattgtatttgttgtatgctttgttatactccttggtataaaaaaccttgctactgctgaaagggagccctgggcagggcacagaatagcctgctctcatgcctggcattcagtctccattatgaggtattgatatgccctccctctgaaggctaggtccgccctcatgccactgtcttttaactgtatgttacctgagattgtctcccttcttggatatagaggcttgaagttttctttcccttgtatatgtctagcttctggcctataaatggggctgctcttaatgctgatgaggatggatggcaagtcctaggaactgcaatactgggaccttgctaagcctttgatctagggcatttctcattccctttggctaatctcacttgccatatcttgtgccctgatcattttgatgattaacatcctgagaatccccatacctgctgtggccctagaaatccattcctcttagcccatattagccatacaacataattgatatatggcccagaaatgctctgtcctctgttgggggctcagagctcttggatttctgcttgctgggattgtttcacacaaactgggaagctgcttgatatatgtacatcgagtcctggccttttcccagaggtcccctggttgtttcctctaagccagatttgggttagaagcagtttttacaaggaatagttacattccyaatcacatttatttgataagtcagagagaaggataaaagaatcagccatttcaaaaaactgaggtgttttcctttctctttttcgttggtaggctggtggtgatgcaatgtggtttaagggatctactccctgcagtaattgttagctttccatcattaaagctttaatctttttgattaattcattttgttttgatgtgctcccttttcaaatgcagatagtccttgaaaggggctgccttatttttcccagccttaggcagtcctgaggaaaagagcacagaaaggtatggtttttgtcggaatgtgtgtgtatgaaatttggagagttgtccagagtcaataggccaacaaagtagggcagacagataacattgggtatcttaaaggaaactccaaggctaggtggactccagagcctacttaccccatcccagctcaaacattacttttctgtggccttgtatgcctcgttttgctgggcctctcacctcctttccattcccaacccctgaattaaatgcttactttctttttcattttttttttttttaaagacagggtcttgttctgtcacccaagctggagtacagcctcaacctcctgtgctcaagcgatcctcccacttcagcctcccaagcagctgggaccacaggcacatgccaccacatccagctaattttttattttttgtagagacgtgatctccctaccttgcccatactggtctctaactcctgggctcaaaggatcttcctgctttggcctcccaaagtgttgtgattacaggcgtgagcccagctaaatgcttactttttattataacttttattataatatgtatcactttatattgtgatcatctatatatatctttctctccaaatcttaatgtattagagagcaggtactgcatcttatctccctggcacacacagtaagtactcatgcagttcaactgacttggagatcaaatggtccttcttacagtttgctccctgtcatttcacttctgtggacagtagtagcaaagagaggctgggaaggaggtgaattgggcctcctgtccctgagggttgccctttcagcccattctggcttctgatattctactgagctcagcacagtgactggttggtcctctgagcatcacatcgagctccatcccctgcttcaaagcccaaagactggattactaagtgagtttggtgcccttcctatatcaccagaagagattcttgagttcaaagttcatcccagggcagtggctaccaactcataagaaggtgtggaggcttttgtttgtttaatatggaaggaagcatctttgtttgaggctgggagaagctgctatggcagctctagttgaaaatttcctatttgtcagtaacatggggaaccaggcagctctgccttcagtcttcaggaggccacaggaaaggactctgaacccagtggctatgccatttgccccctgtgtggctggccagccagtgtcgtaagcactgtagtttggaagggaataccttgtaaggtgtccgggaaatgaggccaagtatgtctggagggctgggcacggtggctcacacctgtaatcctagcactttgggaggcgagatgggcggatcacctgaggtcgggagtttgagaccagcctgaccaacatggagaaaccccatctctactaaaacaaaaacaaaaacaaaacaaaacaaaacaaaaacttatgtctgcagtattgatctgaggggcagaagcagataggccccaggttagcctggtctacactgaatcagtagcagtagcaggggagtcagcttcattagtgttcccgacaaactgccttatctggaccaaagtgaggctggccttagaagacctggcaatgaattctgggcctcaccagcattggaaaaataaagcttggcttctatagccatttatctcttcctcagcgttcaggctgtctgagagacggccggcctcctgacacttgaatgaggtgttgggaactgaatgatttactcctccttctccttaccttaaaaagaaaacttctaggagaaagcaggactaactttaagggtgacagtctcctcgtaggattccaggcactgctgcagaccattagaagggagtgggaaaggcaggagtctggggcagaagtagaagtcatggctcactcaaattgtgccagttaggtggttggatgcttgctttagatatgggtttccctactttgttgactcagggacttgccacatcagtagcaataacaacaggacagtgctttacagtttagtaagtacagwtctctcattttagctttatataataacattcctgtaattatctcccccactttacagatgaggaaactaattcacatagaggtcaagtgtttaatccaaggtcactggtggaacaagacccaaacttaagtctcttgatgccagtccagtagcacttgctcatggcttcatgtagttgtacacagagcttccatcttagtttactaagcttactaagcaattctaatttttttttttgagacagtcttgctctattgcccaggctggagtgcagtggtgcgatcttggctcaccgcaacctctgcctcctgggttcaagtgattctcttgcctcagcctcccgagtagctgggattacaggcacctgccatcactcccagctaatttttatatttttaatagagagggggtttcaccatattggccaggctggtctcaaactcctgaccttgtgatctgcctgcctcggcctcccaaagtgctgggattacaggcgagagccaccacgcccagccgcagtacttcttttttaaagacaaatttgaaaggccacttgccagctgcagcccttgtaaagccaggaacattgttcatggctaataccaagagcaaatcagggatacccaatccctacatggttggggaggaaaaaaaaaaaaaaaaaaaggagtatctttggaaattcagattttgtccttgtgggaagagagaaggaagaatttggcatcctctagactttggagcgtggtctacctaggcagctgggcaccaagcccragacccagaaattctggttgtgcaggtagtgcatcctcgcaggctagactgagttggccagattaggggcatggctgttcctggccccatgagaccttgaggtgaagcagtaatgcctcacaggatggatagggttcttagatgaagaattcctcaatgaattagagttgttagataagctggaaagaaaaggagagatgtgaaatgggaatacatgcagtttctgtctcttggttcttggcctagttatttctagtaaaaagaatcagcttcatctttatcccaagtcytmtgactcgtccttctggttcctcctagtctggggaagcacaatgcttttaaattccaggcccacagactagatgtaggtggtggcctttcctgaaaatgggttgccatgagagcagtctgcctgtgttctttaaggcattttcccacttttaggattaacttgagtactgggaaaataaaaggaggcagagtttagaagatttagaaatctccatcaaatctagaaaatggggaaagcatccctggtcaaagaacatgaagagtagcatgtctcccaccaatccatcttacccctcccaggagacctagcaggactggaatattagttgtcccatgtgcctcctagatctctgctttcctccttgtactttccactctactgcttccgtacactctccacattctcagtaaaaagggaatgtattctcactccacatgaggtaatcatcgtctctgcctctgtaatgcagtcaccaatagcttagggtgtagggactagactggtggcaagtctgtctttaccttattggagaagagtaaagcaccctggagccctctgtgaggtaaccctcccccacatgtcccatgtgatattctctctgggccaggcagaggattagagcaaccctttgttattaatacttgagcagtggacagtgtgctggacaatcacttattgtggtgctctgaaagatcctctgtgggccaggaaagccaaacccagatattgactagctgcagcaagcccttagagagtattaagtggagctcaggagcaccaagctaagcctaaacctccttcatccccagttgtgagttcatgatacctgtctctttggctacctgcctctctacctgcctctctcatgctaaatgccacctacgtctggacagtgtgtgcgtactgtgccactttattctagaattaggtaaagaaatatttttcctgctaagtttaaaatacktaaaccattgtcctttctccaagtgaacggttgccatcactcaacaaagggaaaatactttgtgctataagcacaggcaggggtaaacttttgagtaagtggagtcttcaccagaacaacaaactggaaaagaaagaaagaaagaaacattccatgtcttgtctttcactgtgtatgtgatttgagccttggtggttaagcatttgtttgtttatttctgagccagactyctagtactgaattttgtgaaagttcaaataaggacttactcattgaccttacttcatctacctcccagcagcttgtctcaatatcgttgactttgggtacttgcccagaacacaaggactttattttaattttacattgatactctaaggggaagctaatgagaaacaactgactgcccatagcctttaagactggggttgggaggcaggtcagggttgattcctataatcttaggagataatgtttttattcctgcttgacaacttgattcaaactaaaatcatcctgctactttctgacctgagtgcactattttcctttttcactagctacaggataaatcaagccaggatccaggggcatgtgcgaggtttggaggccacacatggggccattccaggcagcactgtgggctaagcccaaagcatcagccagcaataattgctagaaacaaactgaaaagagcaggacaggctgttgccttccaaggtaatctctattaagcatcctgaccagaartaagaggaagaagcagagaacccctcaaaccctgagggagaaaatgaagcgattgttgcaagagtcagaggaagaaatcatggttaccttgggaccctcctccaggctttccccagataaggctaaggcagagaccatgtgtggcaccaagagcaaatcctctggccctgctggatccttaccagaggacaactccctgcccccttgctgtgggtcagcagccttagccattggtggagatagagatggggacctggcccagctttgcagctttgggcagcagaacaacagccagcttcctctgggctccactgcctatgtttcagggtctggttctcaggatccctcatctgtcagcattaccacaagctgtcaggagccctcagagaggaaccaaaccaagacccttttgtccagaggccatggccaaggctgtagccgtgaacagcgggaacctttgggggatgtagtagaatacatcatcagagagctgcaaggcatcagccgtcttcagactgagattgctgagctgcagcagcacttgagccaagtccagggttccgtggatgaagtctctagctgtgtagactcagtactgagtgaaatagaaggcttacaggtgagcacctgttccctggccaaggtgtgtgwgggtgaaaaggcccaggaaccccacgtggacagacccagtgaggaagccattctgtatttgtayggacttcctgaacaagatggagaaaatactatggaactggtggaaagctttctagccaagcacctttgtgttaatggcatgcagtgcaacaggtacattaaaaaggcttacagggcaggcacatccccttcccctaggcccactgttgtgaagcttgcccatctagagcatagagacttcatcttgcagaaatccatcctcttgcagaatgtgggagtccgaattgccaccagagaagaaccaagctgcccacagggtaataagaatccccagaaggagtctatatcattttttcaacaacaacatcaggattatagtcagacttctttaaaccaggatgaaccagttcttcagatggaaacaggggacaggggacccataacaggaacatatcagatgaaggctcaggatcaacagagagagcaccaggcccctgagcagcaaggcccttgctttctactcaagaacaatttatcaaaggaaagtgatgtgcccaagctaggggatgaaataaaaggagcatcaagaacatctcaagttatcagtggcagctgtgatgaactgtcagagaaaaaggcttctctgtctaccccccatcagtttgaggaacctgccctagtattaatctcaaaagaggaggcttctgggaagtcccagtttttcaaacagtacagccaaaaacatgaagcatgtaaagtaggaaaaccagaaaatgactgccacgataaaagtgaggccagcagctgcctgtcattgtctgggttactgaagacagagagaataaacgcagaggacaagctcctgggctgcgaagctgggctcgatattctgagctcaaaggaactagaggaccttttggcagacaagtccagaaggcttgcagctctgagctgtgacagcatgatggaggaaattatcatagggcctgagactttcagtgacatggttcatattgacctgaatgaagaggaggaatgtgctgctcacgtcctcaaggatgtctttgacaagtcctcttgtgttctgggtggctctcaggaggatgaggatgtggaaatcaagttttatacaagtaaactgggccgagcaattcaccactttcgttctgctctgcagggtgtgtttcagaagctggagaacagtgggtccatcagtcctgaggacctggaaagcaatgagagtggttcccagtcagagaacagtgatcgacttcttgggacagtgagttcagggggtgcccaggattgctcactggagagccctgggagtcaggggagtgaaagcttgctcagtgtggtctctggtggagttggcgtctccacacagggagagcaaacccctcaggatccaagcaccttctctcttgcttctaataactccttgccaagtgttgctctggctccatgtctgggaagtgagacttgttccaggcctggatctcccaagcagggcagactgagcctagagcaagtgtgtacagagaccgtttacctcaacaagtgcatcaacaattttaagaatgttctaagagagaaaagactaaggcagaaaaaacttctgcatgagctagtacagaaggcaaaccgtctctcagtagaagacatacactcaggtattctgagtcactatttaacagggtcccwgctggctaaagtatgacctccatctggccagcatgagacctggtgtggtggccagtttaataaggtgttggttgacgtccatagcttgaatcaggctaaattactcaagtagagagcttaagctaatcctgtgggaattggagtgaaagatggttctcaagcaagaggaagcttgaattggagttaaagagggttctcaagcaagaggaagccgtccttatcttccagtctcttgttgtggtgctatacctgttcaaaagagggaggagcatctggagcagaagtagtttgcagctgcagagcttttaggatatcagatgtaaagaaggggtgggagtgagaggcaggagttggggatgacacatatttgctcacaggcactagaagggctgagaaagaatcctgtgttgcatttaaaaattcttctctgtggatttgttgctgagataagattgccatttccccagtagctgatggggcttctctcataggcccctgtgggaatttcccctaccccaggtacctgtctcttcctagtacctgacttgctgacacagaaccttatttctgatttggggcatccaggagctgcttatagtgctgacctagccctagagcccaacgttgccctccacaggtcttattccctttcttccatctccccctaaaagctgctcacctgcaagctggcaaatggaatgttttttgactacaggaagtaagagaacatttttctaggcagtttggagatatgtagctttaaaattactcttcccaatcaaaattaaatttatccaaagagcatatgctatattcatccagttttaaatttaaatggggttgtcctcttatgcatataacctgattaatcttcctaaggcaacatctaaattgtgaagcatattgtgttggcaaaggtgtgagggaatatgcacttgtacgttgctggtgggatgggagtatamattggcataatctctaaggaaggtaattggcaaaatttatcaaaattacaaatatatatataccctttaagtcctcaacaccacttacaggaatgtatcctgcagacacattttcacatgtggaagtgacatatggacaaggctatttttgaagcatagcttttaatagcaaagattaaaaataacctaaaaattcatcaggaattactggttaaataaattattggcacgtccaaacaatgggatatagtactgtgtagctataaaaagaatgtggtagctctttactgaaatggaaagttatctaagatatattgacatacaaaaaaaagcaaagtgcagagcagtatgtataagatgctttcatttgtataaaaagagggaaagaatacaatacacacacttataatgtctgcttgtatatgtatagattatctaatgaaagatatgtaagaaacggatacattgttgcccatggggaaatgtattaggtgaacaaatggaatgggagggagatttttctctgtgtgccttcttttaatttttagaatttgaatcatatgaatataatactaagccataaagttacatttaaaaaatgaaaattacgtcattctcttttcaaatttccctagagctccttcttagaacttatcaaaaagagtctaaattccttcactttgcattcaaggtcactgcaattggtctctagtttatatttccaggcttatctcccattgtcccaccataagtctttcaaaaggaagctttgctgtcatacaaatttgccttgcactttctattcttaatacattcatatatacatgcttccttctaacataaaatgctatgtttgccatttcaacctagcagaatttacctattcttcaacatatatcacctcttccaggaagctttctgaggcagtaatttctcagctgtgagggatttctctgtcttcataactttgcagcctctttttcttcttcccaggcaatgagaaattatttcagcacagcaacaatagaaacaacaaatatcaaagcaatacttcttacaagctctttaaatattggtgggagctgatgttagcatgagcaccaatgatgaggacacttgtgtctaactcttcagcttgcagagtttcctttctgggctgcatccttctaggcaatgcagaaacttgtggtgccatggtaggcaggtggtagtagcagcagtcttgatgaatagaaggaggttttctaaagcaccaataagaaagcaagtcacagttctgggtcctatccaagactcagtactcagtctggcctgagggctgcagacagaatcatggacagggtgctccagcactcccttgcatagagcaggacaagcacacaggccagactctcaccaacatagacttcactggagcagtcccctaacctagtaaactgattcagtatcacagagactaccagcataacgaagcttttgaaaactctgctttctttactgttctgcttgggatcttttaggccctaagcttactagttgtagcttatgattaatttgagttagttttcatcttttttttcttggtatgtgccaggtactgttttaagtactctcatgtgcattgtataaaattcaattcttttattcctgtcactccaccaaaatagctttgatcagggccattagatgtccaccatattgccaaactaatggttcattttcagtcttctttttatcagtcagcaatttgacacagttgatgatcactttcctctttttattataacagctttattgagttataattcatgtgccataaaattcaccttaaagtcccttaaaaagtattgaatcgaatggtttttagtttattcatagttaygcagacatcatcaccatctaatttcagaacatttccatcaccccataagaaacctcttacccattggcagtcactccccacttctctttgcccccagcctctggcaaccattaatttacttcctgtttctatgaatttgcctattatgtacatttcatataaatgggtttataaaatatgtgcccttttgtgtctggcatgatgtttttaaggatgctgtagcatgtatcagtacttcatttctttttctggctgaacaatatttattgatggacattttttaaatccatcagttggcggacatttgagttattattaccacttcttgcttattatgaataatgctgctatgaacatttgtatacaagtttttctatggaactatattttcaattctcttgggtatttacctagaagtaaaattgctgggtcatatggtaattctgtttaccatttgaggaactgccagactgttttccaaagtcattgcagtatttacattcccacccgtaacatatgaaggttctaatttctctacatccttggcaacacttgttattatcttttttattatagccatcctagtggatatgaagtggtgtctcattgtggttttgatttgtgtttctctagtgactaatgatgttgagcatcttttcatgtgctcatcagccatttttctatcttctttggagtaatgtctatttaagccttggaccacttttaaattgaggttttttttcgttttgtttttgagctgtaagaattctttatatattctggatataagtcccttatcagatatattatttgtaaatattttctctcattctgtgggttgtcttttcactttcttgacagtgtcctttgaagcatacatttttttattgtttttttttttttttttaaattctattggccaggtctgttggctcatgtctgtaatcccagcactttgggagaccgaggcgagaggatcacttgagctcagaaatttgagaccagcctggccaacatagtgagaccttgtctttactaaaaatcaaaaaacaattttttgtggtaaaatatacataacataaaatgtgttatttaaaccatgttttttctgaatattatgtggaacattttaaccatttaaaaatatatagttccataacatcaagtacattcgtattgttctgcaaccaccgttcatctccagaatgcttctcatcttgcaaaactgaaactctatacctattaaatagtaactcctcatcccatctcaccccagtccctggcaaccactactctactttctgtctctatgaatttgattgmtctaagtacctcatgtaagtggaatcaaataacatttgtccttttatgactggcttattccacttagcgtaatgtcctcaaggttcayctatgttgtaatgtgtcagaatttcactctgaaatttcactctggaatttttaaggctgcatcgtattccattgtacacatgtatcacattttatttatctgttcactcatcaggacacacattgcttccaccttttggctattgtgaacaatgctgctataaacagtggtatacaaatattttttgagtccctgctttcagtcttttggctatgtaccccaaagtggattgatcaaattttatggtaattctaattttttgaagaatcaccataccattttccatggtggctgcaccgttttacrttcccaccatcagggcacaagggttccttccaatttctctacattttcttcaacacttgttattttctgttttgttttttttaagtaatagccattgtaatgggtatgaagtagagcacaaaagttttaaattttggtgaagtgcaatttatccatttttttcttgttttgattgtgcttttggtgtcatagctgagaaatcattggttaatctgaagtcagaaagatttgctcctattttttttatgagttttatagtttttactcctatatttaggtctatgatttttttttttttttttttttgagacggagttttgctctgttgcccaggctggagtgcagtggcgtgatttcggctcacagcaacctccgcctcctgagttcgagcaattcttctgcctcagccttctgagtagactagctgggattacaggcatccaccacgaagcctggttaattttttgtatttttagtagagaggaggtttcaccatgttggccaggctggtctcgaactcctgacctgaagtgatcttcccaccttggcttcccaaagtgctgggattagaggcttgagccaccacgcccagccagttttgagttaatttttgtgcatagtatgaggtaggagtccagctttattcttgtgcatatgggtatctagttgtcccagaatgatttgttgaaaagattattcttttttcattgaatagtcttaccactcttgtcaaaaatcaatgaccataaatgtaagagtttatgtctggactcaattctattctattgatattcagtctgttcttgtgctcaattccttctttttgaaacactttcttcatttggcttccagaacacctctctgtcttggtttcctcctctcccccaacattactggccattccttcttagttatctttgctcttcctctccccaaccttgtagcatcctgggattcaatcttgacttcctatgctcacttcctagatgataatctttcaatcccgagtttcataagcattcccaggtttatatctccaacccaaacatcttccatgaacaccagactccaaatccacgtaacacctccttatggatgtaaataggcatctcatttgacatatccaaagccaaactcctgatccttcttctgaagcccctgccaaacctgcctttcctattgtctttcttacccatgagtggcatctttattcttgcagctattcaggcccaatccatagagtcattcttgactctcccttctctctcacaacctgtattcagtccgttagtaaattccacttcctccacttttaaaaaatatcttgaatcttgccattatctctacctccaccactgtcatccttgtttaagccaccattttctctcatctagattactgcagtggtctcactgctctccctgcttctagaaccttgtccctctacagtctgttctcctcacaacaatcagagtaatccccatagagcatgagtcaggttatatcacctctctgctcaatgatttcctgtctcactcagaatggacaccagcattcttataaaggcctgtagagccctatttgaactggtactttattgcaaatttgctgtttctccacaccaattatgctctcacctcaggctttgcatttgctatatgttcttccgaaaatactttttcccagaactccaaatggcttctttactcatttctttcaagtctgctttgatatcacctatcagtgaggccgccctaacaaccattttttggatttttaataacaactctacctccatcatcagggggcattatctttttcccttatctgaatttttcagccaagttcctatcacatgtgacatagtatattgttatttcttatggaaagcagaccctggaacaagaatgtctgttaggaattttggctttgccacttgctggcatcttgcttaacctctctgatcttcaatttaattatcaaagaagtggaggtaataatggtatttacccagtgtggagttgtgagaaataaatgagcttacccaaataaaatgccagatacaaaataagtgtttgattagtatcagctactgtcatcatcttcatcattgtttattatctgctcctcttactaaaataaaagcttttcaggatcagggagtttgtgtcattcactgccacatcaccagcactgattgagaacagtgcctagtgtgcacattaggttcttttaaaatttttttagttaaaaattttttttgaaagacagagtctcagtctgtcacccaggctggagtgcagtggagtgatcagagctcactgcagccttgatctcctggtctcaatggatcctcccaccccagtctcaagtagctgcactgcacgtgcaggcacatgccaccactacaggcatatgccaccacacccagctatttttttcatgttttgtagagatgggggtctcactttgttacccaggctggtcttgagctcctgacctcaagctatccttcctcctgccttagtctcccaaagtgttgggattataggcatgagccaccatgaccagcccttagtataataggttcttaagaaatgaatccttgcaataaccctgggaggtagttgttcatatacctrtctttttatagttaaggaaatgtaggctcaaataagttgaacgtctcaagtcttttgactctcaataatggagttaagattgtattattgggtatactgaggggagtgctgatgaggaggtatgtcacttccttataaaatggactgtctggaasagtgagagagatcattcttagggggtcarggattttcctgcaaagcagttgttttgtagacatttataacttaacctgcaaactaaatctaagtggaaaaatcctaaggcattttagggagttgggaagcacagaaagtttgattcttaagaaaaaaagttgttttttaatgtttgtccaacgggtaggacaaactgaatagccagtatagcagttcctcagggtctggaaaatggtacagactactggttaagagacttataccttctctggttgggcaagagacacttcttagaatagctgttgttttctaagtcctgaaagttatagttttcttttactacatagaaatgataggcgatgtgctaagccctcaggctacaaaggtgaaataatatataatccttttttctgaagaagtagtataaagtgagaaatattataaaggaagatgtttatacagacaactacaatatatgatactacaaaacagtattaacaacatactgtcttagaagtgtggacatagaatggtggagaccagggcagctagtggagaggcacttaatcctaccttgggaaggaaagcagacagaaatttcacagagtcattagtatttgaactaagtcttagggaatatgcctgagtccacccagtaggctgggtgtgggagggaggtgtgaaaagtctcagatgtgatggagaatgttcagtaagacttgaatacaggacacgtgaggagcggaaggaaagtaagctagaacggtaggggaagtacaaatcttgaagcactttatgtgctacagtaagcaacggggagaattgatgcaattaagcaaagaaaaaaatgcgatcagaatttcgaaatgggaaatgtggagtatggattggagaggagcaagtctagtggcagagagatcagcttggagtctcctgttatagtccagttaagagatgatagtggcagtgtgaaatggaaaggcagcagtggatgccagagatatttaggaggtaaaaagtacagggctgagtgattggatagggacagagtgcagagagggagagatccattgtctgsctggggacaggaggagacgtttagagatggaagatagaagtttagtgtttggatatgttgaatttgaactaagcatgcgatatctaggtgatacacactaagcagtggttaatgtgttgtgataaagtaggtatctgaaggttaggtataactcctttgagaagtggaagagggagctgactaatggaagaagagacttatcaagtgacacagagggcccagttgaagttaaaaatctgcatctagggcggggcgtggtggctcacgcctgtaatcccagcactttgggaggccgaggtgggcggatcacaaggtcaggagatcaagaccatcctggctaacacagtgaaaccctgtaaatacaaaaaattagctgggcatggtggtgggcgcctgtagtcccagctacttgggaggctgaggcaggagaatggtgtgaacccaggaggtggagcttgcagtgagccgagatcgcaccactgcactctagcctgggcaatagagcgagactcygtctcaaaaaaaaaaaaaaaaaaaatctgcatctatttgctctggttctcatctgtacaatggtgggacttgtcaaggcattatgtgttaaataccaatgagaaggatgaatgtaacttaggtgcactaggatggccttattaactcttgcttgggtgggcatcagagaaggcttcccagaactatgcyttggaggaagagttggattttcctctatggaaaggaggtgtgagatgctatttcaggctaatggaacagaatgagtaaataaaaatttggggttttgagtatgtgacgtctttgtgaaacaagacaattagattstaggaatgtatatggggtcaagaaagagggcagaggagaggaatttggggatttgggccagatcatggagagccgtgacggctctgtcaatggattgatttgattttaatctttaggcattatggggaaacctgtggagaacagaaggacacaatcaactttgacatggttgtagaatatatttaagatagtgaagggggagaggtacatttccagtttgagtcatggggtcagttaaaggattgtttgcctaattttcttactcaaaaggaacacattatcctgggggggttgagatgtagatatggaagagatatgtccccattccagggagtgtctttctcatctttcccaccttcctggagctgcactgttttggaggattccttgtcacctagtccaggacaggtgacccattaagtaagcagaaatagcttgaaaaattgggaacctgtgaattcgattcttgaattctcccctctacttgtgatgtgacatcaatgggcctttaaaagagaaaagaaaatggaggggcactaatggaccaaggtgggtggactttccttacagaaggaagcctgtgggcctatccatgtatggcctagaaggcaatgtagtctctgatgaataggaaaggagtaatctctgggctttatttttatcctgttatggcttgatcgggcccttctggaagtgtcagtttcctttagagtattgtcctgggtttgataaataatcagatttgggattgcagtcatggttttatcatctagatcactgtgatttctattaggaaagcagccagtcgatgcccccaggcctgtagccattcagcatcctggtcctggacttaactccaggccctaccctggtccaacttaatttcaggtccgagaaacgggccagagctcattgagtgaatgcatggccaagcctgcattgcaaaatggaaaaggctcagtcaccagggcctttggagtttgaggacttataccagatctagaataagctcacgtggcttctgaggaaggaaatcactctgtgctcagccagcttagatagtctgttggagtggtcattggtaacaaatctggtcttgcaaccttggcagccctgacccttgatgcaggccactttggaaatgggaaaaggatgactggaacccctgggtagattttgtcccttgatttagtttggaacatctccagggatgttccaaactaaaaatcctgggccagcaaatacaggcaggaaggattctggaagccagtcagctgggctctatgaactgcctagttgtcccgaggacctctccctctcttccatgtcccttggagtttagctggcattttctttgggttccctacttataggactgactctactaacctttctgcccttttttctgctctttctctccttgcagaagaaaagcgaggagcccttcaggttgtgcctatgaccctttgggtcgtccttttttgtctatttccctcccctccttcccaagcactgtatgtgtgtgtgtakgtgtgtgtgtgtgtgtacatgcacatgtgcgtgcatgatctgtgcctctgagctttggctcatgcagtctatttttctgaaaagcagtttgtgtgcatgctccttgcttgtgtgtgctcctgcagatatccctggagcacactgcgagaatgtgtgtgcaccagcatgggtgtgcattcaatgtagcatgtgtgtgcttatactcagtttgactcccccagacactgattaccctccttttctcctactcagctcagtgtgtgtccattttctacctgttgctgcaaactctggcatatgctgtaaaaccttggctgagcccagcacgcatgtgtactttgtatttgagagcaggctttgctgcaggcatttcctgcctcttgcctgaggccctaagtgtgaaggtacttgtgctctgaacaggcttcctgacctctctgttgagcacaggcttctgtagccctgttacgtggtttccccaaaccatgtgaatgcatagtatactaatgccctgtgcttgcaagcactggctcttgaagaccatgagggtttgctttgcctgtgatttgggccatagtaaacactgtgaatcctcctcagatgagtttctgcagatcactgaatactctgaagcttatgttctgaagccataagcctaggatccatgctcaccatgtgtttccttcagacacaagttgtgtgtactatgtgtgcaggcttttgcagacatgttgttatcccttctgagcacaggaaatgtgcatgatctgagccaggttctcagactttttgtgactttgtttccttaagcccagtggtttctggcaaatatctcactctggataggaaataagaacctgctgagtacggtggctatttccagagggaaaataagttctggttggtaagatctggggatttagggattggctccccaacactcaacccttaccccttccataagcaaccttagaagacttgcagcttttctgttatttcccacctactgttgtttcttcccacctactgttgtttcttctatactatccccattgtcttttgcttcagccacttctggctgccttttggacctggccctcccattaccaatatcatcctacctatagaaaggataggaggcagatggggtggaatgggggctctggtccgtagggagataggcttgattaaaacatagacaacctaagaggagtcttaaatccaaaattcatgtgagcctattgctgacccaggtaattctccctcacttttccatcaccattagctctgtcctatctgtccctattctcctctgtattgcctcattgttatccataacttctccccactttagctctccaaaacatcactcactgttcaaagctaagcaccttaattctgcctcccttctggagctcatttgctccaggatagttaggaggcagggaagttgttgggagtggaagaaaacaaggaggggcaggaagccccagacctgttagcctgaaaaaagcatgtgctattggacctctggagcactctggcagctttggacctttctgcatgctgcttgaaggatttgcttttgtttattttgttttcttttggtacagaaacctttaaaaggtgatttttgaactgttcccttccttgaattatttggtgtctcaagtttcgacttctcattctagggcctatagaattcactagaatgataatccaagtgtctaatctaccctgggttctcttgttatgtagaatttattaaatagagagaatatacttagtgtcagtgagtcagaggttcaaggcacccaaactaaatccaaccacaaaatgagataggaatccagagagaccaggtctgactctgggacattaagggagtttaggaatatagctggaagaagactggactctatatgaaggtgtccttttgctttagtgaggcctggaagcctaagtaggcccttctcctgtgcttggtttactgctgtctacactaatggctcatataagagtgatatgagttctgccattccagtagacttcagccctgcaaactcagtgagctttgccctatctcctattcaccaaggagacaggtaccactcatttcagcagcctgcttgttgccctgactgatcaggacattggtttagatgtcagacaggctgtcaccacatggtgaatgtgacttacactgctctgggcttgtactctactgctcgctgctcagattacaggcaatctcccatctttcccaggatctaacttgtttcctatctctttttaaagattccagatgatggtgacccctctctgcctcagtggctcccggaagggtaagtaattcactgcaaggtttctgtggattttattcagtatctcttgatgcttttagcttttcccctgggaagcaggggaaccagcttcataagctgcatcctggggaaggaaaaggttccactataggttggttggttctctgaggcagaggagagaactctgctgatggattccttggaggcagaagagggaactttgcagaatggttaccctggtgcaggggagggagctttggggccttctcatccttgcctctataatttctggtccatcttttcatagtggtgaaatactctttaagtagaacaaagaggaaattagaaaaatatctgcatttggaaacattttctttccatttcatttgtttttaatttttgtaggtacatactaggtgtgtctatttatgggttacattagatattttgatacaggcatacagtgtgtaatactcacatcagggtaaatggggtatccatcacttcaagcagttatcctttctttttgttacaatccacttacactcttttcgttattttaaaatgtgcaataaattgttgttgactgtagtcaccctgctgtgctatcaatactagatcttattcattctatccattccattgttgatggtgtggctgattaagttactcctaggcttgatcctgctccagctgttgtgagtcatctacttattccattccactgtagtcaggatataagtaacacccctttctgagctctgtatgttctgtccgtgcttcttgtttgggagtttcagacctgtgtgattgtaccagagtcattttaagctgctcagtgtagcctgtaactgactgttcttaaagagagaagagagttcaagtaccttcycattccccactccttcccacaaataccaccaattagttatctagaccttccttttccctttttcctacaaaggcttctgacatcagaagtctcagtagttgcttcctcttgtggccagggaagaagaaagatcaggtagatgatctactatatttttacatgctcctttcccttgcaatttgtcatctttaaaaaaaaattttttttaacttttgttttaggttcaggggtacatgtrcaggtttgttatatagttaaactcgtgtcacagggatttgttgtacagattatttcatcacccaagtactataacaatagttattttttctgctcctctccctcctcctacccttcaccctcaagtaggcccgtgtctgttgttaccctctttgtgtccatgtgttctcatcatttagctcccacttataagagagaacatgcagtgtttggttttctgttcctgcattagtttgctaagaatagtggcctccagctccagccatgttcctgcaaaggacatgatctcgttcttttttatggccacatagtattctgcggtgtatatgtatcacattttctttatccagtgtgccactgatgggcatttagcttgattccatgtctttgctattgtgaataatgctgcagcgaacatactcatccatctgtctttatggtagaacactgtatattcctttgggtatatacccaataatgggattgttgagtcgaatggttgttctgtttttagttctttgaggaatcaccacactgctttccacaacggttgaactaatttacactcctgccaacagtgtataagtgttctcttttccctgcagctttgtcagtatctgttttttttttttttagtttgtcttcttttaatcaagggtgaatcattgaatgagctacccccttcttcttttattgaaagatcatttatgtttaaaaaaaaaacttcttgccttaagagatacatattgtagtttctagaattagctacaaagttgtggcatcagttgcttcttcagtgatctttagtttttttcttctaataattgkaaaatacacacatgtcaatgggacatatccagactacttctraatgtagctatgtagtagttttctaaatgattccctattgkctttcttccttttctttcaccttcgtccttagaagctgtcctaagtatagaacttccctcagtctggtagtctcattaaaaacaaagcctactgcctatgttcagggagctgtttyattagaaatcagcatattgagtggcctgtttcaactcctggacttgacccaatttgtggttccattctttgcctagatagctacaagtacctactttttctgttgggatatttctgtctttagaccagccgtggtatacagcccagctacccaactttcccaacgtctttgctctcattaaaaccaagtacatgagttctttgcattaaggccagagagttttttgttgcttatccatctcattttatagaagcgtcaccaaggcccaaagtgaagaaggaattttgggagaagacatagtacattaatagaagaactggagttaaaatccaggttatttcagtgtagtttcttttgggtacattttctgtttttattgcatattgttataaaagaacaataaaattaatcagtatagaaaaggtgtaaaagttttagaaatgtccagctgctgtagctgtaatttttctccaggctctgttgatgtgtccatagggctaggccacactcatacagtccctttgctgtttccttcctaaatggtgttttgttttgttttttcttcccttaggtggtcttttggaagtctctcataccacctcccctattacacttgattatgagggctcctttctccatggagaaggcttttcttcaggaggcctaggtagacagaactggtgactcttttactcttggatggagacggtctccttctatgtgccattgtctggtatagtcttactcacctagactcttgccgtagagccaccctgtgggttctgttctagcacagccttggcaagacttatctttggggagcagtgtctttgccctgaatgtggggagaagccctcttgagtgccaattcctaccttgccttatggagcataaaagtgccttcaaataaatagaaatgccttgaactatcactgggataaaagagcctcagttctcagctgaaactgtaagagacactgaggggtcctgtgagaacagattctattgctcactcttccatgactttatttccctgactttctgtctttccttcccgtcctaaaagcacatggtagaggtcagttcatcttcctctggggagagggagagcaaggtgaatggaacactgaacccaccagctaactcaaagcaagactgacggtcctgacatattttcttctctcctcaggccagccggagggctctatggcattgacagcatgccagatttacgcagaaagaagccactgccacttgtcagtgatctggtgagtgaagactcttgtgcaggcataggcagtagccttggggtatcccccattgggccttggcaagctgtcaggattggaagtcgtccatttaatgactcaaattgatctgatgatcaatcatttaaagccttcggagacttagcagtggcttcacagggactgtgttctacctcactccctagtcagagtcctgaatttattagctcaagctcctacctggaatatttgtgacttgggctctcaaagttaggattttgtgtcttcctataggcatctagctcttataggtatctctacagccttctttgatgacctgtaatggaaattgcctccagcccttgacctcttgatcattgagcttggtatgggatgagcatgactggagcttgatgccttcttggaagtcaagcaaaagtctcttctcaagacataggcttttgagactatctctgtaacctagtgtcaggcactgagaggcaatgataaaaatttgtggaattgaattgaaacaggcttaagagttaaagctgatcccagggcctccatcccatcctcccaggatgaccagaagccccattctgggtcataccttctgaggcacaaacaacccaaggaattttctgtagccttgtgggtagttgggggtgaagtgaggtccaggttctctcagagctctaaagctagaaatcgggtgtaaggattcagttaaatgtgaacccttttcccttattaccattttctgtttctgttttcttttttctctctattctatctattgkttttcctaaccacccctcttccctcttccccatttcctgctccactagtttctccctccttagttgaccgaatgaaagtatcatctgccattttctcttcatcatttttcttcccttccattatttcttaccatttgttcatcttctcctttctctctctttctttctttctttttttttttttttatagagacggagtccctgttacccaggctggtctcaaactcccgggctcaagtgatcctcctgcctcagcttcccaaagtgctgggattacaggcgtgagccaccatgcccgactcctcctttctaatgtacctcttcttccactagctcttcatctagctggttgaagataaattctgatgccatgtcttcttcaataccattttcctttccttaatgtctctcatctcctcttttttttcttcctcttcttcctactttttttcctcatcctttctcactgtttgcccatgagcaagtatctagtttatttcttgctatccctctctgtcttttgccctatctttggctttatggcataatactccttagagtaggtgctctaggctttgggtcctggccagtggtctgggttgaagacagtttttagtggacagaagcagagtggattgggaaatgctccctgctttggactatagggaagaacctctcagttgcctctgaaagttttcatgccctttcgagcctttaacatcatgttgttcttttctctgctgtcctctacgcaggctatggtgagtgtctccagagccctttctcatcctctttaaaagtctgcatccctggctggttgcagtggctcatgcctgtaatcccagcactttgggaggctgaggcgggcggatcacaaggtcaggagttcgagactagcctgaccaacatagtgaaacactgtttctactaaaaatacaaaaaaattagccagccgtggtggcgagtacctgtaatctcagctacttgggaggctgaggcaggagaatcgcttgaacccgggaggcggaagttgcaatgagctgagatcgcaccactgcactcctgcctgggcgacagtgcaagactctgtctccaaacaaacaaacaaacaaacaaaatcctcatcccaaatcacttgggcccttcccagctgttcctcctgcttaggctgatattatgacttctgccttctcagcgtcctctgcctttaggaaaccatgtgcctctccaggggctgcccctaaagcttgggcttggcagatacatgggccctgtgcaagagtgtggctagcaaggcagccccagctctcagacttaactctctgggcttggcagatacatggggcccctgtgcaagagtgtggctagcaaggcagccccagctctcagacttaactctctgggcttggcagatacatggggcccctgtgcaagagtgtggctagcaaggcagccccagctctcagacttaactctctgggcttggcagatacatggggcccctgtgcaagagtgtggctagcaaggcagccccagctctcagacttaactctctgggcttggcagatacatgggcccctgtgcaagagtgtggctagcaaggcagccccagctctcagacttaactctctgtgcttggcagatacatggggccctgtgcaagagtgtggctagcaaggcagccccagctctcagacttaactctctgggcttggcagatacatggggcccctgtgcaagagtgtggctagcaaggcagccccagctctcagacttaactctctgggcttggcagatacatgggccctgtgcaagagtgtggctagcaaggcagccccagctctcagacttaactctctgtgcttggcagatacatggggccctgtgcaagagtgtggctagcaaggcagccccagctctcagacttaactctctgggcttggcagatacatggggcccctgtgcaagagtgtggctagcaaggcagccccagctctcagacttaactctctgggcttggcagatacatggggccctgtgcaagagtgtggctagcaaggcagccccagctctcagacttaactctctgtgcttggcagatacatggggccctgtgcaagagtgtggctagcaaggcagccccagctctcagacttaactctctgggcttggcagatacatgggcccctgtgcaagagtgtggctagcaaggcagccccagctctcagacttaactctctgtgcttggcagatacatggggccctgtgcaagagtgtggctagcaaggcagccccagctctcagacttaactctctgggcttggcagatacatggggccctgtgcaagagtgtggctagcaaggcagccccagctctcagacttaactctctgggcttggcagatacatggggcccctgtgcaagagtgtggctagcaaggcagccccagctctcagacttaactctctgggcttggcagatacatggggccctgtgcaagagtgtggctagcaaggcagccccagctctcagacttaactctctgggcttggcagatacatggggcccctgtgcaagagtgtggctagcaaggcagccccagctctcagacttaactctctgggcttggcagatacatggggcccctgtgcaagagtgtggctagcaaggcagccccagctctcagacttaactctctgggcttggcagatacatggggcccctgtgcaagagtgtggctagcaaggcagccccagctctcagacttaactctctgggcttggcagatacatggggccctgtgcaagagtgtggctagcaaggcagccccagctctcagacttaactctctgggcttggcagatacatggggccctgtgcaagagtgtggctagcaaggcagccccagctctcagacttaactctctgggcttggcagatacatggggcccctgtgcaagagtgtggctagcaaggcagccccagctctcagacttaactctctgggcttggcagatacatggggcccctgtgcaagagtgtggctagcaaggcagccccagctctcagacttaactctctgtgcttggcagatacatgggccctgtgcaagagtgtggctagcaaggcagccccagctctcagacttaactctctgggcttggcatatacatcgggccctgtgcaagagtgtggctagcaaggcagccccagctctcagacttaactctctgggcttggcagatacatggggcccctgtgcaagagtgtggctagcaaggcagccccagctctcagacttaactctctgggcttggcagatacatggggccccctatgcaagagtgtggctagcaaggcagccccagctctcagacttaactctctgtcctgcttgatttgactgaggcttcaatgcccttttcacttgccaagtgccctacttgtaggcctgctggcctctgcagccatccagggattatgtgggcttggggaggtgccaaggtatagaggttagcatggaatcatttttctccataatggctcttgaatgtgactctgacagagttgtgtgtctctattattcttaattacctgtttcctactatagttctaagcttttcattttcctttgccttcccataaacaaggagtttctgtggggtaggacactaagaagagtgaaagaaaaagaaactctttggatgatagataccctgaagaaagtgctgttctaacatagttagagcagccccctgagggccttgggttttgcatcttaacctgggacacttgtcacctgttarggcggttgctgtgagtgacaataaaaatagaaagtactgtagtaagctatagtcaagtggctttggtcactgaagctccctcccccrgactttgccagcccttggcagtggtcagggctaacagcagatcttccctgacagtcactggtccagtctcggaaggcaggaatcacttctgcaatggctacacgcacttctcttaaggacgaagagctggtaagtgtcccaagtgctttcgtaagtccactggcctcaggactggtgatcatctctgtagccatgctattaataattgggaattctgggaattcaagagtgctggacacacaytgctgatgaaaaagatagatagcatcaggtgttagttttccacactgggaaagactctaagcaagtctagatcagagagtaagcccaagtctcatgttgaagggtgtgaccactgaactcaaggttttrtgatggacctagtaycttctgttttcttagaaagcgtgaatgctggaacaaggctcggatccagcatcaggtccaacctgtgttggacaaccagaagcacactatattgtgggcctcattctgctatgctgggctctgggctgggccaggatagagcatcttcttcattgccagaggagacacgaaatcaaggtcctgattgtcccacagggtctcagttctggtatctccctgcagaacccaaaagtcatggggaccrggcatgttggcttatgcctgtaatcccagcactttgggaggccaaggcaggtggatcacttgaggtcaggagttcgagacaagcytgaccaacatggtgaaaccctgtctctactaaaaatacaaaaattagctgggcatggtagcatgtgcatgtaatcccagctacttgggggccaaggcaggagaattgcttgaacctgggaggtggaggttgcaatgagccgagatcataccactgcactccagcctgggcaacagagcaagactctgtctcaaaacaaacaaaaaacaaaaatcatgggatggggtatgtgtctttcagaaatcccacgtgtataagaaaaccctgcaggccttaatctaccccatttcgtgcaccactcctcataactttgaggtctggacrgccactaccccaacctactgctatgagtgtgaaggcctgctctggggcattgcccggcagggcatgcgctgcagcgaatgtggagtcaagtgccatgagaagtgccaggatctgctcaatgctgactgcctgcagcgtgagtgccctgcgggatgaggggcggggagtggggcagcaggggctttccaaaatagtctgcagcaaagagctgggatggctgaaccaatcattcccccagtccacctgattctgaaaccctatccatttcagagaaggtaggattctgaatcaaggggcattgcctttccaaataacaggtcttacactaccttcttaagcacctttaggaaaaattctttgagctttctgtggtagtgtagctagaatcttataggattcagttgatcccagagactgagctttgtagtgtatacagcacagcggccttattgtccaaatgacaaaagcatcaggatctgaggctaatgagaggaaagaaatagagttttgtggggttccaggccccacagaggaacctcctaaagcctagaatctaggactcagggaaggcagcattcattacttgtttttagacaatagtgccagaaatagaaatgtcaaatgaatctggtagaggtccaagaggagagtataccagacccccagggccttggctaaatatatgacttgtcctgccatgatggagtggggacaataggagcaggaaaagcaacaagttcttgttagaggaaatggtagcgctcaaagttcatatctccttgctcccctcctgctggccttgcactcactgtggctggaccccaggaaaagcaggggtgaaggaagtgggaaactattttcctgccctccagacctcccaggtattacccacaagccaagctgtagcactgaaagctttaaagattgtgctaggagaagggaaggtcacctctagacccacaagtacttcattatcccaaggacagctatgacatataaaaggggaccagggagaggccttgagcaattattcatggaaaatgtcctttgaagagcctcaaattggtgccaatggcaaggctaggttagacgtgaagagacaggtaggacagagtcagcggaagagatgggctctgaaaagactgcctgaagacaaatgctagtaatgacttggccaaaatccatcatgaaggggtggcaagtgcaggtgccagagggcccttgcttaattgctgagaactagcaaccaggctggctgcatagtttctccactgctctgcagcctctcccaggccccattcctcagctcaacccttggtctggtaggtgacctgttgtgttcctggccaccttcaggggctgcagaaaagagctgtaaacayggagctgaggaccggacccagaacattatcatggccatgaaggaccgcatgaagatccgagagcgaaataagccagagatctttgaagttatccgggacgtcttcacagtgaacaaagctgcccatgtgcagcagatgaaaacagtgaagcagagtgtactggatggcacctccaaatggtcagccaagatcaccattactggtgagcaggccacagtttgaggggacaggaaggcctgggctatggggaggagactggggaagaaacatcctgagcgtgasggagcaagggattagggagaaagaaaaaggaaatcactgggaaggaaaggcytctttattaatcacttctccttacctagaccctggtgccggagaggcaagattgctatctgcaaacaacatgaaccataatacaaggatttgctaacaacctaacgctgtagacttggctaacagtttgatattataagaggtggggggagggggaaggggaagggcaggggaccagggagtagctaaccagtggtttgctaactgggtggggctgaagcatgtatatatcagagggtgtaaagatcaatatagagataagtggtcagttagggcttgggtagggagatgggatgcttgggctttaagggaaaggctggtggcccaggacraagaataaatatggaggaatgggattacggtatctgtgcaaggagcatagactgctctaagatggaaagcatatgagtagtgttgtggggggcttctgaacgactctgaagcctcctatacatgcttgggttgcagtggtgtgtgcccagggcctacaagccaaggacaaaacaggatccagtgacccttacgtgactgtgcaagtcagcaaaactaagaagcgtaccaagaccatttttggaaacttgaatcctgtttgggaggagaagttccatttgtaagtcacagagagctttgtcttacctgggactgtgtgtattgggggagcaggatcacatcctgccattctgggcttgagcttgaagattgggcaaaggcaggggagaaaactcatttctcgcatgcttcgttcagacatcagccattctttctctggttttcttctcatgagctgttgtgtcaggattactgtgcccatgccctgtcttcaccagggctattaaaggggccctagggcaccccatcctgctttttctagcagtagaaagattttactactttactgctcagtgacagaaccagggactgactgccttattgtacctcctacccttgcctaggaaggtacagtagggttaggctctcataaggaaggctcttataaggagtggggagggagtgtccttgtcctaaaactgggtaattctggcttaaaagtggaaatctgggttctgaagaagatgctgtttcccataaagatagtgtttcttcctgcctcagcttctacactcactcatttttttattatctcactttcttacaaactatttcttatgacagtaaaggatggttattgaaaaatggcaaactaatgtctgagaatccacatgctttgtcgctccctaataaggcctagggtcaggattttggatttgaatcagccaagcaggctggctatgtagaggcctccttctgttggctcctcagaagattcagaaagggattaaggccagcgtggtggctcacacctgtaatcccagcactttgggaggctgaggcaggcagatcacctgaggtcaggagttccagaccagactggccaacatggcaaaaccccatctctattaagaatacaaaaataagccaggcatggtggcaggtgcctgtagtcccagcttactcgggaggctgagggaagagaatcccctgaacctgggaggcagacgttgcagtgcaccaagatcatgccactgtactccagcctggtgacagagtgagactccgtctaaaaaaagaaaagaaaaaaaaaagggattaggatatagtaaaattcatctctaatccagagataatattaatagctaccaggagaaacacctgtttgagaatctgaatagttcctgcttgaattcttcttatgactaatttaaaatgaactagctcttggtcatttttgcccacttttagtaaacagtttattaagctcatattctgtacaagacactatacataatacagtgtatccaaaaatgaatagaacaatccctggcttcaagaagctccttgttgatttgtctattatcttctcacagagcagtggttatactgtaatattttaatggaatgtggaaagataacataagaacatagggaaagkaagagcacattttgccagttacaacttttgggtgaaacaacagatcccagaaagcaactgttggagaggagagcttgagacaagacctgggaaaactcctttctccaaagcaaacccgatagacgagatgacaattcaatgggatatgataggctaatatagaagttcaccaagcacatagttaggcagatgagagagttagatagaaagccaaacagttataaccctatgggcctaccatgracatgtctagcacctttactgacttcatgtcctgggctctgaggatggagctagcagttgcttcctggagctccgtggcatgtctagctattttcctcttggtgttgctgatacagctagctgtataggaagtcagaattgacctgaattactcttccctccaccccttgccctttgttctaggacaataagaactgtacagtggtagatagagccacccaggccgaggaatgaagagtcatttgctaggatagcccaactttcttggaacttttgtactgctgtcctctgacttctcctctttcagggcctcaagtgcagctgtcggagcttttgggagggaataggaagtaacaggatttggcgctactgggtctgcccctaacagagcctgcctaattctctcacagtgagtgccacaactcctctgaccgcattaaggtgcgtgtatgggatgaggatgatgacatcaagkcaagagtaaagcaacgcctaaagcgagagtctgatgatttccttggccaaaccatcattgaggttcggaccctaagtggcgagatggacgtctggtacaacttgggtgaggaaactggaccygagaaagttgcttggaagggaaagcatgaaggggacctgggaatagtccttctaccaaaaccaccatctgtccccaaagcatacctctatacagagcctgtctcacctgcaaagaactgactgtggggagggatgggggacagaggagtggcagtggctgtgagtcactctggctgaatgttctctaggtttcagaaggccctttaatcttcatactagtgcttttgtcccccctccacactcctgttctcctacccagctagttcaagggtacttgtggaatatgtggtcactggagtgattcaccctatttggtgagtccttgggttggccccttcttttycttgggttggccccttctcttccttgggttaagccagaatggaactatctatgctgtctagytgcattggtgtcaatctccagtctyctttccttcctagagaagaggacagacaaatcagccgtctcaggggctatccgactacaaatcagtgtggagatcaagggggaggagaaagtagccccataccacgtgcagtatacatgtctccatgaggtgagccagcccttggtaggtgggggatcagaaagcagtgctgggagaggcctttggccataagtaggattgctaggtggttggaatccgaggcccattttaaattttatccttgattcactctgttaccctggagagtccgagtgactgaactcagactgcattctcttccactaatgtgagaacagcctactggggccacaggaggaactgagcaatgactggaaggacagaatttctgtgggaccttgtgcacattcttctgggctttaccaccaagtttgtttttgtytttcatatgtgtttaacccattccctttctctgctctgtctcctgcagaatcttttccattacctcacagacattcagggcagtggaggagtccgcatccctgaagctcgaggagacgatgcctggaaggtgtactttgatgagacagcccaagaaattgtggatgaatttgccatgcgttatggcattgagtccatatatcaggccatgacgtgagtctctgctgcggcaccgggaagtggctactaatcactggggtggctaattaaggcacactgacatggtgggcaggtccttagtgaggtagcatgcagtgattcctttactttcctctctgagctgggtgagatgggtctatgccccaagacaagaagggtatatgtagaaaaagaatgttgtaactcacagaaaaggtatttctgtctgcctcagagttgagggaactctgcagggaaagaggcatgtgagagtatgcaaggacaacctgcctagacatcacaggcctgagcagacagggtatgtgtgctcgtgtacatgtgtttgtgacaaccggtctggcctagactggcctgggggttcaaagagaacactaaactgcagggaaagcagctgtgtatggagttgaccaggactccttgaatgggaattccagattgctatgagaagcagggtagcctttctgtcagtgaggctgcccctagagctgtgtgcagaaagtagccctaggcaagagagggcagcaattgccctggctgtgcttcatttatcccataaacttttagagttcctgcttggcttttgctgcaagccctgaagagtctttgaggctgcgggtgctgtgtttttcaggcactttgcatgtttatcatccaagtacatgtgtcctggtgtgccagcagtgatgagcaccttactggccaacatcaacgcctactaygcccacacaactgcctctaccaatgtctctgcatctgatcgctttgcagcctccaactttggggtaagtatcatgtaaacacatatgtctgcatttgttaccaattaataaagtttgattttttttttttttttttgagacagagtctcgctctgttgcccaggctggagtacagtggcgtggtctcggctcactgcaacttctacctcctgggttcaagcgattctcctttctcagcctcctgagtagctggrattacaggcacccgccaccacgcccggataatttttgtgcttttagtagagatgggggttttgccatgttggccaggctggtctggaactcctgacctcaggtgatccactcacctcggcctcccaaagggctgggattacaggcttgagccaccgtgcccagccaagtttgatttttcttggctggtcctatagagttacttgatgtgcttaaaattcagatagctaccattttgatagatgaatcttgtttcctgtttccttatgggtatgcggrctatactaatagcctctcctcacacacagataaagaagagaaggtggttgggggtggtaccacctgggcttggccagaacccctctgggccaacaacttggttgaattacgatagtcttccatattcttcagtcttgcaggtccacaaatggatttttaaaaatcttgttcagtctgtctgtgatggattcatattacttgagttgatatgagactgatgtctaagcaatgatgccagtgtgcacttgaacctgttccttttctagtgtccagactgttttccctatccagggtgtgcccttcctgggttaaggtacctgagaagttgagtcattactcagaatgtcacctgacattaattcagtataaactagataaaataattctgacccaacacaaaaattaccattttgggcataaagttactgatatcaccccaattcactgagtctatgaaatctgacttttttgtactaatgaattttttgttgttgatagagcctttctgtagatgtgtaacttattaagccagtcaaatatttgttccattttgcctcatctcattatgtattgacttaatcaacatctactcatataatcaatatatgagttctaggagtgggatgccaacatcctgcaggcatatgattccacgtttaattatactttttctatgaaaatcagctattaaaatagtatatgttagatattttaacatttaaaaagtatacacttgggaaatgtgtgtggaatgtggtttaaagagagaccccttcctgcctgtcctgttatctttcatatgcatcagattctccctcctatcatcactgctaggctgtggctgtataactgttatgcactaccccgagataagtcaggagacctcagactcaagagagaatgtgtttggagtttcttcttatctaactaagataagttacagtcccaaaggtatagagatgcactggtcatgccctattgactctcatatagaaggagccatttctccccccagggacttggctttttccttgtcagtgtgagatttcccagattgggacagagctgcaaagagatagaacagggactttctatctcattttttccgttacactgtttgttgttcttcccatgggcagggatgtgtctccaacccaatgcctcccgactctttctactcatccaggggtggttctgtttctgttatagtttaggggactcagacacargttctctttttcttcccctttatttgtttctcaccctcagaaagagagatttgtaaaactgctggaccagctacacaactcactgaggatcgacctctctacatacagggtgagtgaagacacggctgtgggcaggataatagatatyaagcacggtcccagagagactgtaggccaatcttggctataaagattgaggycagggaaaactggtctgtgtcatcacatccacccaaatggccaatgctactgacacctgtggttcttttaactccagggaccatgtggtgtataaatagcagcaggtatggttagtttttatagacagttgtctttccaacctcattcttaacactctactaaactctctggtgacattctcattagggagtttcctgaggataatctcttccaggagtatccttttaaaaaattagatacctaattacatttcttttttgcatttttccatactctcctcgttttccagcggaggtgtgagaatctggctaggggacagagagtagcttggcttttgcaagtaatctgtatcagagagcatgtccattcctagtataaagggaggaaataggtatagtaggaggatggttactgggacgggacaggataaggaaatgggcagtttcttagttcctcctatgttagatcttagaaatggcttcattacttgctttaaagtgtgtgaattttcagaacaggcaatatatgcacattaaaaagtaagtataaaaacaaccttaaagtcaaaaagaaatgaggttttaattgtctgcactcaagtgccctccatttgcacaaataatggacagctgactgtatatcttatatttggcatataagtagccatttgaaggtttaaaaactgaccattaatgtgaagacaggctcagcatctcccttcagctcttcatagcagctccctcctaagactcgtgccaaagtgaatgaagtaaggatggctggaaattcctaaggaactcactccaaaagcagttctgctcagagatctgccatctgctggctgcagaacagtagaagagctgggttctattgtacaaaaagtacaggtcctggacctcagtttggtctgtagtgtggctccacttatattccaggatatacagttagattgtaaytttcgaagaactcactgttggtgtgtaagaatcttcatccaagaaaaaagcatgtgtgtaagtttgtgtgtgcctgtgtgttcctttgtacaagtgcttatacattgcatgggaagtagggctggaggaggatgtgtcactttctagggtggggagtattaacccctgcttttggcaagagcctgtttgcatcaatagaaaaaagagaaggagacctgtaactttacagtgttttyggccagctcaactagagaaaaacccagtaggtaacaattagggaagcttttgatatcatcacttttggcagggaaggttttcatagtcctctgttcctttcttacatttgcttgatttgcaacagaataatttccctgctgggagtcctgaacggcttcaggacttaaaatccacagtggatttgctgaccagcattactttcttcagaatgaaggtaagaaatggactggggcttgggtggtgctgggctggagacctggctacargaacgtgaagaatgagaatcaytgggcagagtctgaggctacaggattcatcacctctaagcttacatttctgtgtacctgttccctgggttacttctgagagagcacatagactatggatccatgaggatggggtggaagttttccctgtcaactatcctggcaatttcatcacagggaaaagtctagggacccagacagggatgaaagaatctagagtaggtttggggtagtgctaggagaatatcccacccaggtgagmaggtccttgggcccatatttcttcttttaattggcaggtacaagaactgcaaagccctccaagagccagccaggtggtaaaggattgtgtgaaggcctgtttgaactccacatatgaatatatcttcaacaactgccacgacttatacagccgccagtaccagctggtaagaggttcaggatcaggtggggccagctgtcagtggctctttggagcctcagttttccttcatgatggtggtggaaaagcactcaggacaaagtacttgatgttctcaagggtgagtgagttgtggagtatgaaccatgtggaccatgtgagatatgtggatggaaagagacccctgggcaagatgagacatacctgaattgaacagaaatggcaacaataatgatgttgaagaaagtaaacctaaattcatgcacagttcaggggttgagtaggggaattctcagtccatcccagagtctttttttctccctcaagtttaactttattctgactcttgcagactcttgtaagttctgggcttccttcctctgagatctgaagtggtctctgagctgctggctcctggaagctttacttttccctctaattacttctctctgaaatgtgtggttcttctgggttgtattcatccactggctatcaagactgaccctatccttctgtgaggctgagctacttcacctgttttagcctggcaccctaagtcagtacctggtgacttagtacattttcccagatccttctaatagtgtccccgatccatgctcccaacttatttgaaagccagaacttacttctagctccaattactcaattacagttccaatcttaggagtttcttgctgaccatacatttgcagagtggattcccttcagtccaacaaatattgaatgtttgttctaggccaggtctgaggagagcacagtgctccttcagtaagtttgcagtctcataaacatatatataactctaatcaaaagagtctgtttgaagggccttgaaaaagggataagattaaaggaattccarggaggaagagtcttttcgcactcttgatcagataccaggaaaagctacataaaacaaggaacatttgagatagaccttaaaaggcagtgggatttggacaaccaatgatggcaggacaacctaaatgtcttggacatttatctttaagtaactacatccaatttgtaaagcttcctaggaacaccctcataaagactaagatcttgttcctactgcctcttctcattcccaagtgtactttctgtgccagccatgtatttaaggcttcttccttttaaggtttctaaagcctcctgttgattctgaaatccatgggaggttttcctgaggcctttgttttacttgatacattctaggctcctctgtcatctgtctatgaagtctctggttgaggaaagacactgttctcataaactattcagggatactctttagcctttgtattttagtatctgctttttactttctctcaatttcattttttccttattccatatttacactggcataaactcttgatgtcttttaaaatttccatctgttgaccttcagtcattggtttattcgtccattcatttacttaacagagcattagagacataaagttgagtaagagacatttcagcctttggggatctcatggtttagtggaggtcagggcaaattactacatttattgtttttttgttgttgttattttgttgttactatgttttattgtagttgtagttttctgatacatctacaccaaaggttcacagagggtgctgtgggagcccagaccaaggatgtcaggaaaatctctcagaagaggcaaagttcaatctgaattttgaggaaggagtaggaattaactaaagaaaggggctggagggaaggggcataccacagagagaatagaatgcttggaggcacagaattatgtatgagcttgttaatttaaagaaatataagcaggccgggcgcaatggctcaagcctgtaatcctaacactttgggaagccggggcgggtggatcacttgaggtcaggagtttgaaactagcctggccaatatggtgaaaccctgtctctactaaaaatacaaaaattaggcaggcatgatggtgggtgcttggaatcccagctacttgggaagttgaggcaggagaattgcttgaacccaggaggcagaggttgcagtgagctgagatcgtgctgctgcactccagcctgggcgacagagtgagactccgtctcaaaaaaaaagacaaaataaaaataagataaagaagtatagcaatttagggtacttacggcatccagctgtgggattcagctatctgggatcaaatcttagttctgctctttaaaactgcatgactttggacaagtcatgtaaccttgctgcccttcactctcctcatctgtaaatgaaggtgataataatttctactaaatggagttgttgtgaggattagataggataatgtgtgtaaaggtcttagcagagtgtgcggcacataataagcagtaaataagtggtggtggtgtggtaatagctggaacaaaaagagttgtaaggtatgaggttgagagtcatattctggaaggtgtaaactaaggaatttaaactgtattgaacgccgttgaagggctttaagcagaggagtaacacattgagattttctttgtagaaagatcacgatagctgcaaggaggagggattggattgaagatcaaagaccagttcagaaatccttgaatgataagagcctgagccaggacagtgacagaaaaataaaaggaagagatgtatttaagttatattaaagattctgtcctggtttctaggaacttcttgataatgcaggcttattaaggactgtggaagctttccagtgacatatgacatcccacataaaggccctgttcctgtccttctgggcagctccaccttcacctttgacttagtgggagataatgtgtgttccaccctccctgtggtgactcctacttcacttttctgggctgtgaatatagagtgatttctctttacctgaaagtcaccattgtattcccttgcctcttcccaagtaaggccctatcttatctagttaggcagatagcttcctagatgcagttcttccccctaataacttcaggggatcaagggaagtcctactccactgaaaggctgaaatgcgcaccagatctgttcagtagctcctgcagaagttgaaagagcttctcagagctgagatgtgtatgtgtgtggtcgtggtgtgctgtcagtagaggaataccaccagaagaggagggctgcctgcctgtaggggccgcatagaagtagacctatttagtaaggctggaggggctgtttcctttagccagcgagttactctgcccatagcaactgagagaaggaaggaggatgggcatccttatgtctcttggactgaccaagtttatcagagagaacttctcagcgataggctccctgtgttcagggatctcacaatagtcactcttacagaacagggatagtcttgtggaagacaggctctaggagaggaaaggtccttgattctagaggaagaggtataggaaggggaagagaaagaggatcgttggagacaccctctacattctactctgactctttctccctctctctcactgtgtcctctggatcaagaagcaggagctacctccagaggaacaagggcccagcattcggaacctggatttctggcccaagctcatcacactcatcgtgtcaatcatagaggaagataagaattcctacacacctgttctgaaccagtgagtatcaccctctttggccctgtctgttggtggttggtctgtccatctgtctaacaacctctttctttcctgtctctgtatgtttgcagtgccacctcttcttcctgtccatccatctgtccctctgtcccttgtatctgtctgggtaactgtttctggagacaggtgtggaaacataatgggggtccctggccagattgagccagcttccctggagtgagagacttctgggactgggactgccataggagccccaggggatccagagaccatgtgtgtatgtgtctgtccactgtgaatgaagtgggccttcttatagcccacccccacttgccctttctcctccagcttatttagcctgcgcctgctttccagcctctgcctggagagtctctacctctcaattccctgccttctgggcatcttctgcccccaggcccatcttgcctatggggatcccttctgccctcacttgtcctgccactggcccctggcccctgggccccttttctccagattggacctagccctgttccctaagcatctcctctctccaatatgacttccaagaactaggcactttagccttgaaatgaatcaaatcaaatggctcttgccttattctctgactgtggtttcttctgtcatccaggtttcctcaggagttgaatgtgggaaaagtcagcgcagaagtgatgtggcatttgtttgcccaagacatgaaatatgcattggagggtaaggatctgttcaaatcagtgggctgccaggctcctagcccaagctcctcgttcactgtccctttcctcttctagacaactacaagttctgggtgagtggtatagtgagaaactaaaggaattctaggcctagtgggatgtaggccccgggagaccttgggtgggcaaagttgcagccaaaggacatatgaaaatggctgtgtggatgtagcttcctccttccagctttggagcaactgcctgttcaagaccttcccagcccagagatgaaattctcccatggtgggtgttcttaggtggcccacttcctggagaatggtcttgggaaacttcagttttaaagaatcagagaaccttaaatacacagatagatgtaattgttttcttatgttggggactctctggcctggcttttcttgcaagctgctctggattagtatgacaatgccaggaagatacttcttccctcacttctcctatagagcagggccacaggcaaattattattcatcttactcattcagcttgttcttttattcatttcctaccttggtccacaaagatatcattccatacctgtattagaccttcctatctgtacccatctgtactcacctatttagcagcgtttcctgccattttatgtgtggtagtctctctactcagtctgtgaaagcccatctaggaggaggaggagccatctgggcaaggacaaagcagagtctggatctgttatttgggtgggatggcagggcagatgagccaccctcagatgcttgaatgtgtgaggtttagaatcagtgagtcttgagattgaaagaaaccttgaagatctgtgttacatttgagccagccacagactacacgcatacattctgtaacacaagcccagagcagggctgcctgctgtcaggccagggaggaggtcattggtctctccctccagatgccacttagtgagcctgatggggagtacagtctcagttcttgaagaactctggctccagtgggtttgggggaaaagagaaaacacctgtgaaaagtgaatcaactccacaagagaagtagtgtgaggtggggcagaggttttcaaacagaagtatcttaggagctaagttgaaggggaaacccagaggctaggctccaggcctcttgcatgatgacagctcagccagccctgcatttatcaatcttacatggaattctagctgagatttcttttgaaaggggagttctgctaatgtttaaaacaaacacaaaaggattgaaaacttctactttaagagaaagaattaatgttggcctgatttcatacctcaatttcaccgcctatgtagcactgtgaatttggtccaaactacttaatttttatgagctcccattttctcatctgtaaaatgggagtgatgatagcatctgtttctttgaactgatgaagtactgagatgtatttagcatactgcctggcacttactcagcactgactaaatcttagttcttaagaacaataagaaaccattgcaggctcttgagcagagatgcaatgtgaagccagcagtattttaataagatctacctcagtgggagatgagggcagctagaatagggagagactagaatcagagaacgcagataatgaagagctgttgtaataatttagggatagagggtgctgggattagagaagggaagtggagagaggagaatgggctttgatagacattggaaggaagccagaacaggacttcgtgattgtcagaatatggagggcaagagaaggggaggagttttgggggcctggatgataggagagtggcattgactctgactaaaccaaacaccgcatattctcactcataggtgggaattgagcaatgagaacacatggacacaggaaggggaacatcacactctggggactgtggtggggtagggggaggggggagggatagcattgggagatatacctaatgctagatgacaagttagtgggtgcagtgcaccagcatggcacatgtatacatatgtaactaacctgcacattgtgcacatgtaccctaaaacttaaagtataataaaaaataaaataaaataaagaaaagggtgaaacattaaaaaaaagaaaagaaaagaaaatgctgtccgtcaccaaatattttgtaagtcaacattattaaggtatcatttatagacaatacaataagaccactttaagaatacaatttaatgagttttgacaaataagcccaactgtgtaacaactctcccaattaaaatatgaaacaaaagttccttcttgccactttgcagtaaatccccactccattcaccaaatgtttattgaatattttctctgtgcctggctctgtgctggttattggaacccaatgagatgaacaaggcatagcaccatcccttaagaaactcacagagcagtctagaaaacagtcgtataaattggtagttacaacacaaagttataatgccacaagaggagtaagtatagggtgctgagagcacacaggagaaccatgtaacccagattctgaggacctgggaaggcttcctggaggaggtgatgtacaagccgaaacctgaagggtaataagatttagccaggagggtggtagtgacaagaaagggagacacagaacatttcaagcagaggctacagcatgtccaagacctggggtctagagagagctggcatgcttggagaactggaagcagcagttcagtgtgactagcacttcagagggtaggggaagagataagtaagacctgaagatggagaggtgtgacggagtcagatcgtgaaggaggttgtaagccatgcataggcttttggactctctctctttttttttttttttttttttgagtctctctgtgtcacccaggctggagtgcagtgggctgattttggctcactgcaacctccgcctcctggattcaagcgattctcatgcctcagccacccgagtagctgggattacaagcgtgtgccaccacacccagctaatttttgtatttttagtagagacggggtttcaccatgttggccagtctggtcttgaaccctagcctcaagtgatccacccccctcagcctcccaaagtgctgggattacaggtgtgagccaatgcatccagctgacttttggactctatcttgaggtagctgggagccactgacatatgtcaagcaagggattgacatgatcagattattatgtagaaaggccagtcgctctgtctacagtgtggagagtggattgggaggcagaatgaccagtctggaggctattatagtaatccaggttacagatgggggtaatgagacctaggcaggtaatagcgtggctagaaggaatggatagattccagagacatttggaggtgaaatcaggggctggcgatttaactgggtatgaataaagaggtagaaagaagatttgaggatgatgctcagcattgaacaagagggtaagattagttggtgtactctgttccacttcagctggagattttaagatagtgagagacaggggcaagttaaatctaggcatgatgaaatgttccatccgaagcttatataggccaggcrtgggggctcacgcctgtaatcccagcactttatgggcctgaggcgggtggatcacctgagttcaggagttcatgaccagcctggccaacatggtgaaaccccaactctactaaaaatacaaacattagccaggtgtgctggcacatgtctgtaatcccagctactcaggagcctgaggcaggagaattgcttgaacccaggaggcagaggttgcagtgagcagagatagcaccactgcactccaccctgggtgacagagcgagactccatctcaaaaaaaataagaagtttatatagacgttaccagaaccaaagagagattagggggagataccagcaaactgggtagttgaaatcatgaggttggaagagctctccaggaggaaaggagggagttaggtggaagtcaggggcaggaggttatggattggcctttctgacagattaccccacctcaaacaactttactggagcatgactccatgggacttgttagaatagtttaaagtgtgaccggtgtttcagaacttgtcagttagtttttataccagagaagttaatacagaaattagggataggggccagagtgcagataataaattgacagagaaagtgaaaattatatgtagaaacagtaacttgaaggtccctaaaagaaagagttagggagttatggagtgatgggcagtcctgcttgaaaaggaaggaggagggccctcctgatgtttctaggttcttagactggttccagaacagcaggggatgggggtggaggagaggggctctcttttgatgtccctgagggtctctctgatgtccctgattttttcactctctttgttgctcattggtgtctgctctgtcacaagcaaccactgtcattcatatacgaaaagtcctctttctgggtggtaagaacatttagttgtccttttgcctctagtcttacaccttttycctcttctcctgctcactgcttcatagaagagactgcaaatgcaactttaggttgagacagtgctgcctgcagtgccagggaatgaaattcctgggacttgaagccctttgaggcagaatcccgggcttccatttcctccttcagtgtctgctacactagttcacaagggccagctgccccagcctggatgttccgccttgacttggaggagcatcacccatggcaactcaaagttgagcaacaaagtccccaaggacagtggccttctcttctctgctgcttagtcctctcccacatttgcttgcttttaccattatgttgatgtgtcagcatacaattgatttttattattcaaattagtgcttcaactatgaagcgggtagatgaagagaacctatgggtgtggccagtgctccagactctgagcaaattgtgagttatctttgtcttagattttccagaaggctctggagattcagcaagatgacttttcaaattcgtagtaagtgccccattttctgcagcatgatatgtcctttcatctggctgtgtttccatagtttccaaactgactattcatatttgcatacttccctgagaattcattttttcaatgtctcagctctgccctggagcccttcagtttgcctcaagattccattacaccatggctgcccaactgctctgtcaacttgggcccagtttgattttccctgtctctgtagttgtcactgacccattcatgccatgtacacctgctcatctctgcctttaagcctgtctgaaggatgactcagctactgtgatcagaaaggccctggaaaaccattgtcctctacagtcatgggcagtctccctactaatcagcatcagcacccatggccctttctcctcttctacaccagaggccagatgctagaacaaaaagaccacttccaaacgctagagcaaaaagactgcaggctttatctgggagtctggcttagtctttctagaggaagatttgggccaagcttgtggagagttgctgagcagaacactgttggggagagatggctgtgagaaggaggttgggagtcacccttgtcctaagacatctgatggagctgcctgaccagatctgctgccttgggaaggctcaggaaccatggcctctactgctgggacctgacccaacctttctccctaccactagagcatgagaaagaccacctgtgtaaaagtgctgactacatgaacctgcacttcaaggtgaagtggctccacaatgaatacgtgcgggatctgcctgtcctccaggggcaggtgcctgagtacccagcgtgagtcatcatgtgggcactacagagggaagggagccctctgggtgggcagggctagtatccccaattcatttcagcaagccagtctcggggactgcctgttcaggtaccaccgtagacaaagaaaagtgttaaactgtgccctgccatcccgaggaccccagtctggtggagctgtcaggaagtggcgtattcccaccgctagttctaagcccctgttctcctgctgtggctgcaggtggtttgagcagttcgtgctacaatggctggatgagaatgaggatgtatccctggaattcctgcgtggggccctggaacgagataagaaggatggagtaagtcaggggctttggctgcaccgggttcaggccaggtctcccagcaattagctattggcagaagttcctgggctttggccaggatggctatgcctgccctgtggagttcacaggagggctgttgagggccattagccactcttgctggtcagagccttttcaaactctacaagcttgggaaaagatagcagctgtggatggtgaccctgtgtgtggtcttccttagttscagcagacatcagagcatgcactcttttcctgctctgtggtggatgtcttcacacaactcaatcagagctttgagatcatccggaagctggaatgcccagaccccagcatccttgcccactacatgaggaggtttgctaaggtgaccataactcttcctactccctcccccttaccaccaccacactcacagtctcatcacaggcctgagctcagcacctctccactgtggcctcctggtaaagctcgtgtgacccccattctcctttgctggtttctggggcagacagatggttctgtcttagtgctgttctgtggttgagagagagctttctcctgtactgtgggattccccctttacctccctgttgttattgttctgtgatgagaagtgccacctcaggcaagatccccatagaagagctaagagttccctttccttttctttcctttctcctcttctcagaccatcgggaaggtgctgatgcagtatgcagacatcttgtcaaaggacttcccagcctattgcacaaaggagaaactggtaggttcaggccctgggactcttacagaaagagagtggaagacatttgaatccttgcttttgaagctgtcctcagaattgagggttggggtgacactcctgwwgcctgattcccaccatggctttgcttcagatccatgccacaaaattacgagaacttgacagagttcctgtgagtctcatttggtacattatcctctgctaagctagacctttgcttagtcttttttttaatatatatataaaaactttagatattcagaaagttataaaggataatacattaatacttgagtacctaccacccagcttaaaaatgaaaacatttgcttttagtcaaggagaattatctgaactggccccagctcttagtgctgagggagaaacctatgtcatatgtgaagtccctgtggcttttgtgagagagggagggaacctaggctaatgggtcctatgctgaaagragccaagactcaacagctacatctgtccccaaagccctgcatcctgatgaacaacgtgcagcaactgagggtccagctggagaaaatgtttgaggccatgggaggcaaggaggtaggtcttagggtttgggagtcactgtattttccctttattcctgagctccttggccatagaactccaccctctcttaactaggtgtaggccaggaatttagcttggggtctgggctggyttaatctgaggtaggcattcgggtaaggccctgcgagggaggaataggcactggggtaagccctgcaaggaagtagtaggggtgtggcagggtagaagagggtaagaaaagcagcctagccaggcttacctcctgtgaatacagctggaccttgaagctgcagacagtctgaaggagctgcaggtgaaactgaatacggttctggatgagctcagcatggtgtttggaaacaggtcagtgaccccacaatacaaggccctcagagccagatgtggtccctagccaatcccagagcccttgccccacacctctccatatagctgcaggtgtgtggatcttccctgtactcctgctgactgtccctgctggaaatgcaccatgagcatatgggaatgggaccaaatagctggtgccgctccagggacagtgtgtgtttggggagggaaaggctacactgcgggcacatgtgtagtttccaggtacggattgatgaktgtgttcgacaaatggccgacatcctgggccaggttcggggcacagggaatgcatctccagacgccagggcctcagcggctcaggatgcagatagcgtactccggcctctcatggacttcctggatggcaagtgagtacagcattcaggactatcctgtggggatgagcaaagcagatgctatcgggcaagggagccccttggggagaggggttctcaaactctcaccctggtctcacctgttgcctggacttgcagcctcaccctctttgccactgtgtgtgagaagacggttctgaagcgtgtactgaaggagctctggcgcgtggtgatgaacacaatggagaggatgattgttctgcccccactcactgaccagacggtaaggacacctccttccacttcctcctgctgtctcccttcccctcactccctgcttcctgatggagttggggtcctctgcttttgactgattccctctctgcccagggcacccagctgatcttcactgctgccaaggagctgagccatctttccaaactcaaggtactctgggtgtggggtcctcctggcaggtgtggtccttctgaagtcatggagagagggtggctgcggggaaggaaattggagctttggagactgaagaggaaaaggaggagatgaatatgcactgggggctggcaggtgggtgcaagactttcatgactgctgtgagctgtcctgatgctgctgatttctctgaacaggatcacatggtacgagaggaaacacggaatctcactccaaagcagtgtgcagtccttgacctcgccctggacaccatcaaggtggaggccccccctttttcagacagtcttaaccaccacactcacttggccctggcattccactctcccagaccaggtgtccctccaattcttaacactccacatccagaagagagttactatgtactgccaaggatacagaatcagatatggttcctaaattcaagatgcttatcattggtaaggtgatataaggcaggaacatatgaactgtgcttcaaggcacctgggagaggtatgtcataggtctcaagttctctaaggttcagatgggtaaaagagcacttttggttcttctccgtgcctgaagtgtttctattccatttctgtgcctgtccagaaagacccatccttcaaacactgccgtacctccaggaatgtggccatcccctactaatcctgccaaatacccaaataatactcatccaagagcctatgctctggttctgtgggtgttcctgaacagcctattctcacagtcctcttcttgcttctctgaggacaatgttggggagctgctttctgtaaggggatgaagcagtcacrggtgctcttttatcttgcagcaatacttccatgcaggaggcaatgggctgaagaaaaccttcctggagaagagcccagatctgcagtctctacgctatgccctgtctctgtacacacagactactgacactctcatcaagacctttgtgcgctcgcagaccacccaaggtaaggccctgagggctttgggtatccacctctcctctctgatacacatcttcccctagggagtctgtatcttcatgcccttgggagcagatccagttacttcttcagagagcccttcaaattcagatctctattgcttgatgggacctcagtacttacctccaccccatacccattaccaggcaggagaatcacagaggcctgggaaatatgtctaagatttcttttcccagacattgcctggcccatgcatgtttattaaactcaaggaatataccctgactggtaagcggcaagaatgaaaaatctgtgaggaagccttgagaatgaatggaagccatgagaaatgtgaaggctcatagtgtgtggagctttgctgggagttgttctggggagagaaggcaaaagactttccagactctgcagcatggatagggagacaaggaagagaggcaaaccatggcagctgctgaagggagggtgtggatcctggggccctgtgcacagctgaggctccagtctcaggggtgctgtttatgcacaggggacccaggaagccggttttctcccagtgactttcagtcctcagaacccctccctacctccagcatggcctgtccaaaacaaaacacatctgcatagatgtagctcaggttgaaattctgacgctggagcagagccctcccaggaggcacctcaggcacatttgttactgcttgttccaaggaaacctgagcaggctgcctgggggagtgaacctggtgggggaagttggcgcttaggcattactgagctgtgtgtgaatctggggcacagggctgacctagaggggagagggctctaagcaggtagactggtgatggaaagtaagaaaatggaagggaccgaaagtactgctctattccccatctgttctcatttccaatccagggagggaagaatagagagcaaaagaagagctgtgagtctcacttaagtggacaggtagaacttttacagagctgggtacatgttcaggcatacaccatcaaggaagatctgagttaatccagaaaggctttttagaagcattgagctttaagcttgataaaagatgaggagagcctggaatgagcacacatatgatgagagcagggttggcaactgcgggaagaatccatgtgtatgcgtgtgcattttctacccgttgctttatcatttaagggtctaggaaattaaagcctacagcctgtctcttgtcctgcttgtctcagatacctcctctctgtatttttctactgtttctgcccatgatttggttggtctctgacccatgaagtctaatttggagcattcacacactgactgcagctctttcacttctttctccactctgccccacctctgtgctccctcagaatatgtgtagagctgctttgaatggctgttaactccttagactgctaacggattcttctttctctgttctgctgctgctactacctctgacttgcctgtcctcattcagtgcatgatgggaaaggtattagatttactgctaatgaggacattcgtccggaaaagggtatgttgtacacygtgcagatatggatctaacatgggctaacactgacccctgggagctagaatgagcaactcgtgctgggggtgggggaacaagctgtcaaggtttaggagctctatctcaagtcttagagatgggtaatgccttcatatagcccaggaaggggttctgttgttgatctctgtcgtattctcagcattctcccacccctccacctcaggacaaagaaggattttctctggggtgtaagattgtggtggtgttttctttttttctttttttttttttttttgagacggagtctcgctctgtcgcccaggctggagtccagtggagcgatctctgcccactgcaagctccgcctcccaggttcacaccattgttctgcctcagcctccctagtagctgggactacaggcgcctgccaccactgccagctaatttttttgtatttttagtagagacggggtttcaccatgttagccaggatggtctcaatctcctgacctcgtgatccccccacctcagcctcccaaagtcctgggattacaggtgtgagccactgcacctggccaggtgttttcttaaaatagggtggggtctctgctaaggggagcctgtagattggctcttttcagagattggaactggggagttcattctatagaggggcccaggtttgagggggatgaagtatttcagagcacagcagcctcccaagcagggacctctaggaatcctgggcataggtgggaggttgctgcttttggctagagaggacccacatttttccattaagagacactaccaggtcaacataattcccagacacagatacaaggtgatggcactgccctaccccaacgtctttcagttaaaagtccttcagcctaggagataagagttttggggatccttgagagagagtcttagtgcacttttggaaaatgttgcgcctaagatgctgtcagcttaacttgtgttacaagacacagccttgttctttatcccatttctttcccttctcctattgcttacttcccatggttactgtggtgattgcttcttgcttttgggtatagggtggtgacctcctcacccctcaggtttacctcctacagttctccaatggggaatcatctctccatttgtccctcagggtctggtgtggacgatcctgtgggagaagtctctattcaggtggacttgtttacacaccctggtactggggagcacaaggtcacagtgaaaggtgagtgatggacttacaggtctgccctttccttgcccagtggcctcactcatcactcaaaagcaggggctgctcatcccagccctccagctcagccctcctccamggggaaggtcacctggggttcaagaactgggaaatcctggtgggatccctcacaggtttcccttgtttgggcagtggtggctgccaatgacctcaagtggcagacagcgggtatgttccggcctttcgtggaggtgactatggttggcccacaccaaagtgataagaagaggaagttcacaaccaaatccaaaagcaacaactgggcccccaagtacaatgagacattccacttgtaagttacgggggggacatacaggactctgggatgggggtaagacttgaggggtggggggagaggagggcccggggggatggcagactggggtgaaatcagctgaagactcaactctggcctcataacttctatcttgtgctcacagcctcctgggaaatgaggaggggcccgagtcctatgagttgcagatatgcgtgaaggattactgctttgcccgggaagatcgcgtgctagggctggctgtgatgcctctgagggatgtcacagccaagggcagctgtgcctgctggtgccccttgggccggaagatccatatggatgagacaggcctgaccattctccggattttatctcagaggagcaatgacgaggtggcccgagaatttgtgaaactcaaatcagagtctcgttccacggaggaggggagctgaacaccttcgactcctgtgccaatcaggcagcagcaatttcacaaatcagggccagtgggagttagctgtgtaaccggcttagggtctttgcagtcaagaggctgaccccttcagttaaagatatttaaggaaaaatttggggtggtgataatatggcttttcacagaaagggtcatgaagccctggcccaacaggactgtggtactaggggctgggatgtggggttaccacatggagagattttccattaagagagaaggacaaacatttctgagagtgtcagccattcttggtagacacctctccactcctcatcccacctctacccatctccatgccacaccttatccagttagacacatacataccaatcattagaagaacaagtttagaaggtgtggaacttgtgcctggctggctgggtagtcagctgagcctgttgctgagcccrgtggtctggattggagtatggccagggcaggagtacacagaatagaatttagactgtcccttgagtagaatccactgattttctgtggctccagtgagaacaaggctttgaaactgaacaagataacttctagaaatgaactgtactaatccctttccccagattgtatcatgagtagaatcaggttcacgtggtgcttcaaagccctgagaagaatatttctttggaccccaggcactaggggccacctgcctgggagtctccctgcctcactcctctaggcaggggagtgatgcttcaggacgtgacaggctgttctaacatgtgtctacctgagggctagttgaaggatccaggartattttcttcttgrgtgggccctgaacaaagccaaaaattgtagaaaccagtctagaaaaagtcctgctcatctgtggccactgccttctagccgtcctccaccttgcagaaagaatctagcctttggtctctctctctctcatcggggtcatttgctattcccctctgatattcaaccmtatagaaggagcctggactctgatccctctgtacaggctggatggaaggggccctccacacttcctgggaggtcagagacaaactgtttcagagagtcagatggacttcccaagacttgttgagagatgtgacatggttcttggatttcctctgtagcagcctcctggacttcctgaggactcgacattgtccacagatgtactggccattacatgaaacaagaaaccaagcatctttgctgttgttaattattatatgtgccattgttacaggagattataggctagtctgtaataaattatcttatagcagcctttggggtttggtaattctgctaatgtgtggaaagccatggaaatgactgtcctttataatggtagattttggcctaatggtcctttgctgcttcacactcctccacccccatacctgacagccagtgggtgaagcctaaagtggttctggataaacaccactgggctaacatcctgtcctagacctgagaccaccaatctaattaacagagtcatgggacctacggcaccagcttcctacaaaaggtccaaaagagtagcaggagaggtattctggtgaaaactagtccatgcttctcttccctttgtctagaatcactaggacagatcacagcctgggttgtgaggacaaggcaggggcccactggggagaggtgtgcctgcccgtcttggcagaggactgaggctgccacagacaggacagaagattaggcttaggactgtaccttggactttcattcaggctctattcgaggaagaagagctgcagtagaaagcccactcccaaaggggaagaaataaggtaaaaggcctcatggcgtggaaatgggaaaagctgaaacaagaaagagagtgctcacctactctcaacctgcactaacactacttgtggggcagggactaatggggcaccagacagggaactagctccgtttccactgcttgctaaataaatccttagagttcagttgctcatttaaaaacttcctcctccccgctcctctcccaagccagccacttaacatttctgcctcaaaattacctcttgaatccattgggtcgcctcaagttcccaccaccacaagagtcgtggcagcttttaggtcctcatgcctgagttactgtgataatcccctgcttccgttcttaccctgctctcttcacgcactccaatataaagtccttctcctattaaactattcagtggtcacccatagcctccaggctgaaactccaagaccctccaagatagcgcagccggcaccgccccccttgcccctatcctgcagctgttctaaagtactgccccggcaggtccccgacaagcactgtgtgctcctacccctccgtgcctgcacatgctgctccccttgctggaaaatctgccagccttttccactgctttctaggctctgctatctggacgcctccccacagcactctacattgttataatttacttgtctctttcccctcatcagcctgtgatctacccaaaggcaggatctgagtgttgtatctccatttccccagcggccagcatagttcgggtacttcaaagccagatcggcccctaggggccctctccatggagaaacggtgggtctggcacctgagggtaggggtgtggccagaggcgggctcatgggagatgggcgtggtttgtgggcggggctctgctctacgccggaacctgggtctctagggcgtctgcgcaggaaggtgcgttgagatggcagttgccggagttggaggccgggcggcgacggtgagcaagaggctcccaaagtgggtgcccgagtagaagttatcgccttctccctcccaatattccttgaagagagactgtcccctctcagtatttccagtagctgtctatccttatactttcttgagacaactccccatattcgagtatactggttttccagacactcccacagaggacatatttgtcgagattatctaaggaaggggagctttatcccccatgtaactcctaaagggcacacatttttccagttatttcatgaagagatacccccaaagctccagcaattgcacattcttgttaactcagggagttttccacttttccagcactgtgcagattctcgaagaagtcataatccttgtcccatacttgatctgaagtggcacgtttgctatcattccctcccactctttggcataggatacctactctagagggaagaatcaaactctggctggctacccatggcttcagcaagctttcagatttgaattagccgctaatttctgtaggctatatctaatcagaattagaacagaagtacctttaacaatggacttttaagaaagaaaaatcacatctttcagcgtaagttgtcgctgtcgtattcattgtgaatattcggactaactccctgaatgatcctcccaagcccagaagcagacaggcaaagttgaagaagcaacaaatagtggagatggtattgaagtaggagtcagaagattgggcccagttctgctacattctagtcaggagatgacctttaacttctcagagcctcaataacttgaatctgttatctaggactaataactcctgccatgtctacctcagagggatcaaatgggctcatatatatgaaagcactttgaaaactatacattttctctaagtgtataggggattattataaatgatcctctgagttctaattaacttccaaggaatttgtcttgcttggtactaggttcaaatgcaacagatattttttgagcgcttactatgtgccaggtattcatctagacatgaggcctagcattgaaccaaaagagacaaaaaccccttataaatttaagaatgagtcgtcagcatattaagtgcctactcattacccagtgcagcgtcaaagcatggtgaagtagtaggaagaatctgtattctagatttaactctgccactatatagctgtgtgagaaagattttttccctgtgtgagcctgaacttcctcatctgtaaaataaggaagttaagcaaggtaacctctagttttctagtcttgactcatctgtactttaggggacctgaaagaaattgattaaaatacatatactttattggccttttctgagttgggttaagaatggagagaaaaataggaagcaaagaaggatatgtctgtatagcaaatcgtggggtttgataaagtataatttttccaagtattaaaaaatttgacttttatataaatacgaaattaataggtctccaatattttatttattaattaatgagggaaccagtaagatattaagatcagttcaaatgaaaaattaagagctaaatatttataggcaatttaataaaggaatgttaaaatacgatttctgaatgatatacaaaactaattaaggtcctaaagtgcaataagtcataaattttggagtcatcttttccaccagacataaaacatttttatcactactagatgaaaatctataagttaacctctgccctaacgagttataaaatagtccagtcaatagaaaactaatcaaagatataaacacaaaactgtactaaaagatcatccaataatttatttcacctgtttctaggtttcagatgacttttctgacaattgtagtcatcaacttcaacttagttgtcaggaaatgaaatctgtttcccaagctttgaaactataactttatgatgaagataaataaagtgaattccaaactaccatatgtgtcttagagatagatcattttggacttcagggatcaagttccaagtttcttaagaatgtgtttgaatgacacagtatcagcatgagaaattctcatattctgaatctttatttcctttatagaaattccatggaattatagttggtctactctgcaatgtctctatttaaaagcccaagtgaggacagacaagatgaacgtaggtaaactcaggaaaatgtatctgagtatgtcattattattacctctgaagtgtgtgtgtgtgtgtgtgtgtgtgtgtgtatacatgcacatatggcagatcaacctggcaatcagattgttaacctaccaaacaactgatcaggaaaggaaatatatttttcaaaagtaaatactttgtacttagaagtacaagctccactgttttatcatctgaaaatcctaatttgagtactctcttaacttttatatttggaaattcaccagtaaagcttgtgtacctttccttctctccccattcttcataactgcctcctgctaaaaagaggtgatcagtgtgaaaaaaggctgctgaggcagataaggtcctcctttgcagcctttttgtggacagaacaaatggatctgtctctgtagtaagggaggatttccataccatttctgtgctttcctttggtgaatcaagattctaaagggaggccgggcgtggtggctcacacctgtaatcccagcactgtgagagtccaaggccggcagatcacttgaggccaggagttcaagactagcttggccaacatggcaaaacctgtctctactaaaaataaaataaataaataaataaataaataaataaataaataaataaataaattagccaggcatggtgacacatgcctatagtcccagctacttgggaggttgagggacaagaatcgcgtgagcctgggaggtggtggttgcagtgagccaagattgtgctattgcagtccaacctgggtgacagagggaaactctatcttaaaaaaaaaaaaaatcctaaagggagcaggaataatcacactccagccatctttcagaatggaactgcctgttatgtaagaacaacaacaacaaattatttctaatgtgaaattttgaaaaaggaagatttagatttaggcttccttttgaggaatggagaaagtgcagaatgaaatcagttcactgattgaaggtcacagtgtactttctttctttttttttttttttagtaacacggagtctcgctccgttgcccaggctggagtgcagtggcgcgatctgggctcactgcaagctccgcttcgcaggttcacgccattctcctgcctcagcctcccaagtagctgggactacaggtgcccgccaccacacctggctaattttttgtatttttttttagtagagacggggttccactgcgttagccagtatgttctccagctgacctcgtgatccacccgccttggcctcccaaagtgctgggattataggcgagtatactttctttacttgctgtcattgggcagttgtccgatttcatcctggaggaagcccatgtcaaggacactggccctggttccagaagtagaaagtcaggaaacttccatccaaaggaaaaccagggagtcctctgctaccctcaggagagctaaagggctaaaggacccagaagataatcaactgctctgcatattcttatgaacagaaaatatggagagccagaatactttagggtgtggtaagttccaggcaaatgaaaaatgtaataatcatcaataaagactgatcaattcattcgacaaatatttattgattattaaataagtgcgagccactgtgctaggtatggcaatacaatggcaacaaaactagacagaatttctgctcttagcgagattatggtttagcgaggggaaacattaattaacagcatatttaatagcaccaataaatataaaatatctgccataaatgcagtgaaataaataccatatgggaagtatagtagtcaagagcatgaattctggagtcataccgtctaggtttgaatcctagctccaccacttaccacgttatcttgggcaaatctcttaatttctctgctacagttcctcctctgtaaaatggggataataataaaagtgctgccacataaggttgctgtaaggattaaattaggtaatatttataaagcatttaggacagtatctgccacatgataaacactggtaaatgtgtaaaaaataatcaaaataatctataagagcttgacactttcaatcagaaagataattaagaacttcatctataaatgtgtgttatttcaaaagccaaaccttttaccaaggaaaaagagttgaaaccagttttcctggtaaatccctacaggtaggctaggactacctattgcaggtagatttactgcttctgctattttgagcagtaagcaattaatactggtttacccaagattttggcctattccactgaatttacaaaacgacagtgctaaacccaatcatttggcaggtaacactattttgaatattcagaatcttcaggcctattctggttggaaaatctacagtacataaatactggccagttctaacatcttggttgtctaccctctcctttctattttcttttctttttc

SEQ ID NO: 97141 - DNA, 12767 bp, Homo sapiens
aagcatttcataggtccttcaaagcttatagatcttaggcacgatgcctttcattgtctaatgaatgggtaaaatagcagggtggtcaaaacagagcttaggaccaagaggggggcatgtgggagggtccaggaaacaagtgcttgcacacagcacctaaaacagcctgaggttgggttgccacaactgaagccaggtaccatttcaaacactaacagacttccttgaagattacaaagaacttcaggatggttcaccatcccagatgtagcaggaagcagcagccgaccttacctttggggcatcattttctcccaagacggagaccagttgcctagatggcccccagggagtccggcagcagcccaagtgctctatcgcagccatagtaacagggtattcagggaacagacacacggaggcacatatcttttagccaggctcgttcattatcttttgtctttaagttggcctctgatttctatatcagttgaaatatgtaatgtcccaaattgtggcagaaataaattaacaaattaagcaatctgaggatttttggacacaaggctcttcagaggggtgggaatgaggaggaaacaggaataaagaatgtcccgagccctcagagacacttgaatacctgaaatatctaggatgttttaaaacaggtgccgatcccaggcccgtgctcagggtacctgacaggtacgggccaaatgcgaccaggaaggagggcagccccacacccgggcaaaccctgacaaccggacagctttcatttgctggagtaaaggagtgacgtggctcggcctttgttagatgccaaacactgataaagcgttccactcaaatggcctcttagatgtggccaagaaaagtacaaaaaggcccagcttgcctgttgacaatcccattaaactttcagtcacttctaaagaacaggccagcaccatctgaacatggaaacccaagtgccaactacttctcgtccactctggagtaagggacaatggagatcctgggtgggcacaggccctgcagtgctgcattcccactcatcacagactaaaattgccacctgtacaccccaggtctgacactaccaactgggaaggccaacagaaccccacattctactccaaagaccctggaacgaaggcacagtaaatccacttatttagctcactctgattccgcctcccccagccgaactccaccctcacctcaggcacggccaaaactttggaaattgtttcactgatgctccagtgtccccaactacctttgatttcatcaactgcttccagccctctgtacaacatcctgcctacttcctttgcctccctctagcaccttcaactcttctactcagggcccataaaactaagtgccaggattggtctcacctagcagcctcccaacacaaagacctaacaggaaatggccacctcatggtcttctgccgtttggtgtgaggacaggcaccatggtacaacttgaatttttgtttttataatttgggtctgtgattagctatcctttaccacttttttggaaatgattttttaaaataaagaaaacccagaagggaaagcatcaggataaatagctaatgcaccctgggcttaatacctaggtgatgggtggatgggtgcaggaaaccaccatggcacatgtttatctatgtaacaaacctgcacgtcctgcacaggtatcccagaacttaaaattaaattggaaaaacaaaaacaaaaacacaaaaactccagcctggacaacatctctaaaaaatttttttttaattagctgggtacagtggctcatgcctatagtcccagctacttgggaagctgaggcaagaggatcacttgagcacaggagtttgaggttacagtgagctaggactgcaccactgcactctagcctgggtgagaccctgactcaaaaaagaatttaatttttttttaaaagaacaaaacccctgaggcttagctgcccagtgagggcaatgtgtaattcagcaggtcctcctgttgctccttcccaatcaacatgtcatgttgcaacacactggctgcctcccacccgttagcaactgttttgaccactatggtaaaatcatcatgatggaggctggctggagtctgcatggaatgtagttaaaggatgttgaaagacagaagcagggccttgtagatgacaagaaggcaaagaatgatactgccatgacccccagcaagttcacaggtttatctgcctaaaaaactcacactcccattgaacaactgctgccgttaactcagaatggtctatctctatcagcagaaaggaacagacagaccaagatagaaaaccaagccccaaaacgctggaatctctcgcttcaagctaccccagcaagtaagtggaccgaccaggagctaagctagaaaaaaggaagagaatgcaggatttgaatagtctctaagatgtcccagcaaacagcaaaggatgacttcttcccgaaggaatggtacattgcttctcttgggaatttgagaaggggctgggagtgagctgtttaaataaatattaaatttgtcctctttttggcaataccatcaccattcctgcaagatgttccaactccagaagcagctttgccaaatgcagggctggaaccacaccagacacttccaggtttgcagcagacagtagcacatatcccctctactgcttatagtaatctgcctggcctctatgtgccaccctacattgaccaacagcaccatttccagagcttgtacaaggaacggcaggtatgtgatattccaaaagcaatgtgccccttagttctggatttgagctctatatgggcagatctgagttcgaacgtcagcggcactaggtaagactgcagtatgtgtggcaggcaaaattcttagatggtaatccacgattcccagcccctggttatttaaacacaaatctagtattgctgttgtcagttgaccttaagatagggagataatccaggtaggactattgtgctatgagtcatttttaagcaatgttttctccagctggtatcaaacggaaggtgaatccaaagtaccaggattccatgcaccattgccagcttgaaggtaggggagaccaagtgaacagaaatacggacagtgcctgtctatatgctaagagttgtccacagctcacagccagcaagaaaaatgggaagaaaacaggtgacttcagtcctacaaccctgaattctgtcgacaacctgaatgagctggaagcacattctttcccagagccttcagatgagagctgagcccagcccaggtgacacacaccctgatatcagccttatgagactctaagcagagaatccaaccaagccctgcctggatatctgaccttcagaactgtgaaatgataaagaggtattgttttaagctactaagtttgtgagcatttgttatataccaagagcatattaccaatacagtatgtaaagctctcagtagaatgtcatagtccagaatgtcctggccttcctcaaggttaactctctacctccacatcctcccacacccctagacatcaaagcacagcctttctctagccccttttcacttaaaaagcaaaaggtaccgagagggagtgatgaggcaaagttcacccccgggggaggacaccatttggaattcaagtagaaagaagtacatctttccccttctacaaacttcaagcctatgcacatatcaaatgcagactctattagctggcaggggaaatctgccatggatcctggtattcctgcatattcttgctgggcaggctcttgcctgggttctttctcaaaactgtgtttgcaggaggcagtcttaagggatgaagtaatctctgcacgtgaaacaacaggcttgccatgaaataggtggagtccccaaacataacaagttctttggctatgatgcaaacttgtaacatgcatagcatctacctgggcccctccatgtccactgtgagacaggggaaaccaatataaacacgaagttcatgctgcttgctatgctgagtaaagttctttatctctgacccaggatcctcatgtcttctggtagcatcaataaaaaagtaataatctaacttattagcttgcaagggtaaaatcccagaccctgactctattacacttattacacttagatccttaaatgaggagatttaatgtctttacattatacatttcaaaggaacaaaacaccctttatgaattttctcatggagatagcacttacatcacagagctattgtgaaaataaaataagaatgtacagcacacctggaatataaaaacatcccaataacttacttggagccccgcagccatccatccctcacatataaatacaatgaaccagatgaagatccgtgtccgtgtccatgacagcaatccattcagaagatcaaagataaatagtctaatacaccaatttctgacatttgcttagcactgcaggactcatgaagagctgccactcatattatctcatttaatccctacaacaaaaaccaaggctcaaggaggtgagtccttgcagaaagaacagtaacagactccacaggtttgcaaaacagccatatgacagagggctgaggaagcctatgatagtaggctgaggaagcacagctgaactgcagctacgagactgttctagcagcacgactgtggcctgaaggcacattcttcctccaggtaaggcaagggagctctcatggtgactgggcccctcctgggcaatggcaatgccactggagaaacagctggaaaccatatgctacagggatgtcttttatttgtatattgatatttcttcacagaaaattaagcaagtggctattctgtcctggattaatccatttggacttggtcccattggtgtccgtggcagcttctgctttgtctgtaggcattggggccttatcttgtgatggttatcacttgagggtcttgctaaggttggagaaaccaatgccaacacaggtcatcagcactttatccccacccttgagttcttcaccacatggcttggtttcaattttaaacataatctggaaaaagctcttcaaatgccgcaaaaattctatcctaaaaaggaaaaaaataaataaataaataaaaagaaattcattcaaaaaaaaattatcctctaccacctagaatccaaggttttaatctcccagacctagagggctgaagttaagaccttctcatcgaatctgattaaatagtacttcctttcagccagccagtttccaaagaagatttagatagtttgcagagatacacgcaatacagcaagataaattaaactggggggggaaaggttagaagttcgtacgtgacacataagttatttagttcagacctagcagaaaatggacagaaatatggtgatgactcttttttttataagagatggggtctcactatgttgcccaaactggcctcaagctcctgggctcaagcaatcctccacctcagcctcctgactacctgggactatgggtgtcccaatgtacctggcttaggcaatgatttttgagtggcctatacaaagacagaaacacctatttccatgattcacagcaccatgacattcaaaacaagcacaatgactactgatgctgaaacagacaagtccctcccttcattctccaataataccctcgcatttacttaatatgtatcaagtgcctactgtatgctaggcactgttcttggtgctgggaatattgcactcaaatgaaaaaaaataaaaataaaaatccttccctcaggaggatttcaatctagtggtatagatagagactagataaataaattaattttattcctgaaaagtgctatgtaatgtaaacaaagcaaacaacacagacggggaagaactgtgggtatgacagtatttgcacatatttggcagaaggcaatattaaataaggtggccggggaagtgtgcacagtaaacacaacaaggacaatggcatcacagggcgatggcatcagtccaagagtaccttgggaagagcaattctgtggatgaaccgcagtgcaggtgcacaggcttctaatggtctcgcctggcagacctagcgtcaccccagctrgcctgaccataagactcacctgaacagttcattaaatacacaggttcctgaaggttatggtgaacttgcaactggtaggaaatgtccatatggaagagcccagaatcayagtccacacacaaagctgatccctccctaccctccaccaggccctgtactccccagttcatagaggccagaaatctatgttgttaacaagaatccctggcaagtctcattgggcaaggttagggaatactggcttagtgaagaatgatggcttgcacatctatagtgaagtattacaaaaacctcgcactgtactgtctcccaatcaaaccagccaaactctccactctggccagatggttctcaatctcgactgcacatggaataacctaaggagctttaaaaacactgacgckaaacacatagatcaatggaagagaattgagagtcaagaaataaaccacacagttatggctaatttcctcaatgaggaaagcataatcattgcaacaaatgatgctggaacaactggatatccacaggtgaaagaatgaagctgggccccttcctcacatcacacacaaaacttaacccaaaagagatcaaagtcatagctgtaagagctaaaactataaagttcactaaagaaaatacaggagtaaatattcattaccttgggctaggcaacggtttcttaaccatttcttaaatacaacaccaaaaggatggcaataagagacaaaataaataaattggacttcatcaaaattaaaatactttgtgcatcaaagtgcaccatcaagaaagtaaaaaaacaacctacaggattggagaaaagatctgcaagtcatatatctgataaaggtcaggcatctcaactatataaacaactcttacaactcaataataaaaagacaaataacctaattaaacgatgggagagtacaggcatggtacctcacacctgtaatcccaacagtttgggaggccaaggcaggcaaattgcttggggcctggaattcaagaccagtctattacgacccccatctctacaaaaaaattgttttaaaattagccaggcatgatggcaggagcctgtagtcctagctactcgagctatgattgcaccactgcactcccacctgggcaacagagtaagactcactgaaaaaaaaaaaaaaaaaagtgggagagctaaacggatatttcctcacaaatatccaataaggacatgaaaagatgctcaacatcactggttattagggaagtgaaaatcaaaaccactgtgaaatatcacttcatatccaataggatggctataataaaaagacatacaataacaaaagtgtgggtgaggaggcagaaccactagaaccctcatacactgctggtgggaatgtaaaacggtacagccgctgtggaaaacaacctggcagttcctcaaaatgttaaccagggagttaccataggatacggtaattctactcttaggaatatgtacaagagaaatgaaaacatacacccacacaaaaacttgcacgcaaatattcataatggcattattcacaagagtcaaaacgtagaagcaacccaaatgtctaccaactgatgaatgcataaaatgtggtatatccattcaatggaagatttttttttttctgccataaaaaaggaacaaagcactgatacgtgctacatcaatgaaccctgaaaacattatgctaagtgaaagaatccagtcacaaaggaccagatagtgtatgattctatctacacaatatgaaaaagccacaacaggcaaatctatcacagaggcagaaaggagattcgtggttgcctggggctggggagagtgggaagaatgggaggcactgtgagctggcacagggtttctttctgggggtagtaaaaatgtgctaaaattagattgtggctgtggttacacaagtctgtgaatacactaaaaaacctttaaactgtgtacttaaaatgggtaaattgtgtcatatgtgaattggttctcaataaagctttttaaaataaagaaatcaatacatatttgccatgctataaaacaactgatcctggttctcacccctactcggtgtataccaaactacatataaagcctgccttgatgaatttccctcccatccccatccctctgtgctaagagcactgatctagttaaaggaaggaaacagctacatggagaaaagggggcctgaacaattcctgaccctgtggctgaagtgaccagcgcatcaggggctaagagatgaaacattaacaaccctagagggcaggagttctggtcagtgctggatgctcatagaaaaatcccccaattccttgctttccttccacctaggaatgtgcaacttcatctcgatctttaaaataacatcccatttgtcaacttttctatgaagtctttcctagcccataaaccctaccccaaacgatctttcccacccctccaggtttccatagcattctctgctcatggtgtctaattaaatgcttatgtatcactgtccccttccccctcattaaattatttaagtacctcaacagcaatgcttttctccaacactgaacccgttattcaaacaaggtactgtataaggttctcagtaaagaggcactgaatagaatttagcctcagtaaagaggctcttctccatcactgaacccgttattcaaacaaggcactgtaaaggttctcagtaaagaggcactggatagaatttaggagttggggtaattttgagaaaaaattttcaacattcttggcaattaagggaagtcagctttccctgctggctttcctgtcttactaaccaattaaatttctgttgtcgttgttgctttctatccatcccaccatctcccccatcctgtcctagggaaaaaagaaaacacagcaaaccacagataaacagtccacatctgtgggcaaagcttccagctggcggcaacctggaaaaagccagccatctcacccactctgcatctgaaggagaaaacagattggtctctcctttgctgctgcctcaaactaacacaggcctggggcatgctctgctcccaggatctcacccagcctacttcactctgaatcactcaactgtgcttgaaaaaccagacaccctccccagctggcagaatttctacgggccctcagcttgcttctgatctcttggagaaggatgggaggaacacaggctcaagtgtgcaggcctgtgtatttgcaagtttggggtatttgtagcctttggaacagttagaaaaagcaaagttagttccactttttacataatgttctgccaactcctcagcctgtccaaggaagactgtgtaagagactagattaaggtacatttcagaatctttcccccacctctagccccattctccctatgtctctggcagctgggatattgaagagcaaaaatgctcacaacctgaaaaaaaaccacagacaatattaaatcccagcaaacagcctccttaagaaaacgaaaagcaaatgaagagtaagctcgtcctgtatctacatgcacttgaacaaagtcttgtccagtgctgatccacgtccttctccacagcccaacagctctccacagcagcagctgcactgaggcaccgcctcttgagttcatatttccctgcccctctcttccacagcactacactggagattcacacttcctagacacaaccacacagccacacacccagggcaaagagagacccaccgctcaccgagagcagctctgcccctcaatgagtaaccacccacacagtgcaaatagcagcttttcagaagaaccattctaggcagtaggggctctatgcaactcctgtgtaaaggattttaacacctaacatagagaatgattatctgcagtgaggctttttttttccccgggacaaaatgattttcagaaaacaaaaagcaactgacttttctacgaaagcctctagtccatctgacaagcaggtttcagagaattctggagcacagagataacttttcctatttttttttttttttttttttgagacggagtcttgctctgtcacccaggctggggtgcaatggtgcgatctcagctaactgcaacctctgcctcccaggttcaagtgattctcctgcctcagcctcccgagtagctgggattagagacatgtgccaccacgcccggctaattttgtatttttagtagagacagggtttcacatgttggccaggctggtcttgaactcctgacctcgtgatctacccgcctcggcctcccaaagtgctgggattacaggtgtgagccaccgcacccggccttcctatgtattttcaaaaggtgagttgttcccactgccactgctggtcaacaggaaaggccatgaggcttgtggtcatgggtccgttgaatcccaactgaccaggatttgacaggctgccagatcccacccttaaacacagcccctcccaccagacccctcttttgaagcatgtgagagattggggtgaaggcaatcatggggtgagccctctctctggcagcccccacaggcacaaaccacaacagagggtcctgcgtcctcctccactaagccacctggttactatgccactggatatgggacagagctgggggtacctacatctcaggtgtaaggacatgctctggaagttgagggaaaagatctggagataagaaaaggatctgctcaatggagtccctatagtcattacatggcagcttttaaatatactgctgatgctttttctgctgaatagaggcttttccaaagacaagctgacctctgctccaaatgaaattactacattcagttactgaggcagcaggaaacagagaactaggctagctgcactgtcaggagatggggtcccaggcccagttcagacaggatctcaccataagcaggtcagtgacctcttttttatctgagaaggaaggctatcacttgcttttaccatacaccaattatgttctagggctcaaacatcaggtgacagggctttacagaatttaaacgcttcacaaaactaagacatagtggtactgtgcaagctcatggaatgcagtgaggccactgaccccaagtagaggcaggcttggccggcagttcccagtttccccactggtttcctcattggttcttcagagggctgagctttaggctgagtgggctaggaagccccactcagttggtgtttaacaaggacagtgtcctctagctcctcagcacttccacagtcatggaaaaaggtcattaactaaagttagaaaaaaaaaagtcacggtttattttagatttccaactaaagatagaaagagatcattttacagcagaatttgaaacgaggactttgctgaaaagatgtagcatggcatcctgcctcaggcaaggtgcttggagtccagcgatatggatggaatcccagctcttacataagagcacaatgggttggccgggcacggtggctcacgtctgtaatcccagcactttgggaggccgaagcatgtggatcaccaggtcaggagatcgagatcatcctggctaacacgatgaaaccccgtctctactaaaaatacaaaaaattagccgggcatggtggcgggcgcctgtagtcccagctactcaggaggctgaggcaggagaatggcacgaacctgggaggtagagcttgcagtgagctgagatcgcgccactgcactcagcctgggcgacagaggagactccgtctcaaaaaaaaaaaaaaaaagagcacagtgggtaagggaagcagtgactggaggagactgtccaggtctgaaccccacttactgtctgtgtgaccctgggcacgtaacttgacctcgctgtgcctcaatcccatcacctgtaagacggtgcacatgatagtacttgccttttttgcccttatgaagttatgatgaaaaccagataagttattatgtctgagtgcttaaaacaacatcttgcacacagtaaacacggtgttgtttaaataaacatctaccttacagaattcttaggatcaataagatgtgtgtagtttgctcagtaatgtgactaggggaagtcagtcataaaaataataactagaaattaaaattttttaatccataatttaaaattaatggatatagatttataggtagctgggcagaccacttacagatgacttaaaccctaaaatcacccaaagcaagtttactaggcctcctggggttcaaagtgacctgaccgggctactctagccacactgcctctggggtagtcctgctcctcaaggagcagttaaaaaaaaaaaaaaagtgacctgaccaagggactggactgcagcagggtgaaggggtgtccaggcaggaaccacagcacccagcactgacagctcctcaggcacgttgccaggagcactaagcatctgacttaatctaagcttcgttccatctccacaagtccaggacttcaggaccacgcaccttatctacaaatgacaccaaggctccaagatgctaaataccatttccacggtctcctggtagcgcgtggtagagccttaagtccagataggctggactccaaga

SEQ ID NO: 97142 - DNA, 12348 bp, Homo sapiens
ctaaaatctagcggcaacaccaagtctttacactgatcctaaatatttatcttgagctcaaagcagagccaacagcagaaacaacacgaggaggaagaagaattaggcataacacgagttctctaaatgtcatttaggggagttaaaatcctaaatttttcttaccaggtagaaagatgggagggaagcaccttgctattcgtatctcaacattatttgtaaaatcagctgccactgaaagattggttcctttccggcagattcattggaaagggccctgttcggcttccgccttcacccagcatgggctgggcgcatcttggagccccagggctctcaaacctaggcccaccctgcccgtcccccttatctgttctcccgggggttgtagcgcagcccgtgcggcccctcggagtcgtagctgtcatggtgcgggagctgggcccactccggcgggaaggtggccctgctgtacacgaagcactgcaccgcggtgggcgctggcggctcctctgcgcccggggcccggtcctccagcagctgtacccgcagcaccgtgcgctggtacagggccgggcaactctcgaagtcatccagaaagcgcagcatccgctcgtctaccgcgtagacctcgccctccacgaggcgccccgagccgggcaggtgcagcagccacgggatgttgtgctcccccgcgatcaccaacgggtagggctccagcgtgcggccgcgcgcccgaaaggctgcggagccgtgggcgccgtcccgcaggaccctgtggttgggctgaccccgcttcagggtgccgtacacgaagactagggccatccgggcagagctgcagggagaggggaagtcacaggtcagcccgcagtgggagctctgtgtctgcacctgggacgtggctcccggcccacagagcctccactggggccgcaccacctgaatgcgcctggctgtgctcagataaggcgttacttaccgacgcagatgagaatgacctacagttttcacacatcatgagatattttgactttcggccatttaaacatgtgaaagccattcctagcttgtgggctgttcacaaacgggcaccaggtcggctctaacctgtgggcatggtgtttttgggtttgccagtccctaggctagagaaaggggcacacattggtgacttccttgatgtgtctgtagcagacaggacacctgcgttctgggcaggaggaccgtgccctcagcctccccacaccacctggatggactaatgttcctcagccctgcaggggcagccctgcctcgcctgcacaggccacccttctctgaggaacacagtcctgacctgctgactgcgcagcctccccgactccctgagggcaccagccttccacccttcccaactcctacccccatcgtagcagctcaaggccagaagacgccctgtccaggccctagtatggccctcccagacacaccctgtccaggtgagcaactacccctgctcctgagcccagcacagcccataccttactgttctcagcccttgtgtggtgggcgcggaggttgcggaggttccaggcaaggccgccaccctctagagctgctgatctgggaaaaggcgctccttgtattaggacagtctgtcaaacctgtcccaacagcctgccctgctacctgagccctgcagaactgccattttcttgagcagttttcagtgtttcttaaaggactttgaaaattgccaataactattagagaaaaattagaaataaccctaaaaatacatataattttgtaaccacctgctatccagctgcagtgagaacccaggtttcagcactgagttccactcaggtcctggcagtctgacgcagcggagctcagcacccacaccttctggtgtttccccttccaaggtcttagagggcagtggtgcttcacgggactccccgcagcgatcttggctccagcgtgaaggtaaatatttaccacttgcctgggtctgggccacagactgttacataaagacagaagtgatttgcgtgaaagtgactcaaacaaaaatggaaatgaacattaaaggggtgggggccgctctccccggcccctcgctccgctgccctgtgtgcccccgccatgaggtgacagcctgtggggcgactcgttgagatgggctttgcagacgggactgcaggtgcaggaaaacaaatgcggctatccaggaaacagcagcggctcgtgacccgccagaaatggccccggacaccacacttgccaccaatcatgtggacaagtggaccctgaagaaactgaagaagtcacactgaactcatgggacttctgttttcttctcagcaaacaagagctgctctggggggttctaggcctcattttgctcaagaggcacgtctgctgcctcttggttctatcaccagcctgtgcaacaacagtattccccagatttcaggcacattgcactaggaaaggtgtggccgtgggaaaaacacaaggctagccagatacgtgcgccctgtgggcctggccatgtgatagccctgggacacccttcccagtgtggggacacagattagacctggggggcatgctgggataggaaagttgagatgtgaattaaggagaacctggggtaggacggtactgaggaagagaagaggcaagtgctcaggcctaaaattgccaggactcggctgctggggtgtacgtgaaaatgacaaaaggcaccagctgagagcagcgctggtgtctggagagggcactggatggaagcagctgtctacaacagcgggcaaggagctatcccaaaagacgagcacctggggggcgatgatggtttggatcctgctgtgcagctgccttggggactcagcatttggaaggattcatgtccctccccacacctgcatcccagcccccagcgagacccatcagcacttcccctgccacgtctcccaacctgctctcctcctccaatgcctgcctgcatccctgttgtctttgttcccctggatcctgcccccagtgcaccacccagagggtccttgtcaatctcctgctgcagacttaactctcccacctcatctcctgcaccctctctcccctcatccaggtggctcctgccccgaccagcgcctgacctggagggtgcaggagtagtaggcagggcctactcagtctgtcacatcactctgtctggttgtcgttatagcacacgtgctctctaaatcactggtcttgtttgttgctggaacatgaagggccagaagagaacttggaaactgtttggtccagcacctgcaggtgaggaagccgagtcccaggctggtggcgatctaggaccagccagccgggcagggccgtagtcacactgcagaccagctctccactgccaggtgcctgcctggctttccctgatgcagttttttaaaatggcatgtgtccaaaatgtcaatagattgctttgtaagaaaaatgaagtttcctacccctttccactccctggaggcaacacttttaaggcttttaactgttgtgttcagcatttatctccatattgttacttacgctgctacttcttgatgtcttaaatcatatcttgcccttctactcaaaaagtgggtgagcatagtggttctaaagcacagactttaactgtgtgactttaggcagatcatataacctctctgtgcctcagcttcctcaactgtaaactgaagtcacagtagcagcctgcctcagagaccgcggtgggtaccaacacacgtggtcctgtgtgatctgctgacatgtagcgtgtgccgctgctgtcatcactgtagaagcctgacccttggctctcctaccacatcccgccatcctcccaacagactcatcatagttttgggtcagacccagatctatttcggcattagaaccatgcaaacacggctcttggctaagacacagagcatactatgattacatttcctttcttggacaactttatgttttccttgaaattaaaaattgcttcaagtttgttttttttgtttgttttgcatttcgcttagtttctaggattgtaattcagcctcgcagtttctgagagcatggccagaacccgggtcctgaccatccgctggaaggtcctccctgccagctctagtctgggctctctgtgtcgctgccatccaggccaccctcattcctgtcccgtcctctggctgggatgttggccacattttgctgaagtgtattctctcccacttttggttaataacatggctgcgtagaggattctagaaatcatttccctcagaactttaaagacatttcttcattgtcttctaactttccgagttcttgcagagaagtcagtgtgctgtgatccaggtcccctgtgtgtgtgactcgagctcttccctggaggctcttaagggcttccttttatccctcagattctagaattttctgatgatgtagactctgttttcattgattgtgctggaattttgatctgaatgctccttatcctggatcacgggggcattttcttacccctccttcctctctgttctctttctggctctcccaatattccggcagtggaggtcctgacttcagcctccaatgtttttatattttctcctttcctccaggtctatattatattctgctttatcttgcatttcttctattaaaaatttttttgccatgatatttatttccaatatatttttcttgttgtgtgttttttttttcaacttcttgttcattcacaggctcaatatatatatattttttaagttttcttcattcccttcattgcctccatttctcctaactccctcttttctctctgttttggtatctgtgtttcaagagattttcttcacatgtgatcttggctgggaaagctgagccactctttggaagtgaggctgagctgtcaggtggcaggcctcacacgggactctggggagcggcgctgggagctctgcactttcccccaatgcttgttttcagggtgccacctcaccaccactcagctaggcctgtgtccccagcggaggtgttcttgtcaggctctccagaaaggaacccgccatcctctgccaggtgtgaggggaagcagtggggtctccctgcaccttgtgcacactcccagcctttccgtgtcttggcctgtccttgcctctgtggcctgcggttctggactcctccagcgttgcagacactgctcagctgactacttgtcagcctctcactgtgcaggagcttaagttttgggtgtctctaggttaagtctgctgtcactcacttctgttttccgtcttccagaagcgtgtcgcccgctttcctccactgtccttgtgggtcgtttgagtagcattaggaggaagctggacacagggcctgtcctccctgtcttctcccttgctgcaccgccagccctagccccttcctctgagagacttgatgtgagccagaaaggaagcgacaagacagaaactgcttgcttagaaggatggcaaggaggttttcttcaggtacaggagactcaagggtatgtcaggtccccgtgaagaagccaggaaagtagcaattgtggcaccagagtgagggctgggtagaggggatggctggtgatagctgaaggagccaggcagcggggaggcagagaaagaacttgttcttcctgctgctgagacgagagaaaggaaagacgaggcagcacttgcaggaaaaggaaagcctaaatgcagccatgcagggaacaacgcagccatgcagggatgccctgtgctaagtgctgggcatgcaatgagactccatgaagccacagtgtcattgaggggagacagaagacacacttgtcaaagggcgcctcgcgggagacagctgcacagcacaggcactctccctcagaaaccgctccttcagtaagaggtggtggcaccatccactcgggcagggagactgccgccaggctgagaacttgcaaaatggaaagaagtgagaacagtcctatggaagcagcacagactttggaacagagttgtaagatgccaggacagagcaggtactcagcacgcaatggtcattgttttcactattccggggattcaactgcaaaggaagaaaaatatttcatccaagagtggacaagcaggcttaggacagaggtaagaggagaagagagttggaggatagtgtttctgaagaaggctaattcccagggaggacttctgggaccttgcttaccgacgaccgaggttcacctgggtgtactgggccccgcactaagtagcctgtgtmatctcagtttatttaatgctctcaactctgtaaagtaggtggtattaccttcatttaacagatgaagaaactaagatgagggctctggcccgaagctggtgagaggcagcagcaggaactgagcctgggcctgctggactccaaaagcctctctggctctgtcacttgcactgaccccaaggcccaagggaggtgaccctgtcaagtatggtggaggactcaggctctgcaatggcagagatggtttgcaaagcaccctacacttccctatgctttttgttccctacttgttttaaattttatctgataaaccaaatccttctctgtatttcctgttttttaatttgtggagttttaaaaattgtgataaaatacacataacataaaatttatcataactattttcaagtgttcagttcagtagtgttaagtatatttgagttgtgaaaaaggtctccagaaccttttcatcttgcaaaactgaaactttgtacccattaaacaataaccatggaaagcaaaaccacagataaggaggaattcctgttctatgctattttgattacagtaactttatgataagttttgaagtcaggaagtatgagacctccaacattgttcttttccaagatcacattgtctatttaaggtcctttgatatttccatatacatttttggattgggttttcctctttctgcattaaaggactgcattaatctgtagatcactttaggaagtattgacatctgaacaatattgtcttccaatccatgaacatgggatgtctttccatttatttatgtcctctttaattgctttcagcaatgtgttgtacttttcagtgtacacatcttgcctgcttggttaagtttattcctaagtattttattctttttgatgctatcataaatggaatagtttgtcttttcagattgcttattgttagtgtataaaaatgcaataattatttgtgtgaattttgtctcctgcaacttcactgaatttgcttattagttctaaaagttttaaggtgaaatgtttacattttctatacaggaccatattgtttacaaatagagttaattttacttcttacctctgacttggatgccttttaaatttctttttcttgcctgattgctccagctaggactcccagaactatgttcaacagaactgatgaaagcagcatccttttcttgttcctgatctcagaagaaaagctttcattctggcatcactgagtatcatgttagctgtgggcttttcatatactgcctttatgatgttgaggtaatttccttctgttcctttgttgactgtttttaaatcatgaagttgtgttgaatcttgtcaaatgctttttctgtatcaattgaagtgattgtgtgttttttccttcattctgttaatgtagtgtattacattgattgattttcttatattgaaacatccttgcattccaggaataaatcccacttggccattgcatataatccttttaatgtgttgttgaattctgtttgctagtgtgttgtttaggattttggcatcgatcttcatcaagaatattagtctgtagttttctttcttggagtgtctttggccttagtatcagggtgatgctcaacactgaaatgttccttcttcttcattctttagaagagtttcaggaggactggtgtgaattctgtaaatgtttggtagaatttaccagtgaagccatctggtcctgggcttttttttttttttttttaagtacaatttccattttatttttctccagagaatagcctgtcttcagtctttaagaactcagctccttacatgggctttggtgggggacgtggggcagcacccgcaaggtctaaatcgaggtgggggtgttcggtccttgcgggcttcacgagatcgattcctgactactttgctgtgaattgcacaactcacacagtaatgtagcttcacatacagcttgggaagcacataggcatcgaagacgctcgcttcagaaatgtccctgactgctgcggcctccactatgtttcgaatgacgaatttcttaatggcgttgtccttgggcacgcatcgggcacagttagtgcagcgaataggctgcacgtggccgcggccctttttggcacgaccattgttccttcttttctttgtcatcttggaggcacggaccggagagagagtgggcttttcttttgggggagatttttgactgctgcttcagtctctttactagttgtaggtctgttcagtctcagtaggttgtgtctttctaggaatttgtccatttcatctaggttagacaatttgttggcataattgttcataatattctcttggcctttttatttctgcaagatgtgttgttctgtaggacgtgatgttttctcgtccatttctggttttagttatttagatcttttctctctttttatttaagttaaaggtctgtcaattttgttagtcttctcaaacagccaactcttggtttaactgattttctctgttgtttaaaattctctttttgtttatctctgctctaatcattactgttcctttccttctgctagctttgggttttgtttgttgttttttgagcttcttatctccttgtactcttgttccttgtctctcatgttcagcccatctccaagggctgctgtgaggatcacaaccaacaggacacatgaaaagtctataacactggccagatgcctctcagaaccgcagcagaatgtgcctgtgattcattctggctgagaaaatgtcgggctcctctttgggtgcaccaggcccctgggccgggctgggaggggtgacactgccactgcagaaggggatgccaccttctgagagccacatgttactgtgtcttcaaccctgccccctctcaccatgctagttttttgtttgtttgtttgtttttccatggcacagggttagagtcagggtctcagataaaatgtaagggcttggtttaatgagtaatggtaagaaacggctgtaggcaagccatctgagtttttccagattaaaacaagtatttctcttggtctctaccttaatgtgaagtaattgcccccaagtcagccctgctgcatcagacacagtgtgagcccagcccttgcagggccagcatcaggaaaggcaacctcagaattctgtagatgggcatttagggacagagtgcagggcaagtatcaaacaatccactgtgccataacaggcctgacttgagttcctgcctccatccctgagcacctgtgggactttgggcaagtgatttcaagttcttgagcttccatttcctcctatttaccccaaagagttaccctccactgactgccgactgtgcaggcgtgagcacctgatgaatgtgaattccctcttccccttggcccttccttatccctgctccctcctcaggtctccacttaactccatcctttatcaacatcttctagaaatatctactagctatagtcttctcaaaaataaaaatgaacacattataagtgggagagggcatcaggcatatcgagtagtggttgtggccttaatgattttccaaaaccaagaaaaatgcttgggagggtgatattacgtagaaatgaaggtgattaggccacagaaggttaattccaactctggaaaatcagttcagtaattgtcttctgcagaagatgatagcttatttctgtaaaataaaaccaggcaataaaagttaaccttcatttctaggaaataatccagcctgctagaatgaccaactaaaattttctacattttatgtattgagttcaatagcatccttcataacataaagttagtttgagaacactacttatgcaatagaaaagaaaatagcctgcatttctggcttctgtcataagaaaaacttcattacctttctgattgtgttttgaacaacacacacagatcctaacaggaagaaacttgtccccatggggactgagccaggatcagagttaagcactgaaacaagcaattaattccccttagaggattaaggcactcaggttcactttgaatcagaaaagcgaatcaagaataaaatggtgtacaaccaagaggctgccagtccaacttactaagttagagaactgaagagcaaccccgggtgcacaggagaagcagagcagccgctgacccccccagcaagaagacgggtagggtttgtttcatgggacaagatcgtccttcatgacgctgtggaaacgttggggagagcacggtttgtgccctaggacgctggccttactcttaacagatccagtccacgaaagtaaatctaaaaagcgtgttccagcctgccacgctgtcatccctcgtgcacggatttcctcatagcatcttactgttaatacacagaatcaaagaatgacatgcatgagaccttaacatcagtttggagaattttactttgggttcctagagccaattctgagggcactgaacatctctgcagatgtcgttccctgatgctgatgtgttaaggataagggcggcctgctgctgtggtcaggattcaggcatcctccactctggaaatccaagaggccaaagctgaacctctgtcccaaagctaactggtccggacaatagcggcatccaggggacagcatggaggtggaacaggctcagagagtctccaaaagctttagatcagcaaaatctggtttcccattgccaatatttgagaaaataagaagactcatgagctgtccatctggtcgggcgctgcctgaaatgcctgtcacttattcagcagttctccttcttgaaacgcagtccgtctatagtttcatatttcaccactgaagcagaacttgaaagtgattacgagtcctttgcataactgttagatttttttcttgatttcttttttcttagccacctggtggcaagagtgtaaaaggcaggatttaagagtttatgatgatagtttacaaatcacaaccacttcatatgcctggtacacgtttaaaagcatgcatacgcagaccaggtgaaccgaacaaggaaagggctagtgtttaactcttcttaaactaatttacaaaaggattttaaaaagacaccagcttttttttttttttttttttttttttttttttgagacagagtgtcgctctgtcacccaggctggagtgcagtggcacgatctcggctcactgcaacctccgcctcccaggttcaagcagttctcctgcctcagcctcctgagtagctgggactataggtgcccaccaccacgcctggctaatttttgtatttttagtagagatggggtttcaccatattggccaggctggtctcaaactcttgaccttgtgatccgcccacctcggcctcccaaagtgctagattgcaggcatgagccagcacgcctggccaacaccagcttctaacataaaaaccacctttataaatggtgcctcaagaaaatattcatctttatatgaaaatttcatgacaggaggaaatgttagtaaaatctgtatgtcatcatgtcaaagcatctgttttctccacatgatatatcaagccagtaacaatgcatactgccagttggcaagttaagactttgttagaaaaaagtaaaatgatttagacttgggtagcatgaagctcaggcccctgccagaggggctctgccactggccagggagaaatagtatcagaatcataaactcctggtccagaaggtggcatggcaaagagcttatctctatctttacatttgctgcattaatttgcttttgtcattcaatacctcgtgtcaaaattggccccagcagatcctgggcccaccagactcacgaagggcatggtgatcacggctgtacactggtttcaaggacaccaactgctgctctagtccttctgtgaccaccagcagccccacactgtgccagccctgagcaaacgcagccattctacatggtggagatggagtaagagtcacatgcgatgttgtgcacgtttcccctagaga

SEQ ID NO: 97143 - DNA, 56388 bp, Homo sapiens
taacattttctaaaacctagtccatgatcagatttccctgatcacctcaaaaatgaacttatttttactgttggtttgtttgaatccacatccagacaagaatttgttgactgttacctttttattttattttattttttgagacaggaaccagctctgctgagatcatggctcactgtaacctcgaactcctggattcaagccatcctcccacctcagcctcctgagtagttgggattacaggcatgtgccacaatgcccagctatttttttttttttttttttttttttttttttttggtggagacaggtattgcccaggctggtcttttttttttttttccttcctgagacggagtctcactcactcttgtcacccaggctggagtgcagtggcacaatcttggctcactgcaacctccgcctcctgggttcaagtgattctcatgcctcagcctcccaagtagctgggactacaggcgcatgccaccacacccaactaatttttgtatttttagtagagacggggtttcaccatgttggccacactggtctggagctcctgaactcaagtgatccacctgcctctgcctcccaaagtgctgcgattacagccgtgagccaccgtgctcagctgttgcccctttcaatctagggcaggggtggcagatgtctctgtgaagagccagataccagctctttcaggctttgcaggccctatggtctctgccacaactgctcagctctgccatcgtcatgcagaagtagccaggggtgatagtaaatggataagcatggctgtgttccaataatacttaatttccaaagcttttgtgttttaaaatccacccacaggctggacttacccgcaggctgtggtttgccgacccaagtctagagcagccttggcgggtttcctcaataccaatgactgtcgatgttacttggttgattgcctgtagggtgcctcacactctggatctgttgggctgcttttcgtggagtgtggtttggcttgcttctctatcccctatatttcctgtaaactagaagttagatctagaggcttaattaggttcatgcttgccatttttggcaagtctacttcagaagtggtttgactttttttaaatctaaatttatctgactttaaagacttggaaaccctcatcaaagaatcaaagaagctcaacattaccaaaataggagctcagcattactaaaattggctttgcctgatggctgagaagacattttttctttttctttttacttttcttatttgtaggagagtatatagagctgttatttctcaaatagttcttttttgatagttaatttttgtgggtacctagtaataggtgtatatgagatacaatgtgtaataataaaccctcattacaaggtatatgagatacaatgtgtaataatcacatcagggtaaatggggtatccatcacctcaagcatttatcttttgtgttacaatctaacgatactcttagttatttttaaatgtatagttacattattactgactatagtcaccctgttgtgctatcaaatactagatcttattcctgctttctgtgtttttgtacccattaaccatctctgctttcccccaacccccctactacccttcctagcctctggtaaccatcattctgatctctatctcagtcagttcaattgttttaatttttggctcccacaaatgagtaagaacatgcaaagtttgtctttctgtgtctgggttatttcacgtcacataacgacctccggctgcaccatattgttgcaaatgacaggatctcctttttaatggctgaatagtacttcattgtgtatatgtaccacattttgtcaaggaggtcttgagaactttgaaccctttctctaggtcactgggaaggttcctctattcaaggcattctttggcccctcaagcatgtggactgcatttttgcactgaatataagtatattccttccctgggtatgtgcccagggtctgagattgccttctaatggtagttaggtcatttatgtttgtttgtaagccccttattgcttaaatgtttaactttcttcagttgacttcctcttatctcacctcccaacaggactgaaaactggatatttggtccccatggactttctggtcaccctgtgaagtggacttaactttttcttgaatcatgtggaaggattctgaagtcaaaagtttttaagactctcaggcttactgtggatctggattctaaggcaacacttccttgaagaaacaagcttacaggtgagaactgttagcctctgttctagagtgttcattgctcaaattctagagcaccacaagaagtatgctgacaaatagtgccagttggaagcccttgtctctttgtcatttaagaatagtagtggtggggagccaggtacggtggcttgtactgtaattccagcactttaggaggctgaggcaggaggattgtttgatcccaggagattgaggctgcagtgagctgtgattacactgattatgccattgtgctccagcctgggcaacagagtgagaccctgtctcaaaaaattaaaggaggagggaaagggaaggaaagaatagtagagaaagtgtatattcatttcttcatctgtttttctctggggttgtcttttgatttataagaattatttatacattgagaatactaatcttttgtcatacgtactataactatttccaccctattttttgtactttgtgtaatacagtctctaggctttgcaaaaaattttaattttatgtacttaaaaatatcgatctcccctttatagtgtctttgttttgtgttttgcttagaaagacttgcccattttaaggtttcttttaaaaattcgtgttaacacagataaatgaaaatgtaatgagagctaggaacatgtgattctgaaaaagattattgaagggggagtatttccagacaataaataccaaactaatgttggcattaagattggccgtatgttgctaagtgttgaagttgggagatgagtatttgagagttccttctatcattaccctagttttgtacatattttactttccataacacagttttttttaccaagaaaaaaatagcagggggaagttatatctttgtcccattcattcatattcagcagctatttattaagctattctgaacactggagggtatcatgttaatgaatgaaaaaggtgttggaatttctattatgtgggagacaaatattagcatcatggttaagggcaccaacttctgtgtcagaccgcctggcttctcgtcctgacactgccacttactagctgggtgattttggactttttaattaaaaatatgtgtataataacagctgtctggaggctctagggagaatctgttttcttcctttttgcagctgctagaggccacctgcattccttggcttattggccctttcctccatattcaaagctaacaatattacccttctctgaccctgcttttgtcgtcacatctgtctgatctgatccagggcaggttttccagttttaaggattcctcatttaattagattgggcccacttggataatccagattgatctctgcacctcaaggtcctcacatctgtgaagtcccttttggcataggagttaacatattcataggttccagggattaggatgtaaacatctttgggtggccattattctgccaaccacagatttgaggagacaaaagaaggtgaatgtggctgagtccttggcagggaggagatgggactggagagggagccagggagagaggattctgtaggtcatcataagttttgaagttcctcccaacagtaagaggaagttatggtcagatttattgccccaaatctgaaatcagctgtttctccaaggagccctggttagctgttttaaagtgaaaaatggtacttaaaggccataatctggccctaataaggtgctcattgctgttggattggcagttgtttttaagccatttcaacagacagagacagggaaaaccattgttcaagataaaatatttcatgagcgcatactggtaacatccaagtctttttctggactacaacgtttttgcttaatgtcatagaacttatatccatacccctttcttccactccagaaatctcagttcagaacaacccagcataatttattatttgctttagccctcaccccacagagtcactgccacaggggtgtggggattgggaggaagaccatggagataaagtgtcatttttgctacatcgtatcaagcacacatactgtctacatgacttctctcttttgctgttgatcttgattacctgactgaaatagtgattggcaggtttctccactgtaaagtcacactttccccctcccttcatactgtgctctgaaaggaagtcacagtgagcagcctgcacttctgaagggaggagttatttaggcttcatctccttaaggggaaagtgtctacatatgttatttggaattcttccgtgcaggagggttatctgttttcttgcatttatttactcagccatttatatcattatggactcacagatacttatattatactttaggttctaatccaatactccttattttgttctccagttgttcctgctttggccattgggagcctgttccattgtctcttgtgtcctttcaacttgtcccatctttgtgggctggtgggtttgtttatttttgagcacttccttgctttccaatattgctagatgccctagattgatcttgtgtatttcctgcttcagtcttaggttcagccgtttctctggggaaccctggtcccctctgttggagatggtgttagaaaccacaagctggatgctggtgtgctcatttcgactgtggtggcattgcttttaggtcctctcagctgatggagcaaggaaatgtctgtgtgtactgacctgtgtatatacacatatcactaaatacttctgtatggaaccatttgtttctgtgagtccacactggtgtctccagccctaatcctttaccccgtggatcactcttgcgttttccctgctgtctctcacctcccattccaacagtgagaaacgtggctcccgttgcctgtggcacatttgcctacttgttcagtacatatgtgtgtatcacagtgttggaattgccatctcgccctatgggaaccactgaaacaacgagagcccggtttttatgaatatacacagttccttttgcctttagtcttgtaactgtagactgggccaacaggtgaaagtttctttgggcaggctgaaatgagatcctactaccttgagaacatcttaacagtcagatctacagggtgcagatttcatagcttccccctggcagttcttccatcacttgtgagccctggctgttttattctgcctaagccaaggcagcctttgctatcctgacttgacacagaagagttacttagtaactgtgttcatttgctagggcttccatagcaaattaccacaaactgggaagcttaagacaacaaaaatttattctctgctcacagaatccaaaaccagaaatcaaggtgctgtcagggctgccctccctccaaaggctgtatggaaagtccttccctacctttttcagcttctggcggctccaggcgttctgcggcaagtggtcgcacacctcccggctctgctgtgtcttcacatggccccctcctcggtgtctgtcttctgtccctcataaggatatttgccattggattcagggcccgtgtagattgcccaggatgatctcatctcagcttccctaattaatcacatgtgcaaagtccctttgccgtgcgaggtgccatagtcaaaagttccagggattagggcatggacatgtttgctggggacctttgttctgtcagcctcactttgtgatgcagcagcagtcgcaggatcagagcagatccccaggcatttttggcagagtaagaccaggtgccaatccccgaggtgtgtttctgctgctcttatacaccgaggcagacccatcaggtctagacccagcaggcccctctttcctcagcgctgaagggagggggctttgggctgacaggagacctaagttccacgtgtgaattccatcagcagaacggtgctcagaaccttctgattcactctgtaggggcagaaagggggtgatccctctctaccctgtcataagggtcatggctgacaccccaatgacaaagattaacaatagaaaagcaaaacgtgttcaatcatagttttaaatgacataggagctttcagaatgaagacccagagacccagggtgaactctccagattttgcttagatgtgaagaagcacagaccgccatgtggaaattcatttggaaaaaagggtgtgagctgatggaaatagaccgagtagggaagcccagcaaggcctgtctcctcaggttcttcttggcctctctgttgtagcatttcttccttccaggaatggggtaggaccctctggaatgagggtctcattgtccaaggtctttatggccagctgttatacagaaaggcatggggaaggctagagagtagtatttttaggttttatggctggctttggggaaaggggttctggttcctgtcacctgcactggggaagagaagttctggatcctgtggtttgtcttgggggaggatgagaggggcaagacacacgcaggagaaagtcagagagactgagctgctgaacccctcaactcctaggccctcctctccccacagctgtgggtactcctgcctccgtaccctgggggtggttttgctgcagttgctcttttatttgaatttcatgttattttgtcttgcataattaattgtttttgcatgctagcctaaacactgcagggctgtgagctctgattgggtgagaaccatgccttcctcattcggagtcygccatcatgccttccacatagtgggcacccagtaagaaagaactcatttccagctagtcgagagtgtttttacagaactgatgttctgagtcaggccagagtaaattagagtaaggaagagtatatgcgggaatactccccatattatgctgtgttcctgtccatttttcaaatgaccacatttacttttcaagcttttgagtgttaattacctcttcctgctgttgtcatctgtacttgggagtacgaggcaggtaagttaaagaaaattaatatttttacatctcatgatggttttattaactttccagcattaaatgaggtttgaaaagtgttctttgagccattattgaaaataatcataactgcctgctttgaattactcttcctcccttgatttagttttctgcaaagttagatccagattataaaagcctaataaaaacttataagaggagattagtatatctcataaatgaacaaagaatggtttgacggcattggagggaacattgacgaagtctaagtcatggttaacgtggtaattttaggaagaattgtgaacagcaggatcttttacaacagaagtcaagtagactcacaggtaagccagcagaaccagggttccggggcttaagatcagctgggatataaatgaatgtactgactgtgggagcttgccagaagctcggttacctgcctctcactggttttctcgagcctctgtgtcacttyccatctgggctaactggcagatatcttacgcaaatgcgacacattctggactctcaggttgcggtgtagtggtggcataagtggatgttttcattatgtagaataaaaacaatattggcagaatatctataacaaagacatcttgaacaaacttgtgtccagggaggtgctctctccattggcagtgtttgagattagagctgtagaggtgaaggtagccactaccgtgggaggaaaagaggagtgcacttggtgttcggacatttccctgtggacgcccagatgccagtatcgccttatcaaatgaatggttttcagagtcaactttgtgatcagggctctcttagaaaacatccatttcccttttctatctttcccttctgatattttagttgtgcctgagtaaataacgaacccctggtgaagaaaggcaagtgaaaatatcattcccaccctttattcataacaattaggtacaaattggccttgaatttggttcctgcagggatagagacacatcccagttgatgaacccttcttccctccctgctgccctccctcctttccttctccccttcatccctccctactttccttctcccctttctctcttytttttcccttttcagcattttactgtgaacatttccagacatactcaaaagtacagtatagtaaccctcatgtgccacccacccgggatcagagatcactgcaccatactggctttgccatgcttgttccacgtgccctcctccctttgtgttttggacttttgtttgcttgtttctagagttttgaagcaaatgccagaaatcatgtcatttcacccccaaatattttattatgaattttgagggttttttacataaatataattctgtccaacaatgaaaaaatattccttaacatcttttaatattttatcccaatttcctttctttttctttttatttatttatttatttatttatttatttattwtatttatttttgagatggagtctcgctcttgtcacccaggatggggtgcaatggcgtgatcctggctcactgcaacctctgcctcttgggttcaagtgattctcctgccttagcctcccgagtagctgggattacaggcacccaccaccacgcctggctaatttttgtatttatagtagagatggggtttcaccatgttggccaggctggtcttgaactcctgacctcagatgatccgccgtcctcagcctcccaaagtgctgggattacaggtgtgagscactgcccggcctatttttctaaaacaaggtctgtacagttggtttattcaagtcagaatttttaaatcccatctattgtatttggtttatgtatctcttgtctcttttaaaaataattttgtatgccaggcattaatttgattcagagtgttcttattcttttacctttcatttttaaactgttttagagtagttgcatgctctcatgctttcattcattattattaagtttacagtaaaaccaacttgtttgtacaatgtgaatagctttaaaatgtgtggattcttgtactggccatcaccaacggtatacagagcagtcccatcaccaaaaagccaggaaacaaaacaaaccctccctcattctgcccctttgtagtctaacccaccccttcctcaaaccctgacagctttgatttgttcatcttcgtatgttgtgccttttccagaatgtcatgtaaatgaaatgatataatatgcaacctttgaggctgayttttcacttcgacgacaactttgagatttgtttgtgtgtatgtcctttcttatcgccatcgtctggatgtactgcattgtatgtatccattcacagtggagggccatttggattatttacagtttttggtgattttgaatacagctgctgtaagcacttatatacaggtttttatctgaagaaaagttttcatctttctagggtagattcctaggagtgcaattgctgggtcataattttgtaagaaagttctagatttaattttataagacactttccaccatgcctgtactgctttgcattcccacccgcaatggtgagagttccagttgtttcacatccttctcagcatctcatgttatcaatttggtgtttctttatttgagccatcctaatagatgtgttatttttattaggtttttgagattacaaaaatttgtttttaataattctcttacaagttattggattaaattcatatasctgttttcaaaataaatattggttttctgattttttacattgaaatatggtaagtatactgaaaaagccaggatattatatagataagagtcattctcaaatctcactaattaagagattatatttggcaaagtattacaaaataataactgaattcacaatgcattttgcaatgcaagatccattcattatatgcatttcattcctgagcatctcattcctgtttgaccattagtagtagtaactagtagtgccatgtttgcttttgccatcagttttatgctagattggatcggtcgatgaatagttgattacatgagaacaaactggatgtcagcagagagtaatttgtttgaatgccctttaactgtagcaaacaccattgtagygtttgtttgtttgtttagacagggtctcactatgtcacccaggctggagtgcaatggcatagtcacagctcacagcagcctcgacctcctgggctcaagtgatcctcctgcctcagcctcccaagtagctgggaccacagttgtgcaccacctacatcctgctaacttaaattttttgtagagatggagccttgctatgttgcctgrgctgatcccatcatagtttttttaatgggctgctccrgtgtgtctgaagcagtagtcaaagtttgcatttgaatacctttttccttattaaaacatggtgagctcaaagaagaaaacaagtcgaaatttgtgaaacaaaaatcatgcatctatctctttgtctgatttaggaacagtagtctctgatcactattggttgaaagtctggagttgactcctagattagttactaaaatgccactgttaatgtttgtcatctctcactcctcccctacgatgaaactgggaaagtctctgggtacacaggtcattgctaatggaggtccttctgtaaattcaarcctcacccgttaactgctatggtataggctctcagttggtggtagtatttaaaagacacagaacgaagattcctgtcatctacttggaagaacgttagcatataggttttattttgtgactggaatctccctgtttttccttctgaaaagttgctggagggttcgacctattggcagaccttcctttctaatatagggacatcacaaaggaaaaactgagctgacaaaggaagactgaggacagacatcagatgggctcttgaggttgctgtggctgaaacctcagaggccaagtgtagggaagatttggtttcaagtgttaaattggatagatttctgtctcttttttttttaatacacataagtatgatttatatattatatgatattctggaggaagcagttctgttaatttctttttattagttcagcttttattttagatacaggaggtacctgtgcaggttttttacagagcatattgtacccaggtagtgaacatagtactcagtgggtcattttcaacccctgcctccctccgttctctgctctagtatcttcactggctcttgctcccaggtttatgtccatgtgtgctcagtgtttagctcccatttataagtgagaacgtggtatttggttttctttcttttttgagatggggtctcgctctgttgcccatgctggagtgcagtggtgcaatctcagctcactgcaacctctgcctcccaggttcaatcgattcttctgcctcagcctcttgagtagctagaactacaggtgtgcaccaccacacccagctaatttttgtatttttagtagagacagggttttgccatgttgtccaggctggtctcaaactcctgacatcaagtgattccaccggcctcagcctcccaaaaagtgctgggattacaggtatgagccaccacgcccggccaggttttctgctcccgtgttaattcagttaagcttatggcttccagctgtatccatgttgctgcaaaggacatgatttctttctgttttatgactgtagtagtccatggtgtatatgtgccacattttttgtccaatccattgttgatggacacctatgttggttccatgtctttgctgttgtgaatagtacagcaatgaacatatgagtgcatgtgtctttttggtagaatgatctattttcctttggatgtgtacccagtaatgggattgctaggtaggtctgttttaagttctctgaaaactccaaactgctttccacagtagctgaactaattgacatttccacagtgtataatcattcccttttctccacagcctcgccagcatgtttttttttttttttttgactttttgataatgccatcttgacaggtgtgagatggtatctcattgtggttttgattttcatttctctgattagtgaagatgagcttttttgggtatgtttgttggccacttgtgtgtcttcttttcagaagtgtctgttcatgtcctttgcccatttttaatgggtttatttgttttttgcttgttgatcctgtgttcgagtagtttttgttttaaaactaacatattaggccaagcacagtggccctcacctgtaatcctagcattttaggaggctgaggcgtgtggattgcttgagcccaggagtttgagaccagcctaggaaacatactgagaccccatctctcaaaacaaacaaataaagaacctaacatattaattgaccattacatctgttgggattggaataaatcagaaatagtaaaggattagtaagggtgttacatccattggactcaagtctttgttttgtttaaaaagttatatatgggtctcttttaaacttctggcttattgagattgtttcaatgaagtcacatatatgcacatatatgcacatatttcatgggatgggggaaggggtaatggaagagtattgggccttagtccagggtgtttagaataccagactaatatagctgctgccccctggtggcagtgtagtaaacagtgacgttcaaaggtaaggacttgtggagagctaagtccagtggactgtgggtgtcaagaggattgtagaggaaactgggaagatgccgcttctctcccactcttcttgtgattgctacctatatggtcttagaaaaatcttttagttggattgaagtgtagatttcatattcaactttaaaatgtactttctaaactttttccagccttaataccctatgcttctccaagggtattaataaaagatgccattatatagcaaaagatgtcaagttctatttttttcctttagcagctgtatcctaagaaaccccagatattcgttcaggaaagcaagttctagagtacaccctgaagctagatacagctacagctctgggcagcaaaatgcataaatgtacctgcagcacagttcatcattaatcagtttgaggactctgcattcttatgaaaagcttacatcatctgaaaaatgttttttatcctggtgtggtggtgcacgcctgtagtcccagctactctggaggctgaggcaggaggataccttgaggcaaggagtttgaggctgcagtgcactatgatcacacctgtgaatagccactgcaccccagcctgggcaacatagcaagaccctgtctacaaaaataaataaatgttttaaacattaacacataaattttaccatcttaaccatttttaagtgtacagttcagtagtattaagtatattcacattgttgtgcaaccaaccttgagaacattttcatcttttaaaactaaaattctatatccattaaacaactccccattttccccgtcccccagctcctggtaatcaccattctgtttcctgtctgtatgaatttgactactctaggtatgtcataaaagtggaatcttacagcatttgtctttttgtggactggcttattttgcttcgcatagtgttctcaaggcttatccttgttgtaggatgggtcagaatttccttcctttcagtcttttcaaggctctgtaatattccattgtgtgtataccccacattttgtttattccttcctctgtcagtggacacttgggttgcgtccaacccttggctgatgctgggaacgtgcatgagctatgtcatttttagtatactgtgcagaccaatgcagagaagggcttatacaggtttttcctgcacacaaaaggttaaatttcataataaagaacaccagtcaaccataccagataactagtgtatggctttttgtatgtttgagtaagttaaaaaaggttaagacttattggatacaagatatatgcaaggcattattatatctgtgatatattctatttagtccttgtagttctgtgatttatccttctctcagagggagtaagaattattgagatcatgtgtgggccagaatgtatatatacatacattatctccatacatcaatgtttgaggtgggcattattatccccatttgtagggaattggaactgaggttcacagagatgaaacaccctgaacaaggtcacacagctgaaacacggcagggttttacatgactttgaaatgaagtacatctagttgtaaagtgtgtcctctgggccgcgtgcagtggctcatgcctataatcctagcacttggggaggctgaagtggcaggattgcttgaggctagaagcttgaaaccagcctggccaaatgagaccccgtctctacaaaaattaaaattaaaactaaaaaaagaaagtatgttctctgtctacaccacactttcttctgctgcacagcatacacatctgtgttctgaaggatattagagcaatatcaaagaatggcacttctatatgatcattagaaaaactgtaatatctttgcattaaatacagtcttttcaattttccttgcaaagacacagcatcagtttggatgagttcatctgaaatgtattgccaaggcttgcctgctgggggattttgcaaaataaatctccctacttacaaaagtgtgcktctcatgtgccagttcccatgtatctgaggttatcctcctcgacactgttatcttcccttttttcccttctttcctttggattggcagagagctaggactgttgtcactgctctctgcttccctgtctctttaatgccatggtgttttgggctggagctttgatccattctggcactgtgttttcacacagctcaagggctataaactgtcctcatagggggtcgttttcttggagactgagcaatctctcggggaggccaatcacaacattttcttacatatggaattattagatgagcaaataagtagcgatacatcatctgagcaggcatttaagcctaagattccrcgtttttgggtatccttatagcagcaccccagtctctgtggtacaaatttactgtattagtcttttctcatactgctaataaagacatacctgagactgggtaatttataaaggaaagaggtttaattgactcatgttcagaatggatgatgaggcctcaggaagcttataatcatggcagaaggagacattccttgggattttataaacctagaggatgggtaaggacccagactgcttccagagattcatttgaggtctgatataatttggctgtgtctccacccaaatctcatcttgaattgtagttcccataatccccacatgttgtgggagggcaggtggacataactgaatcatggcagcggttcccccccatcctgttcttgtgatagtgagttctcatgagatctgatggttttataaggggcttcccccttcatggggcactcattttccttgatgccaccatgtgaaaaaggacatgtttgcttccccttccgccatgattataagattcctgaggcctcctcagctatgctgaacacgagtcgattaaacctcttccttttataaattacccagtctcaggtatgtctttattagcagtatgagaatggactaatacagtaaatttgtaccacagagagtggggtgctgctataaggatacccaaaaatgtggaaaccactttggaactgggtaacaggcagaggctggagcaatttggagggctcagaagaagacagtaaaatgtgggaaagtttggaacttcttagagacttggagggctcagaagacaggaaggtgtgggaaagtgtggaacttcctagagacttgttgaatgactttgtccaaaatgctgatagcagcatggacaataaagtccaggctgaggtggtctcagatggaaacgaggaacttgttgggaactggagcaaaagtcactcttgttaygctttatcaaagagactggcggcattttgcccctgccctagagatctgtggaactttgaacttgagagaggtgatttagggtatctggtggtagaagtttctaagcagcaaagcattcaagaggaagcagaccataaaagtttggaaaatgtgcagcctgacaatgtgatagaaaagaaaaacttattttctggggagaaattcaagcccactgcagaaatttgcataagtaacaaagagccaaatgttaatcaccaagacagtggcgaaaatgtctccagggcatatcagagacattctcagcagcccctcccatcacaggcctggagacctaggagggaaaaatgcttttgtgggctaggcccagggcccacatgcrctatgcagcctcgggacatggtgcccccctgcctcccagttgctgcagctccagctgtggctaaaagggtccagtgtaaaggtcaggccattgcttcagagagtacaagccccaagccttggcagcttacacgtggtgttgggcctgtgggtacatagcggtcaagaattgaggtttgggaacctctgcctagatttcagaggatgtacagaggcacctggatgtccaggcagaacgatgctgcaggggcagagccctcatagagaacctctgctagggcagtgcagaagggaaatttggggttgaagcccccacacagagtccccactggggcactgcctagtagagctgtgggaaaagggtccttcacactccagagtggtggaaccaccaatggcttgcaccgtgcacctggaaaagcagcagacactcaatgccagtctgtgaaggcagctgggagggaggctgtaccctgcaaagccataggggcggagctgcccaaggccatgagagcccacctcttgcatcagcatgccctggatgtgaaacatggagtcaaaggagatcattttggaactttaagatttaatgattgccctattggatttcagacttgcatggggcctgtagcccctttgttttggccaatttatcccatttggaatgggtttatttatccaatggctgtaccttcattgtatgtaagaagtaactaacttgattttgattttgtgggctcatgggcagaggggacttgctttgtatcagatgagactttggacttcacttttgagctaacgctggaatgagttaagactgagggactgttgggagggcatgattgtgttttgaattgtgaagacatatgatttgggaggggccagcagtgggatgttatggtttggctcatcttaaattgtagttccaaatctcatcttgaattgtagttcccataatcctgacgtgtcatgggaggcacctggtggagataattgaatcatgggggatggtttctcctatcctgttctcgtgatagtgagttagttctcacaaaatctgatgcttttataaggggcttgccccttcactgggcactcattcttctccttgatgccactgccttgtgaagaaggacatgtttggttccccttctgccatggttgtaagtttcctgaggcctcctcagctatgctgaatgtaaatcaattaaacctctttcttttataaattacccagtcttgggtgtctttattagcagcatgagaacagactaatacaaggtcttcagtaacccctgacagcaggatgttggccaataaatataaaaagtgggattggtagaaattgctgattgcaaccaaatatccattctcttctttcttaattactggtcctgttttattcagtgacccatgtgcctagttatggtgaatgagaggtaagcagaaatgtgtggggcttccagggaggttttgaaaaggaacccgattcaattggaagtagggccctggttcttcacctgccctgcctcatgccacctcctttgaatgtgacattatggctagagctccaccagccttttttgtcttgtgagggaagatggtggtacctgagattagaaattagttaacacatagaaggatcagtcagatacataactgcattcaggctagtgggagccaggtttcccagtgtcaaagaagagagttattaatacagaaatgcagaaaactggaatgaatcctgtgatatgctttgggttgtgtgtgtttgtgtgaattcatggttttcaataagtgtagacagatatagaagtgaacatagatgtaaaggtgtaaagaagtgaatgtaagtgtgcgtgtgtgtatgtttatatgtggatacaggcatatattctgctggcgcaggggttgtggacagatgcagcccaaagacagcacaccctgcacccagatcttggcatctaaataccatttgctacaagagaacaagagctccttggagagagggctgatgccagggctgggacagggaaagtctaagatgagcctggaacatcttgaaccagaaagcaatggaataatgaggaagatgggccaaggggacagagaagcttgctggaattcaccccatctgtccaaaaggggacaatgtaagcatcaaaagaaataatgatagcattgaatataataggaaaccataagtccatgtagatacaaataaataaatgaacaagtggcaggtttgatggtgaatgagatgttgcatggtttcaaaatccctcttcataaaatgcttaactataaagggcaaaagagtaacttctctgtggagaagcctggcagtcaccaccttaagtgatcagagtgaatgtcatcaataatggagcaagttgaaatcatatggtgtctgataggaggcagtgagaagaacatagcatcatttcggaaagattcctgctcaagatataccatccgaatctaatcaggagacagcatcagacaaaaccaaattcagggacattcaaccaaatcaatggcctgcaatctttaaaggatcgtgaatgccaaagacaggcaggaattgttccagatggaaggaggctaaaggacatagctacatgcaattgggattgtgcactgggcccttttgctgtaaagcacgttatcaggacagttggaaaaagttcaaactgtctgcgagaaggtggtaaacttagtcacaaatgctgatgccctgatgtcacaggttgtagtgtagtgagatcagatgtctttgtgggaaacagacatgactgtgttcagggataaagggcatcaggttggcaactaaccagtggtttactccctgagcagacacttcttaaatacctaccacacccagttaccagggctgagagccgaggagcatgagttgctggtgcccgggcccccagggatctggtaaaggggacctcggcagccgcaaggccaggggcaaagggcagcagtgtcccagggtcagttctgcctctagggctcacggtgagagacatggtaccagaaggatggtgtttgaagtaacctggaagcacaaggaggattttgccaggcagagtgctgaggagtgaagagtgtgaagggcctgaaaggcagtagcaaccgagaaagcaaagaaagtaccacaggcagtgtgaggcatggctgagcggcaactggcctttgtgagcacgtgaagacatttggattggccctctggacttatccactgctgaggaacaaatcacccccaaaattagtgactgaaaacaacaaaaattatcccacagtttctgtggctcaggatctaagagtggcttagctgtgtgattctgacttgggtctgtcacaggctgcactcaggtgctggctgcactgtggccttctccaggcttgacttggggagacctggagctcacttccctgacagctggcatgccttgrtcctttctgactgttggtggagacctcacttcttctctacgtggcatctccatggaaatgctcatagcatggcagctggcttccttcacagtaggggatctgagagcggmagagagctcccaggacagaagccgcagtctttttataactgaatcccatcacttcctctggattgtgtttgttggctgtcagtcactaaacccatgcttggaggggcaggaatcacacagggacagggatgccaggcatgggcttggtgggtgccatgtgagagtctgcttgccacacagaagtccccacagctggacaggcaggggcacatccaggcatgcatgttggaggtatcactctagctctgagggggagcagcagtgaaactatttgggagaggatcacagaggacagaattgagtggggaagaagaaatgggcgtcatcatcaacgtaaaacactgctcaagcagctggggaggaaaggggggttaacctgagtggttagaaaccagcttctgcagagatgcttttgcagaatccytttgctgtgaaagctacaaggcagcgacctcgtttcaaacacctggtgtcaccagcaccacgttttaaagttgtgaaatatcagggctgttattttttcagttatgtctcgtaagcactactttgccttgactgtcaggagtcagatgtgcaaatgaaagctgttaacgttgtcaggtaggttgactggaccaggctttaaaataccaactaatcccttttgacactctgatctttcagcatgatggttaaaggattgtgtctttccttttgaaatctcccagttttttgaactctgatctgagcacaaattattttaaagaatgaagttttccctgagattttagatttttcatctcaccaagccgctctaaacaagacgaaccgtgaattcttagagtagagccacatacgcagtgggaacaaggtcaaagattgggaaggaggcggcggccatcccctgtgaaatactacagggagagcataccaggtctgtatcacaacaggcttttccttgcatcattgtgcttgaagttaaaaacaaacatcacaacctccctttaaacctgtatgttccctgggaatagtagcggtctggagtgtggttaaaatgctgtttctggaagggtgacctgggccttgggcttccctcccccataaaggcctggcttctgctgggttcaggcccagcccccccgccccctgcccggggcatagagcactcagagctgggtactgcatgatgctggtgacaccaggtgttgaaagtaaaaaatgtaatttatttccacacttttcaaatggccattcctgtggcttaatatttgtacttcggtcgaccttgaatcatgaaagtaaaaacataatgctcttagaaaatgtgtactcagcgttatttaggcaacagtctcgtagttaaatagaatgataagaaatttaaagggtgaatgtgtactaaacttggaagggctacctgttagttattctaaggctttttgtattatcttcattttcacatattttgttttcctttttgtataacttggataatttttttaaaaaagatgtttatacaaatcttcaatctttaatacttggaaaattagctcttctggttctttgaacttgccatgtaggtgaaggttgaatgtaagtcttttttaggaaaacctgtgaaaatgaaggagtgccccttctctgtttttaaagtatacagagcatcatgaatcctctttaatctaaaagttagtagttcgagagcatcactgtaaaacagatagacccttcccacaatcaatgattttcccaaagggtaatcaccagaatcgcctggagagctttgaaaaatactgtattttatttgaaatgtagattcctgcccccagctcctaaattactaaatccaactctcttgcgagggacctagaacatcagcgttgaagcttcacatgcattttgggaactcaacaggcgtggggagccccagccgcaggtccagcccagggtggccacaggcaccgagactgccccaggcttccctccacccagtccctgtcttttggttcccagtagcccacaggcccccaggggttccaaatctctgttccctgcacacgcctgggctcacgctccttgcctggaaggcacccacctcctcctttcccctctttccagcatggtttttaccctcctccaggggcagtgcccaacctgttgggggctgcatccaagtcacccacacaaaattcattcttctctttcctgttccttatgacatgctgaacaaacccttcactgtggcattccacacatcatattctaatagtagattttatctgtatcatcttttaaagtttagtttaattaattaatgtaaagacagggtcttaactgtgttgctcaggctggactcaaactcctaggctcaagtgatcctcctaccttggcctcccgagtagccaggactacaagcatgtgccaccatgcccagcttggaccactttaaaagatttatttacttttaatttagaggtttttttattgagataaaattcacagaacagaaaaccatttaaaagtgaaggattccatgattatttagtacataatgttatgtgattacaacttctgtctagttccagaacattttcctcaccccaaaagaaagaaacctcttccacactaagcatccctcccattcttccatcccgagcccctggcagcccccatccccctacctgtcactgtggctttacccgtgctgggtgttctggatcagtggatgcatgtcacatgtgccccatgtgtctggcccctctgagtgaggataatatttgcagattgatcgtggggcagcatccatcagtgcattcattcactagggttgctacaaccaagtgccacagaccgggtggcttcaacaacagaactttctcacagttctagtggttcagaagtccaagatcaggggccggcagggttggtttctctggaagcctctgcttggcttgatttatataagtaagattgtgtggagtctgcttgcaattcaaggcaagtaacgctttgacttgctttcttttttagcacatggcagtgggggcccaggcaggggaacgggagctctttttttggggttgttaggagtttgaactctggagtcaagaaaccacccaagtttaaggctgtgccttttcttttttcttttcttttttttctttttttttttttgagacattgtctcgctgtgttgcccaggctggagtgcagtcgcgtgatctcagctcactgcaacctccgcctcctgggttcaagtgattctcgtgcctcagcctcccaagtagctgggattaccggcatgcaccaccatgcctggctaatttttgtatttttagtagagacggggttttactatgttggctgggctggtctcaaactcgtgacctcaggtgatctgcctgccttggcctcccaaagtgttggaattacaggcgtgagccaccacacctggcctcatgtgcctctcttaccagtggtgtgactttgggtgagttgcctgtgctgtctgtcccagtgtcctctgagtgctgtgaaggtgggtgaagtatatttrgtgaatcacaggtactgcgtgaggtgccaggcatgatccttgctggtgccaggtttgaagaaaatggtgtttgtgcaaggaaaaatttttttttctgtgcaaaactaaggtgtatttatgaaaatggaaatcaagtcttagcccttcaccgagcttagttgtagagaatatctagggtagtttctgtcggggtccacacaggcagtggacaggggcttgccgttttatagaagaataaaatttcacaacttctgtgtacttccagtaatttgagctttaggttgaagcttgcraggtaggcaaggtaagagtttctgtccctatttagaggcacctaaaccccagtgaggcaaagtgagtcacccaggagctgcctggaatctggtcctttcgaacccactgttgggcacagcctcctccggggcatgcagactctgcygcatgacctttgagcagagttaatgatttcctatttgttttatttcattcaaaacaactgtcattgcttgaacccacccatgctgggcacttgtatactcccaggggatcccactcccccactctgggaagtgccagggtctcactggacagagaaggagatccaggatgagaggttcagtcatttgccaaggtcgtgagccccagccccccactgagcagcacctctgcccctccagggtcctgggttggaggtgtgaagggcatcccrggccctcccactgctgggttcttctaagtacaggaatgtctgctgcacacatcttctgaagatagcattctcttgatctgagaagggaaccagtaccacttgctgggtgtttagccagcactgcacatttcagaatctcatcctggtgttaatagccccaggtaagacaaggccacatgtccaggaaagccttctgtgggaagacactgcattaagatagctcaaaatcggggtgaagaggcaggaggcagggcttaccatcttcatccatcaactattaactttatgatagaaaccatttcagtgttatttttgtttgctatggatctatacagaattgcattattttaatgctttattgagaaataattcacataccatacagttcaccaccattaccaagtcagatgtaagcagctctctggggctgttcctaatatggaagtgttgcttataccagaaaatgataaccaaaatgaaatataacacaacgttcaaggaaagcttgtagataatcattggtaaaataatagcaatggagctggaaatactgaaatggagaggttaaaatgcccggggcgggggtattgctgcttgatgagacttaggagggcgtagccacaagcttcaccatgaatgtagtcaggagccgggggaagaggcacgtgttcctgggctgtgtggatgagtggtctaggaggcgtgcttgtgatgaaatgacagcccaccagccmactatcccaggccctggaggagatgcggggtgcgcagcctgggctgtcagagatgttcacaattgcaaagattctgacccatattttgccccacacatccgtcttgctagagcatgtgtcctggttctttagaaaatcactccgttgtactttaggacaccatgtcctaggaacacactgacaccaaaaaccttggccaagagtcagaaaaacaaagctagattatgtgagggaatggaaatgtccagaataaaacctggggaggctaaagggatcgcgtggagctcagtgacagcagagctgcaaagctgcaaccctcctcagccaggagtggccccagtgaaagcaatggatacaagcccacagggcacgttcccagcgcagccctcagggcctgggagggccacacagctcccacggatgctcactccctgtccattccctgttggccctggaagtagacttgagttaagctcctgggtaaagggctaagaagggagaatatgaagagacttctagccatattcactcaaataggagagaggaacagacgggcctgtgtggcaaagaagaaaaggcttaatgtttatggagcagcaacacgctgcagaaaagcgagtcagatcctgggggatcaaaggactttgttcagatgctgctgttgaggaagggcttctccccaaaataattcagcttttttgatttacagacaaaatttactcacttactgtttaaagttcagtgcgtttttttaaagggtcaacgaatcttgataaatatatatactcatgtaatcacgaccgcattcaagatacaggcctgtccatctccccaaaagcttcctgcggcctctttgcagtcagtctccctccccagtaacagccctttgcagcctctgctctgcccccatggcttggcttttcctggatctacccggatctaatggaatcatacgggatgtagtctttggcgtctggcttctttgactcagctcatgtgtttgagatttatgcatgttattgtatctgtacacctcagtttgtttaagcattctcaagttgatggacatttgggttctttctagttattggctgttaaactggtatacataactgaattacatgtaacacaaaatctttttaacagctagatttctttttttaagactttcctatcagccggctgtggtatctcatgcctgtaatcccagcagtttgggaggccaaggcaggtggatcacttgaggtcaggagttggagaccagcctggccaacatggtgaaaccccatctctactaaaaatacaaaaattagccaggtgtggtggcacacacctgtaattccagctactcaggaggctgaggcaggagaattgcttgaacccaggaggcagaggttgcagtgagccgagatgttgccactgcaccccagcctcggcgaccgagcaagactctgtctcaaaaataaataaaaataaaatgtacaggtcgggcacggtggctcacgcctgtaatcccagcacattgggaggccgaggggggtagatcacctgaggtcaggagatgaagaccagcctgggmaacatggtgaaaccctattctactaaaaatacaaaaattagctggacatggtggcacatgcctgtaatcccagctrctcgagaggctgaggcaggagaatcgcttgagccagggaggcggaggttgcagtgagccaagattgtgtcattgcactccagcctgggcaacagatgagactccgtctcaaaaatgaattaatgaatgaataaattaataagtaaaataaaatgtatagtccagtggttttttgggatgttgtgcagagctgcatttaccatcatcagagctgtgctctgactcataaaatggatcaccgtggtgggtttagaacactttcatcatccattaaagaaactccataaccattagtggtcattccctatttctctcctcctccatcctccacacccaccacccctacaccccaattccaggcaattacttgtttttgtttctgtatgtttgcctattctggagatttttcttttatttttttaactcctctcatctaactgtgaatgtgtgctctctgaccaacctctctccatcccctctccccctagctacctcagcctctgataaccaccattctgctcctaggaggtcaggtttttcagattccatatgtgagcaggaacatgcagtatctgtctttctaygcctggcttatttcatttcacatagcatcctccagtcatgtacaggtctttatgtggatatatgagttcatttatcttgggtctattccccaaagtgaaattgctgggttgtatggtaaatgtatgtttaactttaaagacactgtcaaactgctttccagagttgctgtaccattttgaattcccagaagcaatgtatgagcatttcagttactctacatcttgccaacacttggtattaatagtcttcaatgttagccactctaatggtatctctttgtggtttttatttgcatttccctaataactaatgatagtgagcatccatctgttcatgtgcttacatgagattcataggtctttggtaaagtgtcagtttaaatcttttgcacattttgtttgtttggttttggtttttttggagaggtagtcttgctgtgtttcccaggctggtctctaactcctgggctcaagcagtcctcctgcctcagcctcccaaagaggactgcagcacctggctgttttgcccacttttttttttttttttttgagatggagtttttcgttcctcttgcccaggctggagcgcagtggcacaatctcagctcactgcaacctccgcctcctgggttcaagtgattctcctgcctcagcctcgagagtagctgggattacaggcatgtgccaccatatccggctaattttgtatttctagtagagactgggtttctccatgttggtcaggctggtctcaaactcccgacaggtgatccgccygcctcggcctcccaaagtgctgggattacaggtatgagccaccgtgcccagcctttgttttgcctacttttaattggattgtttttcttcttcttgaggtgtgagagttctttgtatattctggataacagtcctttatcagatagctattttgtagatattttctctgtctacatttgccttttcatttactcacccgagtcttttgagagtaggtgttttaaattctgaagtcaaaacttattcatgttttcttttattatttgtgctttttgtgtcctatcaaaagatttctagaaagtttaactcttatatttggatacattttgagttaattagtgtatagggagtgagataagaggtttttaaaaatctattttttttgcatatggatatgcagttgttccagcaccattcgtttaaaagtctatagattccccattgaattactttggcatctttattgaaaacagttgaccctacaagtaggggtctacttctggactctgttctgtaccattgatttttttaactagtttttgttttttaattgaagtaattcacacaacataaaagtcaccactttaaagtatacaagtaagtgggtcttagtatattcacaaagttgtgcagcccgcaccactaattccatatcacgttatctcaaaaagaatgttccatcaaccttaatgcatatcttttctctaattccacactgtctygtttattgtaactttgtagttaagtattgaaatagaaacttcgggctgggcatggtggctaaagcctgtaatcccagcactttaggaggccaagtctggcagatcacttaaggctaggagtttgagaccagtctggccaacatggcaaaaccccatctctactaaaaatagaaaaacattaccaggcgtggtggtgtatgcttgtagtcccagctgcttgggaggctgaggcatgagaatcgcttgaacctgggaggtggaggttgcagtgagccaagattgcagtgagccaagattgcatcactgcactccagcctgggcaacagagcaagactccacctcaaaaaaaagagaaactttgttcagctttttcagtgttgttttggctattctagatccttcaaatgtttatataagttttattttttaatttttgtgggtacatattagatgtgtatatttatgggttacatgagatgctttgatacaagcatgcaatatgaaatacgcacatcatggagaatgggttatccatgccctcaagcatttatcctttgagttataaacaatccagttacactctttaagttaccttttatataaattttagaattagctcatcaatttctacaaaaaaaaaacccctgggattttcattaagattgtgttgaatgtctamctcaatttggggagaattaacatttttactgtgaaaattatccatcaaaacatggtatatctctccayttatttagatactaaaattctctcatcagtgtttggaattttcagtgcacaggtcttgcacatattttgttcaaacaattggaccctaagtatttcagattttttggtgatactataaatgataatggatttttaaatttcaagttccagttttcccctgytagaatatacaaatacaattgatttttgtatattggccttatatcctaaaaccttgctaacctcattagttctagtaaccttttggtagattttcttaggattttctgtactgacagttatgttaactgcaaaaaagatagttttctttctktctgaagtgtatgccttttatttctttttcttcctttattagcctggctagaacctcgaggatttagaagtaggaagagtggacrtccttgccttgcatccagtctcaagggaaagtacttgattattcactacaaagagaaggatgttagccataggtttttcagagacttaacctttttagtagatcgaggatgtcctctttgatttccagtttgctaggaatttttatctcaaatttgctgaattttatcaagtgcttaccctgtatttattgagatcgtcatgtggtttttccattttaatctgtttctatggcatggcaattcattgactgatttttaaatattaaactacgttgcattcctaggatgaaacattagtaatgatgtattatccttttaacatattgttgaattttgttagtatttgttcaagactcttacatttatgtttatgatggacagtggcctgtaattttttcttttctttttctttttttattttttgagacagcgtctctctctcttgcccgggctggtctttaactgctggcagatgatcctcctgcctctgtctcccaaagtgctaggattacaggtgtgagccaccatacccagatttttttctttttaaaaaaaacctgagatggggtctcactctgtcacgcaggctggagtacaatggcacaatcacagctcactgcagcctcgacctcctgggctcaggtgatcctaccacctcagcctcccaagtagctgagactgactacaggcatgcaccaccatgcccacctaattttttgtattttttgtacagacagggttttgctgtgttgcccaggctggtctgaaactcctggactccagcagtccacctgctttggcctcccaaagtgctgggattacaggcatgagttaccatgcctggctgtaattttcttttctaccaatgtctttgatttggtatcaggtactactggcttcataaaaggagttgagaagtgctcctccctctttgattttctggaaaattgtttggtatttattggaaaacattggtattatttcttccttaagtgttcaatagatttcaccaatgaagccatctgcctctgggcaagggtttttaactgtgagtagatacagggctttgcaggttatctacttcttcttgagtgagctttgatacttgagaccttttgaggaatttttccatttcagttaagttgtagaatttattggtataatgttgttcattatgttcccttattatccttttaacgtttgttttatagtgatgttccctccttgatttcttatactgatgatttcttttctctctctctcgtttacctataaaagtaatagagcagtacaatgattctcatatatccatcacccagtttcaataactatcgagcctttgcacacatgccttatcaattccctcttttctttgatatgctgacatattttaaagtatgttccagacgtgatattttcaaatgctagatacttccatatgcgtctctgaaaaaataaggatattttcttacaggaccacaatgccattaccataccttaaaatattaatcgtgattccttggtagactcttattacctagatttacctgtaagattttcctaagtgtctcaaaaatgtcattgtgtataggtcatatcttcaaatcagaatccaaacaaggtctgtacatttacccatggctgtacctgaaatcgttaatgtaagggaaatcaccctcactttttctaatgcaataaactgtcttataatcatttctcccctaaaatgcctcacattctggatctgtctgcttctagttggtatcatttaacttttctgcaataggagttttttcaatctgagaggactaaatgatgacttggaactttctgaacccctgagaaatgtaccttggctttcatcccctgggggaacataaaggaagggtgggcaactgtccatctcaagacctgggaaatatctggtttctgtgtccagttcargccaggcaatgtccatgaagcctttgawctccatcacctctgaattccacttaattatgtgtagtactaactatatgtagtaattaattatgtatctttgttcattgtgtttcctttgtgtagctctggcccttgaaaaatctgtcctctactgttaatctttgtttttaargcttagtgtacattttatgaaagtataccatacgttagaagagtgcaagattcctgtggacacactgtgtacctggcccctggcacagaggttcattttggctgttactaccttttttttttttttttttgagatggagtctcgcttcgtcacccccgctggagtgcagtggcgcgatcttggctcactgcaacctctgcttcactggtgcaagcgattcttctgcctcaacttcccaagtagctgggactacaggtgcacaccaccacgcctagctaatttttgtatttttagtagagatgagctttcacattattggccaggctggtcccgaactcctgacctcatgatccagctggctaagcctcccaaagtgccaggattacaggcgtgagccaccatgcccggcctgctacttctttaccttcaggtaaacttgtcctgcagtgtgtgcccttgtctggccgctctcaggtggtgctgctcatggtgaatgccatcgtgttgctgcccctattcattcttgttgccatagagtatcccaggtataccacagttgactggcccatttgactgttggtggacatttcagttgtgtctgctttggggatatgacacctggtgctgaccagcacattcccattcttgccattttggtgaacctgcattcacatttttgcctgcatctgcctgggagtggaattgccggtccttggggacacacagkctcagctttcctaaaactgccacgcagtcttccctggggattcactgcacaatattttaaaacccagatcttrccatgcacctcccaggcgtagtgccctcgaacggctctcatcacacagaagccgaaatctgactccataagataccatggaaggcccttggaggcccgggccctgcctcgccctgcctgctggcatgctttctgttcccccaacagcccaccgtcccctctgctcaggtccccctcccctccccagccacccgccacctggcctgcctgctcctgggtatccccagaggctctactgcttgcctgggtcgccctctcctgcaggacacttgacacctggtcctgatgcgggactcattgtccccactctagagtgtcctctcatcagcagcactcagcatctctgccaccccaccaggctgcagctttttacgaacaaggactgttgctttttctgtctttggatgcctggcccgtcctagatgctcagtacctcctgaatgagtgaatgaatgaatggcctgtcagccagcctggacgtcctgagcactgggcagatgatcttaacagaaacattaagtggctggcaggcactcctggccttagaaaacctttacatctagctttggtttttaaagttggaaagaaaaggactcaaagcacagccccttgcacaggaacaataggtggggattgataacaaggctcacgacaggtcaccgtcttgacatctcagaatggttgtgtttgctgggagaaccagctagagcttcagtctcttcttcaacagagaacttccccgtctgtttctcctagttgaccacagagtatgttggggggtggcgtgtagattttggatcaatccctggcttaaatccagcccataacagctttgctgtgtcagttaaataactcttctgagcctcagtttcccatgtgtgggatgggacagtaacacctgcctcgtcacggggctgttggaggcccagtttgtgaattcctcatttccccaggagagaacaaaatcagttcctggagagcccctgacagcccccatccattgaattttcttcttctctcctggggaaattagaaattcacagggcaagtttccaccaggctttgccttcctgagagatctggcctggaccacactcaaagcttgccctgcacatggctgggagaagggtcaagggcccctcaggtgcgggtggctgtagagccagcatggtctggagggagtgtgcccacagggagctaccccagccaggcagcacctcctttccttctggggtgctaggccaggggaggaggtatagcctacctctttgtactggtcttgccccctctgagagacagagacctgctccctagggaattgcctttagatgggggcaaagggaagggagagaaattccttaacctgaaaataagtataatcattgttatattaaaacaacgccaaatttgcatgaattttaaagaaaaaccctgtacatcgaagggatgggagcaccttctttgggcagctgtgccccgttcctcagcccttctctgcctgggcacaggtgccccctggacagcacagcctgggggtcctggattttaggggacccactcaaagggccaataaagggttgaacacttttaaggtgcttcaactaggagtttagctaccccttagctattttgtggttactgaagcatggcccccaggagaaatccctttttccttcttttctgkgaagttcctgggagccgaggggaagtctgttaataccagttctggcaggtgggaagaggctagtggcctcctcaccttgccacgggcgctggtccctccctggggaaaaggttttcttggcttggacagcttaggggcagagaggagaacatccttggttttatcctgtctgtgtatatatacattatgggtttttgttttttttttgagacagagtctcgctctgtcgcccaggctggagtgcagtggcgtgatctcggctcactgcaagctccacctcccggattcatgccmttctcctgcctcagcctcccgagtagctgggaccacaggcgcccgccaccacacccggctaattttttgtacttttagtagagatggggtttcactatgttagccaggatgatctcaatctcctgatctcatgatccacccgcctcggcctcccaaagtgctggaattacaggcatgagccaccgcgcycggccttgttgttttttaattargaaagtagttttggatgagagaaatgataaaacttttatatactcctcccaaaaaagttaaatgcctcacatgtgtgagctgttcaattcagaaaatggctgagtaaacatgattttaacttcatgactgaaagaacactgtaaatttggggagaaaaaacaacaactccataatgaaaaacaaagcggctgttctgctgtttctgaagcgagtggattggagaaagcgcctcagtgggaggagccgcctctctccctaataaccacacagcaacagctggggctttgcacgttctctcggggcattccactgtctcgggagtggcctgtgcgtgggcctttaagtgctttttcaaaagccaagtatatacccaaatgtgcttttaaataatgtctagggtcctgggttccacccccaacactggggaggccaaggagttgtaaacccaaasactggcgtgtttggctgcagcctggcctggcttttgtcrgcggtttctggctataatggtgcttttaaaagtggtgtgtgtgtgtgtgtgtgtgtgtgtgtgtgtgtgtgtgtgtagagtataatcggctcggatttaattcattcagcgcatccagtttccttagaagggccagtggtgtgtgtgtgtgtgtgtgtgtgtgtgtgtgtgtgtgtgtgtgtgtgtgtgtgtgtagagtataatcggctcggatttaattcattcagcgcatccagtttccttagaagggccagtccctccagctcaatgcctttttctggaagttttggcctcagaattcaggctgtccggccagcacacagtggccggccgtgcgttcacgttcaggactcacaggaatgtggcagatggacccactctgtgcaggggctgtagaagctcgctcagggacacatgccgaattgccttccccgctcccttcttccttgtagttgagtcttaacttcgctctcagccattttaattgaatttaacttggggtaattatacaagcactgaaaggatttgaatgctttgggaacaagataatttatacaaaaaaacttaatcaggcttaattttgaattctatgcttttatctttaaaaatgtttatttttttcaaatgtgtgaaaatggcattgtgtgtatgtgctcatgtgtgttggggatgaggtctcatctccttgggtgcactgacgtaagcaatggacttttctagagttgctttcctttcttttatctgccacctctggctatatgatctccaggtagttagcatctttttggagggtttaaactggttttaataatattcttagcgaaaggtgatgctgaaggcaaacctgttattactaccaaaacgagtcctgccttacagagcccactggaggcggagtctggctgggccctgacccagctccctgccgctggcacaagagaccagctagctatgatacaacttgttgcccagttttcaatggccagttgggttccttttagctcctgatttcatgtttctgggcagtgggatatagggccctgcctggcagtgccaaccagcagcgagccctggattagaatggcgctgtgctggtttgaagtggacagacgagcaggtagggccacatgggtggctgttgatttatttatttattgagacggagtttcactcgttgcccaggctggagtgcaatggcacaatctcggctcactgcaacctccgcctcccaggttcaagtgatcttcctgcctcagcctcctggtgtagctaggattacaggcacccaccacatctggctaattttgtttttagtagagacagggcttcaccatgtttggctggtctcgaactcctgacctcaggtgaaccacccgcctcagcctgccaaagtgctaggattacagccgcgagcccttgctcctggtccatgggtggtggtttctaagctgcgctcagcctccacgcgtagtggaggtggcattcctagggattttaaatttgacatcttgcagttgtatttggtggttatctttgaaagtattctctgaaatactttgactaattcatgctgatgcatttattctgctccacaatgttgggtggtggcctccctggttggctctcctgtggaccctgtgtcccctggatgtgcctgcagtctatcccaccctgttgtggctttgccttgcttggcctgggccaggaaggcctcttcccagatgtttgacaggagtgtggctttgacctctgtttatcagctctcggttcttacatttttttaattttaaactttaagggcacaagataattgttcctgtttatggggatctcactatttttgtacccactgtgtgcagtccctctccaggggacttgatcctcccaaagcaaccagatggctaagctgctaaatacagggcgcgctggcccaagcctcgccaggggcctcacctgtatctttaatttgtatttcttcacttttaagtaggtttaacttcctattcttacatattctcatccttctagaatattctgtcagcaaaccacctagagaagagaatgactgtgatattttgtaattgttttgtgcttcttctaacttaaagttggattctctatttctcacttaagaaggcaaaacagtaatataaaactatgttcatcaatacaaccttaagatgtttctaaaaaacaaaacactaatatatattttattcctgtttcaaactcaaagtatttctagcccaaaggttccaaatgaaaagcagccatgctctagaaaaatgaacagcagaaaggcacaggtggcattcccaggcctcccttgccttctgccggagttgaaacaatccagacctttgggagcacacaaggtagacgagaagttgcctgccatcagccagacctgggtgtcctatttaacaagtggagagcgggctgggacaagccacagattcttggcttttcccggctgcccggggttttgctgccccaggcagaataaacatattttgagcaactgccagcgtgtgattgctgcaccgtcttccagcaggcctggaaaaatactctaaaaggcaaaccgtttgctgtgtttcttcgtgggaactcactgcttagtcaacagctggtgtgcatggggcctgggtgggcagagaaggccctggtctccaccccagtgcccaggcctgcagggattacggccatctcatgcctctgggcctgctcgaccttgaccctgctgccaagagatgtctcgttcttgtcctgttttattgaatgtctccagaaagcaagtgagtgtaagggaagccagcacaaatctgtagaaatgctttggacagacttgggtacttgtggaaaccctaaagaaaagatgaggagcttcagcttctgattcggggctatgaagcctgctgagctccgacaagaacgcacacgagtgacagtaagcgcagaycaggcctgcgcggggcctgcctgcctcccgtgagctcattcagtcttgtttttagattaccttttttgaggtataatttacatacaacaaaatccacagattaagtgcacagataggtcaatgattttgacaaatgtatcccccatggaaccgctgcccaatcagtataaggagcatttccatctccccagagggccctgtgtctgcggcagcaagtaccccaccccctctggtctgggtgctgtcccgggaggtgagttttgcaggttcattgtcagtggctgtgatgggggctgattacatcccgcctggctactctgcacgtcctgcttctgccctgctcccgggcctggtctgagggtctggagacctggttgtcttgtgggaaggaagaggtggcagagccggcactgaatccagggcctatgaatgtgcccccagggctatgtttgaacctgtagggtttgagagacaaggagaacttgaaggattcccaacagcctgaaggcccatcgtgcctctttgggaatctgggctgagtgggatggccccttggcttcctgcagtatttatgaagtgcctactgcatgcgccgggccgtgccagatgacgtaggggggtgaaaggaagagaaggcgagacctcgccctcgaggagctgtggtttagaggcatgaggatgggccatgcgactcccttgctcgaaaagcaagaaaaggtgcagtcgagagacctagaagaggcggcagccctttcctctgctgactcgcagctcagcctcgcaacttggcatggagggttttagttgttaaaaactaaacattattttattacatattccatatttgttattatttattcagagacagggtctcactmtgaggcccatgctgcagtggtgagatcatggcttattgtggccttgacttcctgggctcaagcgatccccccacctcagcctcccaaaatgctgggattacaggcatgagccaccgcacccagtctatttccttattacaaaattctcagcatggagtttttcattcatctttatgttgtacaatatcagttttaagtttcagtgcatttaactcgtggaatcacagaaatgacagttttcataacttacacatgcgtatttctttttttttttttttttttttttgagacagagtcttgccctgtcgcccaggctggagtgcagtggcgccatctcggcttactgcaagctccgcctaccgggttcacgccattcccctgcctcagcctcccgagtagctgggactataggcgcccgccaccatgcccggctaattttttttgtatttttagtagagatgcggtttcaccatgttagctaggatagtctcgatctcctgtcctcgtgatccacccgcctcggcctcccaaagtgctggcattacaggcgtgagccactgtgcccggccatctatttcattcttatcagaaagttaactgagctgtttttcacctcttgaggtgcacatattctatcaacactgtctgccttcacctactgatgatggaggaaaagagggggaaaggcactctgggtggcccagcaggttgccctggctttctgtgtcattttccgagtatgtggttggctgacgcatgtgtaggaagggacatgatggggcctttggtgtctgaattctccgaacccttacttccttctgtagggggaacaggttctgcttgcaatgggaagtgcagcagctcacccaagcttcaccctaatgccagaaagccccacaccctgggtctaccacgatcccacactcctgggctctccactcacaggagtgctgtgttattccagcaggcttcgctttgcttacaaaatacaaagacaaaatcgggaatttcaggatagtggcagcttctgagtgccagttccatggcacatgccaggcaggcaggcagcccagggtgtgcttaataaaccctgagggcaccttctagattcaggaggccacggcagatgtgactggagcctggtatgagggcagcccaggccactggctgcctggggccctggagtgcttgggggcagtgagggggtgccctcctccaggggccctgggacgtggaggtcaggaaggaggtcaggaagggacgtgaaggctctgctgcccttgcctgggtcgccttgtgtgtgagtcacttcacctctgccccagcttccccatctgcaaaaggggggagaagctgggagtgaagcggcctcaccatgtggtttggagcaccaggtgaagaatgtaagtaaagcacttggcatggggtgggcatggagtcagggctctcccttgggggtggcgttgatcccccgtgagccacaggtaggtccggcaagtggagccaggttcctgaggccgtgcctgcaggttggccctgtgtgacgaggttgacggcatctccagtgttgggccgctggccgcctgcccagcatgtgttcctggctctgcctcctgctgccgcctccgctgcgccttctgagtgtcacaccaggaggcagcaggggctggcagcacctccgctcctgctgccgtgcctggaatttggggccatggccctggccggttctccatcctgcctgtttgcatagagctcgttccctggcctggcatcttgggattttccagtgattcctttccatacttgaagcagacatggggatgcaggggatggtcatgtctgcgttgttggtcactgaacattttaaaggtggcaacacaattgcctttaaagtgatatggcatgaaaaaaatcgttatttatatttggcatggccaaagagtaaaaactcaagggatggttgctgaggagcattcaggaggcctggggtggcatcagggaccaagtgtccgtttgatttcacagacccgtaagtgttcagtgtcttgagcraactgtgaagaggagaccctggcctctgatttcaaaggcgccagcgttttaccggggccggtgcagataatggaagaaaggtgttttgccagggacttttccggggtatgcagtggggctggtgaggggtctgccttagcaggaagcccttgcctttgctgtaaagaaactagcaagcgacaaaacgaaagcatcaaagagccaacaggatgcggcccgagccctccctggcacgtygccccgagccgcgcggggaagagtgaccttagggcccgcctcgcgcacacaggccaggcacaggttgaaagttcaaggcattttgttttttcacctgtttcctacagttctaagaaacttctgaagaattaatgtgtaactatatcagacactcggcgttttctccagggaaaataatgttacagtgggggagggaggggaagtggctacttgatgagacacaagaaggtttccataaagtaagaaaaaccctctctaggggaaacgtgcacaacatcgcatgtgactcttactccatctccaccatgtagaatggctgygtttgctcagggctggcacagtgtggggctgctggtggtcacagaaggactagagcagcagttggtgtccttgaaaccagtgtacagccgtgatcaccatgcccttcgtgagtctggtgggcccaggatctgctggggccaattttgacacgaggtattgaatgacaaaagcaaattaatgcagcaaatgtaaagatagagataagctctttgccatgccaccttctggaccaggagtttatgattctgayactatttctccctggccagtggcagagcccctctggcaggggcctgagcttcatgctacccaagtctaaatcattttacttttttctaacaaagtcttaacttgccaactggcagtatgcattgttactggcttgatatatcatgtggagaaaacagatgctttgacatgatgacatacagattttactaacatttcctcctgtcatgaaattttcatataaagatgaatattttcttgaggcaccatttataaaggtggtttttatgttagaagctggtgttggccaggcgtgctggctcatgcctgcaatctagcactttgggaggccgaggtgggcggatcacaaggtcaagagtttgagaccagcctggccaatatggtgaaaccccatctctactaaaaatacaaaaattagccaggcgtggtggtgggcacctatagtcccagctactcaggaggctgaggcaggagaactgcttgaacctgggaggcggaggttgcagtgagccgagatcgygccactgcactccagcctgggtgacagagcgacactctgtctcaaaaaaaaaaaaaaaaaaaaaaaaaaaaaaaagctggtgtctttttaaaatccttttgtaaattagtttaagaagagttaaacactagccctttccttgttcggttcacctggtctgcgtatgcatgcttttaaacgtgtaccaggcatatgaagtggttgtgatttgtaaactatcatcataaactcttaaatcctgccttttacactcttgccaccaggtggctaagaaaaaagaaatcaagaaaaaaatctaacagttatgcaaaggactcgtaatcactttcaagttctgcttcagtggtgaaatatgaaactatagacggactgcgtttcaagaaggagaactgctgaataagtgacaggcatttcaggcagcgcccgaccagatggacagctcatgagtcttcttattttctcaaatattggcaatgggaaaccagattttgctgatctaaagcttttggagactctctgagcctgttccacctccatgctgtcccctggatgccgctattgtccggaccagttagctttgggacagaggttcagctttggcctcttggatttccagagtggaggatgcctgaatcctgaccacagcagcaggccgcccttatccttaacacatcagcatcagggaacgacatctgcagagatgttcagtgccctcagaattggctctaggaacccaaagtaaaattctccaaactgatgttaaggtctcatgcatgtcattctttgattctgtgtattaacagtaagatgctatgaggaaatccgtgcacgagggatgacagcgtggcaggctggaacacgctttttagatttactttcgtggactggatctgttaagagtaaggccagcgtcctagggcacaaaccgtgctctccccaacgtttccacagcgtcatgaaggacgatcttgtcccatgaaacaaaccctacccgtcttcttgctgggggggtcagcggctgctctgcttctcctgtgcacccggggttgctcttcagttctctaacttagtaagttggactggcagcctcttggttgtacaycattttattcttgattcgcttttctgattcaaagtgaacctgagtgccttaatcctctaaggggaattaattgcttgtttcagtgcttaactytgatcctggctcagtccccatgrggacaagtttcttcctgttaggatctgtgtgtgttgttcaaaacacaatcagaaaggtaatgaagtttttcttatgacagaagccagaaatgcaggctattttcttttctattgcataagtagtgttctcaaactaactttatgttatgaaggatgctattgaactcaatacataaaatgtagaaaattttagttggtcattctagcaggctggattatttcctagaaatgaaggttaacttttattgcctggttttattttacagaaataagctatcatcttctgcagaagacaattactgaactgattttccagagttggaattaaccttctgtggcctaatcaccttcatttctacgtaatatcaccctcccaagcatttttcttggttttggaaaatcattaaggccacaaccactactcgatatgcctgatgccctctcccacttataatgtgttcatttttatttttgagaagactatagctagtagatatttctagaagatgttgataaaggatggagttaagtggagacctgaggagggagcarggataaggaagggccaaggggaagagggaattcacattcatcaggtgctcaygcctgcacagtcggcagtcagtggagggtaactctttggggtaaataggaggaaatggaagctcaagaacttgaaatcacttgcccaaagtcccacaggtgctcagggatggaggcaggaactcaagtcaggcctgttatggcacagtggattgtttgatacttgccctgcactctgtccctaaatgcccatctacagaattctgaggttgcctttcctgatgctggccctgcaagggctgggctcacactgtgtctgatgcagcagggctgacttgggggcaattacttcacattaaggtagagaccaagagaaatacttgttttaatctgraaaaactcagatggcttgcctacagccgtttcttaccattactcattaaaccaagcccttayattttatctgagaccctgactctaaccctgtgccatggaaaaacaaacaaacaaacaaaaaactagcatggtgagagggggcagggttgaagacacagtaacatgtggctctcagaaggtggcatccccttctgcagtggcagtgtcacccctcccagcccggcccaggggcctggtgcacccaaagaggagcccgacattttctcagccagaatgaatcacaggcacattctgctgcggttctgagaggcatctggccagtgttatagacttttcatgtgtcctgttggttgtgatcctcacagcagcccttggagatgggctgaacatgagagacaaggaacaagagtacaaggagataagaagctcaaaaaacaacaaacaaaacccaaagctagcagaaggaaaggaacagtaatgattagagcagagataaacaaaaagagaattttaaacaacagagaaaaycagttaaaccaagagttggctgtttgagaagactaacaaaattgacagacctttaacttaaataaaaagagagaaaagatctaaataactaaaaccagaaatggacgagaaaacatcacgtcctacagaacaacacatcttgcagaaataaaaaggccaagagaataytatgaacaattatgccaacaaattgtctaacctagatgaaatggacaaattcctagaaagacacaacctactgagactgaacagacctacaactagtaaagagactgaagcagcagtcaaaaatctcccccaaaagaaaagcccactctctctccggtccgtgcctccaagatgacaaagaaaagaaggaacaatggtcgtgccaaaaagggccgcggccacgtgcagcctattcrctgcactaactgtgcccgatgcgtgcccaaggacaacgccattaagaaattcgtcattcgaaacatagtggaggccrcagcagtcagggacatttctgaagcgagcgtcttcgatgcctatgtgcttcccaagctgtatgtgaagctacattactgtgtgagttgtgcaattcacagcaaagtagtcaggaatcgatctcgtgaagcccgcaaggaccgaacacccccacctcgatttagaccttgckggtgctgccccacgtcccccaccaaagcccatgtaaggagctgagttcttaaagactgaagacaggctattctctggagaaaaataaaatggaaattgtacttaaaaaaaaaaaaaaaaaagcccaggaccagatggcttcactggtaaattctaccaaacatttacagaattcacaccagtcctcctgaaactcttctaaagaatgaagaagaaggaacatttcagtgttgagcatcaccctgatactaaggccaaagacactccaagaaagaaaactacagactaatattcttgatgaagatcgatgccaaaatcctaaacaacacactagcaaacagaattcaacaacacattaaaaggattatatgcaatggccaagtgggatttattcctggaatgcaaggatgtttcaatataagaaaatcaatcaatgtaatacactacattaacagaatgaaggaaaaaacacacaatcacttcaattgatacagaaaaagcatttgacaagattcaacacaacttcatgatttaaaaacastcaacaaaggaacagaaggaaattacctcaacatcataaaggcagtatatgaaaagcccacagctaacatgatactcagtgatgccagaatgaaagcttttcttctgagatcaggaacaagaaaaggatgctgctttcatcagttctgttgaacatagttctgggagtcctagctggagcaatcaggcaagaaaaagaaatttaaaaggcatccaagtcagaggtaagaagtaaaattaactctatttgtaaacaatatggtcctgtatagaaaatgtaaacatttcaccttaaaacttttagaactaataagcaaattcagtgaagttgcaggagacaaaattcacacaaataattattgcatttttatacactaacaataagcaatctgaaaagacaaactattccatttatgatagcatcaaaaagaataaaatacttaggaataaacttaaccaagcaggcaagatgtgtacactgaaaagtacaacacattgctgaaagcaattaaagaggacataaataaatggaaagacatcccatgttcatggattggaagacaatattgttcagatgtcaatayttcctaaagtgatctacagattaatgcagtcctttaatgcagaaagaggaaaacccaatccaaaaatgtatatggaaatatcaaaggaccttaaatagacaatgtgatcttggaaaagaacaatgttggaggtctcatacttcctgacttcaaaacttatcataaagttactgtaatcaaaatagcatagaacaggaattcctccttatctgtggttttgctttccrtggttattgtttaatgggtacaaagtttcagttttgcaagatgaaaaggttctggagacctttttcacaactcaaatatacttaacactactgaactgaacacttgaaaatagttatgataaattttatgttatgtgtattttatcacaatttttaaaactccacaaattaaaaaacaggaaatacagagaaggatttggtttatcagataaaatttaaaacaagtagggaacaaaaagcatagggaagtgtagggtgctttgcaaaccatctctgccattgcagagcctgagtcctccaccatacttgacagggtcacctcccttgggccttggggtcagtgcaagtgacagagccagagaggcttttggagtccagcaggcccaggctcagttcctgctgctgcctctcaccagcttcgggccagagccctcatcttagtttcttcatctgttaaatgaaggtaataccacctactttacagagttgagagcattaaataaactgagatkacacaggctacttagtgcggggcccagtacacccaggtgaacctcggtcgtcggtaagcaaggtcccagaagtcctccctgggaattagccttcttcagaaacactatcctccaactctcttctcctcttacctctgtcctaagcctgcttgtccactcttggatgaaatatttttcttcctttgcagttgaatccccggaatagtgaaaacaatgaccattgcgtgctgagtacctgctctgtcctggcatcttacaactctgttccaaagtctgtgctgcttccataggactgttctcacttctttccattttgcaagttctcagcctggcggcagtctccctgcccgagtggatggtgccaccacctcttactgaaggagcggtttctgagggagagtgcctgtgctgtgcagctgtctcccgcgaggcgccctttgacaagtgtgtcttctgtctcccctcaatgacactgtggcttcatggagtctcattgcatgcccagcacttagcacagggcatccctgcatggctgcgttgttccctgcatggctgcatttaggctttccttttcctgcaagtgctgcctcgtctttcctttctctcgtctcagcagcaggaagarcaagttctttctctgcctccccgctgcctggctccttcagctatcaccagccatcccctctacccagccctcactctggtgccacaattgctactttcctggcttcttcacggggacctgacatacccttgagtctcctgtacctgaagaaaacctccttgccatccttctaagcaagcagtttctgtcttgtcgcttcctttctggctcacatcaagtctctcagaggaaggggctagggctggcggtgcagcaagggagaagacagggaggacaggccctgtgtccagcttcctcctaatgctactcaaacgacccacaaggacagtggaggaaagcgggcgacacgcttctggaagacggaaaacagaagtgagtgacagcagacttaacctagagacacccaaaacttaagctcctgcacagtgagaggctgacaagtagtcagctgagcagtgtctgcaacgctggaggagtccagaaccgcaggccacagaggcaaggacaggccaagacacggaaaggctgggagtgtgcacaaggtgcagggagaccccactgcttcccctcacacctggcagaggatggcgggttcctttctggagagcctgwcaagaacacctccgctggggacacaggcctagctgagtggtggtgaggtggcaccctgaaaacaagcattgggggaaagtgcagagctcccagcgccgctccccagagtcccgtgtgaggcctgccacctgacagctcagcctcacttccaaagagtggctcagctttcccagccaagatcacatgtgaagaaaatctcttgaaacacagataccaaaacagagagaaaagagggagttaggagaaatggaggcaatgaagggaatgaagaaaacttaaaaaatatatatatattgagcctgtgaatgaacaagaagttgaaaaaaaaaacacacaacaagaaaaatatattggaaataaatatcatggcaaaaaaatttttaatagaagaaatgcaagataaagcagaatataatatagacctggaggaaaggagaaaatataaaaacattggaggctgaagtcaggacctccactgccggaatattgggagagccagaaagagaacagagaggaaggaggggtaagaaaatgcccccgtgatccaggataaggagcattcagatcaaaattccagcacaatcaatgaaaacagagtctacatcatcagaaaattctagaatctgagggataaaaggaagcccttaagagcctccagggaagagctcgagtcacacacacaggggacctggatcacagcacactgacttctctgcaagaactcggaaagttagaagacaatgaagaaatgtctttaaagttctgagggaaatgatttctagaatcctctacgcagccatgttattaaccaaaagtgggagagaatacacttcagcaaaatgtggccaacatcccagccagaggacgggacaggaatgagggtggcctggatggcagcgacacagagagcccagactagagctggcagggaggaccttccagcggatggtcaggacccgggttctggccatgctctcagaaactgcgaggctgaattacaatcctagaaactaagcgaaatgcaaaacaaacaaaaaaaacaaacttgaagcaatttttaatttcaaggaaaacataaagttgtccaagaaaggaaatgtaatcatagtatgctctgtgtcttagccaagagccgtgtttgcatggttctaatgccgaaatagatctgggtctgacccaaaactatgatgagtctgttgggaggatggcgggatgtggtaggagagccaagggtcaggcttctacagtgatgacagcagcggcacacgctacatgtcagcagatcacacaggaccacgtgtgttggtacccaccgcggtctctgaggcaggctgctactgtgacttcagtttacagttgaggaagctgaggcacagagaggttatatgatctgcctaaagtcacacagttaaagtctgtgctttagaaccactatgctcacccactttttgagtagaagggcaagatatgatttaagacatcaagaagtagcagcgtaagtaacaatatggagataaatgctgaacacaacagttaaaagccttaaaagtgttgcctccagggagtggaaaggggtaggaaacttcatttttcttacaaagcaatctattgacattttggacacatgccattttaaaaaactgcatcagggaaagccaggcaggcacctggcagtggagagctggtctgcagtgtgactacggccctgcccggctggctggtcctagatcgccaccagcctgggactcggcttcctcacctgcaggtgctggaccaaacagtttccaagttctcttctggcccttcatgttccagcaacaaacaagaccagtgatttagagagcacgtgtgctataacgacaaccagacagagtgatgtgacagactgagtaggccctgcctactactcctgcaccctccaggtcaggcgctggtcggggcaggagccacctggatgaggggagagagggtgcaggagatgaggtgggagagttaagtctgcagcaggagattgacaaggaccctctgggtggtgcactgggggcaggatccaggggaacaaagacaacagggatgcaggcaggcattggaggaggagagcaggttgggagacgtggcaggggaagtgctgatgggtctcgctgggggctgggatgcaggtgtggggagggacatgaatccttccaaatgctgagtccccaaggcagctgcacagcaggatccaaaccatcatcgccccccaggtgctcgtcttttgggatagctccttgcccgctgttgtagacagctgcttccatccagtgccctctccagacaccagcgctgctctcagctggtgccttttgtcattttcacgtacaccccagcagccgagtcctggcaattttaggcctgagcacttgcctcttctcttcctcagtaccgtcctaccccaggttctccttaattcacatctcaactttcctatcccagcatgccccccaggtctaatctgtgtccccacactgggaagggtgtcccagggctatcacatggccaggcccacagggcgcacgtatctggctagccttgtgtttttcccacggccacacctttcctagtgcaatgtgcctgaaatctggggaatactgttgttgcacaggctggtgatagaaccaagaggcagcagacgtgcctcttgagcaaaatgaggcctagaaccccccagagcagctcttgtttgctgagaagaaaacagaagtcccatgagttcagtgtgacttcttcagtttcttcagggtccacttgtccacatgattggtggcaagtgtggtgtccggggccatttctggcgggtcacgagccgctgctgtttcctggatagccgcatttgttttcctgcacctgcagtcccgtctgcaaagcccatctcaacgagtcgccccacaggctgtcacctcatggcgggggcacacagggcagcggagcgaggggccggggagagcggcccccacccctttaatgttcatttccatttttgtttgagtcactttcacgcaaatcacttctgtctttatgtaacagtctgtggcccagacccaggcaagtggtaaatatttaccttcacgctggagccaagatcgctgcggggagtcccgtgaagcaccactgccctctaagaccttggaaggggaaacaccagaaggtgtgggtgctgagctccgctgcgtcagactgccaggacctgagtggaactcagtgctgaaacctgggttctcactgcagctggatagcaggtggttacaaaattatatgtatttttagggttatttctaatttttctctaatagttattggcaattttcaaagtcctttaagaaacactgaaaactgctcaagaaaatggcagttctgcagggctcaggtagcagggcaggctgttgggacaggtttgacagactgtcctaatacaaggagcgccttttcccagatcagcagctctagagggtggcggccttgcctggaacctccgcaacctccgcgcccaccacacaagggctgagaacagtaaggtatgggctgtgctgggctcaggagcaggggtagttgctcacctggacagggtgtgtctgggagggccatactagggcctggacagggcgtcttctggccttgagctgctacgatgggggtaggagttgggaagggtggaaggctggtgccctcagggagtcggggaggctgcgcagtcagcaggtcaggactgtgttcctcagagaagggtggcctgtgcaggcgaggcagggctgcccctgcagggctgaggaacattagtccatccaggtggtgtggggaggctgagggcacggtcctcctgcccagaacgcaggtgtcctgtctgctacagacacatcaaggaagtcaccaatgtgtgcccctttctctagcctagggactggcaaacccaaaaacaccatgcccacaggttagagccgacctggtgcccgtttgtgaacagcccacaagctaggaatggctttcacatgtttaaatggccgaaagtcaaaatatctcatgatgtgtgaaaactgtaggtcattctcatctgcgtcggtaagtaacgccttatctgagcacagccaggcgcattcaggtggtgcggccccagtggaggctctgtgggccgggagccacgtcccaggtgcagacacagagctcccactgcgggctgacctgtgacttcccctctccctgcagctctgcccggatggccctagtcttcgtgtacggcaccctgaagcggggtcagcccaaccacagggtcctgcgggacggcgcccacggctccgcagcctttcgggcgcgcggccgcacgctggagccctacccgttggtgatcgcgggggagcacaacatcccgtggctgctgcacctgcccggctcggggcgcctcgtggagggcgaggtctacgcggtagacgagcggatgctgcgctttctggatgacttcgagagttgcccggccctgtaccagcgcacggtgctgcgggtacagctgctggaggaccgggccccgggcgcagaggagccgccagcgcccaccgcggtgcagtgcttcgtgtacagcagggccaccttcccgccggagtgggcccagctcccgcaccatgacagctacgactccgaggggccgcacgggctgcgctacaacccccgggagaacagataagggggacgggcagggtgggcctaggtttgagagccctggggctccaagatgcgcccagcccatgctgggtgaaggcggaagccgaacagggccctttccaatgaatctgccggaaaggaaccaatctttcagtggcagctgattttacaaataatgttgagatacgaatagcaaggtgcttccctcccatctttctacctggtaagaaaaatttaggattttaactcccctaaatgacatttagagaactcgtgttatgcctaattcttcttcctcctcgtgttgtttctgctgttggctctgctttgagctcaagataaatatttaggatcagtgtaaagacttggtgttgccgctagattttagcagccctactatactgattctggcctgtaacccctgagaaagccgattttacacggctgggtagaatttgtagaaaagatccacagggcaagcatgctgtatatcagagtgcgtatagcaccattcttcctaattttcagatcaagcttcacagcaaatattaaagattatttaaatttgaagtcgatgttttgggaaatcagatataaaagtgttggtactgtgtttgacccccacgttttttggtatacttatttggtagaaggttctttacattctgatctagcaaaataatgaacacccacttgctggtagacacagctgagcgcccggacttcaagtggaagtttatctgagcccagatctcagtagccagaccccgtccctgccccctgaagggagagcatttgggggtgagtcctttcaaagaagagccaatgcattagtaatttgttcttcaggcctgacagaagcttagcttccaaatacaaacagcacttaaaataattttagcaaggcacgaagtaccaattactacccacctccatctgataattgtcagcatcgattcaactcggtgcacggctcttgcttctgcttcccagcaaagtctgaaatgtattccaaggatttcagaaccaaatgaaaatgcagctgctgtgatctttagtaacctcattctctgttgggagagctcacttactcttcaacttaatggcagactgtgatcgctaactgcatctggcacaaaaacatgatcattatttttagcttcttttgcttaattggaaacttgcttcacaaaaaacacaaaaaggctacgctgggtctcagctgatgagctcgtggcggccctgtgcttgatgagggcggtgaggcagcccaagctccttgtgactgccctggcttgtgcaatggggaagggaccaggcagcgcgctcatcctcaaaacaaacaaaaacagtggagacagcacccccggccaaccaggaagcttcagggtgacctccaggggagtcagccaccaacagtacacccacatagagacacagcaggaaagggattgccaaaatctgcatttgcagtctctggtccttaggaagttttgaaaatcagcaccaggagtgagggcctcacttctagaagtagtaaggcaatcagatgaaaaaatggcaagtgctaatttaataaagcaaggcagagaactgactgacatttatatcaatctcttaaaaggatcacaaagaaatgctggtagtctactggcagagcctgtcgcctatgtgtacattgtcttcattcaaagaaagggcaaactaatatttagacaaatgctcagttttattgatttaattttgacactagggaatctcacagcagaagtacaaatcatatgtacaagtatttatatcaatgaaaatttccattggtgattttttggcagaatattggtcttgactctgtggaataaatgacgacgtaaacgtagctgcacaggggtgttcctgtataatgcttgaatcaattgtgtgtgaaagcatcatgcaaatggctaattaaattgggtgatgactgaaaggttataaatccttcattccagctccacgagcagatccccttctccaactgtgtctccagcttgacagtgcacagatttcaccttgaattttgaaaaatgcagggggaggggagagtaagaattagtaaccagaaccaagaggcggcaggctcctaatccatttctaaaaatgcacagtcctgcaagctcagcagcacagggacaagccaccccaccggagcccatcgaagggaccctggtgaacagggaggcgccatggtggccgtggccgtggctcacccctcccctttcccgtctcctctgtcctcggcaccctcacagtggctggcctgagggctactctccggagcatttgcgctgtggcctgcgctctggcaccctcaggtctaggcaggctcttcactgccaggtgagttctaacccctagcctccctctctgt

SEQ ID NO: 97144 - DNA, 15731 bp, Homo sapiens
aagctggggaaagacaagaaacaaaacgggcacttcagccaaagtagtggggaaaagcctaaatcccaaaggagtagaatattccatccaagatccggtttatatcccaaagagagcatccgccccctttctcttgcaggtaattcttggtacaaaatggctggctgtggtgctttttgtgaaccctgtggctatttccctgttttcctaccaactttggacaacgtgactttattttactatttcaacatatgagtttgagtgtacatgtttgtttgaaaatcatacctgggttttcagatttggaaacaggattccaacacaaaatagaaaatgtttattgagaacccatcataaatatacaaagtatgttctatatcctcattccaagaaataaacaatagggtctcagccttcgaagggcttaggatttaatttgataattaaaagcaaaataaaacaaaacacctcttaaataactacaatcacaaaataattagctcccttgtttaccctggctactatttttcacatgtgaggatttggatcttagaccatttaatgtcttctttcttctccatactgaaatgtctgtttctgatattctcctaaaagagagtaaccagagacctgagctcttttcagctgtacaagacagtgtcagtttgtactccaataagactgtagaaactgcaatgccactaagcccagacaatatgagagttcttatgtatcattaggtattcagacttttggactcttacaaatctaatactgtgaaatggtatctcattatttgaaactacacttacattactagcatctttccatgggtttattggctattcatacttccatttctatgccttttcataacctttatccatttttctattgggttctcttcttttaaaggccttctttatgtatccacaatctggtttcctttttttttttttttctgagacagagtctagctctgttgcatggctggagcgcagtggcacaatgttggctcactgcaacctctgcttcctgggttcaagtgattctcctgcctcagcctcttgagtagctgggactacaggtgcgagtcaccacgttcagctaatttttctatttttttttttttttttttttttttagtagagatggggtttcaccatgttggccaggttggtctcgatctcctgacctcatcatgatccgcctgcctcggcatcccaaagtgctgggattacaggcgtgagccactgcgcctggctgatctctttgttttacatgttgtaaatctattcttccagttgattatctttctttatgcctttatatgtggtatctttcattatatccatttaaaaatatttatgtagccaaatttatcaatcatttcttgtatgagctctgatagaggtatattttttacatgaattgagttagtgaaaagatacatgaaacacaaaaatcaataacaaattaaacaaggtcatttaaaaattattgggttttaaaatagccctattggaaaataactttacatgcgtttattctgaattgaataatgtcctagagcaacactatctctacattgcagcttactgataagtcaatttgtaccaggagtgatttttcctttttaagaaattagacaaaacattaaaatagacacaaaggcttccattatgtaagtgacaagtatgctgactgaagtttgtagtcaccaattcaaatcattccaattccaaagtgaaataaaaaataaagggctgagcgctgtggctcacacctgtaatcctagcactttgggaggccgaggagggcggattgcctgagctcaggagttcgtgtccagcctgggcaacacggtgaaaccccgtctctattaaaatacaaaaaattagccgggcgtggtggcttgcacctgtactcccagctactcaggaggctgaggcaggagaattacttgaactcagagggtggaggttgcaatgagatgagatctcaccactgcactccagcctgggcaacagagcgagactgcacctcaaaaataaataaataaataattgaggacatgaataaaaccccaaatttttcaataatcactaattatattacttattaagcatgtacatataatacattgtgttgtttactattattaaaataataaacacatgtgatcacccacatgaaaagcctagaatttaatgacatcatttgtatacaataattatagaactattatatgtaagaaaatttctcacacttctccaaaggcccattagctttacagaacctgcttattttcccaaagaggagaaaatgcagccttgctctttatgtatgaatgagttctgaattatttgaattcaaatacatttgaattctactacttaacacatagaaactcatgcaaactgttgtgttatcaaagtacaaatattataagctatagtaaaataaatttaagactataccatctaaatattatttaactatggataggtgaatgataattatgacttctgtttttactaattcccaaagcagaattcttagtttaaaagaaaaaaaccttagctttctatagtgaagaaaaagagcatatcctggccagaattctgttaacagaaacttcaactattttatcaccaaccaaaccatgatagaaacatcacactctaacgttaattgaccagtagtcttcctgaccacctagcatactatatgctggtttcacaactggctcaataccacaggagagaggccacccattaggttgagaagctacccccaccataggtcctattcagagtcaactgaagtgaagtatctatagaaagtgaatatatccctttgagttatgctttgactacacacaaagaaaaataattttctgacaacaatcacatgggaggtcagaaatatggcaacaaatatggcaactatggaatggagaattagaaatggtcagggtcaagatcatcatgaatacttgaatgaggttattagcactcagggataaacaaaaccttgcctgaaaggctcagtatgctgttccttttaattctctggaggttacagggatgagcgtcccaaccactgggtagagcaaagcattattttactatggcttgcctacatttgagggataataaaaaaatgagaaagtcttttgaaaacttgccagtttcctttctaaactactctaaaatttaaaaccaaagctgatttaaccattggagggtgaggggcgggggtgaaaataattggtcagttttatgaagggctatcaagttggcaatgagtagcatagaccaaatgtcaactttctgatctgatttcccaaacgtacaccctcaaaaccacaaggtaaataaataatgccttgagtcagcaaaaggggaacaaaacatattttgagaaaaacatttgaaagaatattaaactgaaagggtaaacactgaggggtaaacggtggatgccttgttcagatacccttctgttccattctgtgagtgggagattctattcattacaacctttcccttttccaataccatctcccttgccagcagggtgaaaacaaaattaaacagatctcagtgtaacaaatggcaacgtgaagtgaatgatcactcaatcagcaccctaaatcttcaaaatatttccacaagtctaaagaataagaacaatttttaggctatgaatattggcatattattttctacaatgttccatgatatctgatgacaagagaccttctgcttcaagagtgagtgttacgtatgtacctcagcaacataacaaggtctgcatcgcttgaaaggcgcaccaatcctggagtcccttcagttcggataaattggatcttctccctaatcaagaaaagaaacagcacaaaatgtatatggtagacctttaggctataactcagtagtaaagagcattttttataatagtcatgatgttttttggtacctattatgtggcagctactgtgtaataccctaggaatacacatccaagagagacatggtctttgccttcaaggggggggatcttgtaagcatcaacacctcccagttctaatgttgtggggagaaagattctttcactggcttcatcattttgctgcccaagtactataaatagtatactattcaaccaataaaatcagtgtctgctttgagttaaagctgactgtgggcctgaattttagcgatatagtcttacgctgatgccctgctgttccaaaaagggattgtgttgggagagtcatctattttcctgaggccatacctttaagttgcatgtgatgagctcattcctaattggaagcagatagtatctatgcattatatattcagtgtaaaagcatatgtatatattcagtgtaaaagcatatgccttttttaaataaagaaaaaactgaaatactttgctacaacagttggtgaaatagattgtgtgcatacctgtgcaaatgtatatatacatatacatatcaaacacaaggtgagttatttctaccattattttgttataggtaaatgtgataccagcttttttcttttttgtttgatgagtcatcatcatgtcactattttcaatttgttatatgaatacaattttaataatttttttcctagttgctttcttcccttatttacatcatgctatttcaaagcacaccatattaacttttataagatgaagaaaaatataaaaacacaaattatggtactaaaatcattctatttcattggaatatacaggataatgcaaatatgcaattttattctgagtgctatggacaatatattctgattcctataccataaagtaaaataccaatcactgatacaagtatttatttagatttagttcttatctacaagcaacttgtttttctacttgatattttcacaaagttccactgatttttttgtttgtttgttttgagacagggccttactctgtcgtccaggccagagtgctgtggcatgatcttggctcactgcaacctctgcctcctgggttcaaatgattctcctgcctcagacatttgagtagctgggattataggcatgtgtcaccacgcccagctaatttttgtacttttggtggagatggggttttgccatgttcgccatgctggtctcaaactcctggcctcatgtgagctgcctgccttggcctctcaaatgctgggattataggcgtaagccaccatgcctggccaagttgcactgatttttatattcccaaatttgaaatatttttcttaagattgcttgctgacttgaaggcactgaggtggaaggcaaggtttcatgttcacatgaaaaattccctaatgcatagaaaagtcaatggatttgcccttagccacacagcttatgaggtatgacaaacagagttcagtccttggtttcttctggctagatccattttatatgatagatgaagcagctaatctttagtatttgccaaactttcctttctgtactttattgccagcagctaactactattttttttttaaagactattagaaattagtggtaggcatgtacgtaaaggagttgctcagaaggccagcctctctctgcttaaggttatttcagtgaaggcttgaaccaggcagaacattttccctcaagttttggaatcatacatctgaaacacgtgatggaaacccaggcccattatctggtgaatggtttttctgataagagatgtaaatgttggctgataaaagctaaatcagaggaaagttatcttgaagaaaaatgaataataacttaaccaaagaactactcttataagggtcagtaacaccatgctttgatcttgaagaatcaaaagctatctcccacaaatatgcagcttatctcttttgtctatcaacacagtgaatccaggcaaacagaacaagacaaaaaacaaacaggctgagcactctcccctccttccttaactggagctacacagaaggagttgagtgatggtagatatcaggccctggtctgcggcttggaagtttcctgtgaataagaaaaacatcatcgcttcttgagtcacaaggatgataggatgagaaaaagaaaggacaaakgcaccagaggaggtatgccaaatgggaaacttttcatcactttccagataaaaactagcagtctgtgaaggcaactggtctgatttttcaggtaagaacatatgagaggcaggctgagaccaattttctaccaggccagctaattcatcacaatgacaagctatgggtcatatgctttcaggaaccagacactggaacatgtcgtctgatgtacatcacaccagtaagtactttcttatgttgatattgagtcattctttcagtgaacattttcygcgtgcctattgtgtgccagtcatggtaccacacgctgggaatccaatggggagtaagagaaagtcccttttcaaggagcttacagtgcagtggaagagagaaagttaaaaggtaattctcatttgatgtgaaaatatttaaattcttctgttcacttaattgaagcgtggttaggctttataccttctcccggtctaaacagttctttataaagtcctttcacgtagaaacaaagaaggcattagtttactgcctgtaaagagagcagatcaaggctgaggaacagacagaagtcagcagacgtcctggaaatgtcaccaatcttttctgagaaaaacaaaggaaccacttcttggttaccaggtatttgcccaatatgctatagaccagtgattctcaaactggcatccttggtctactagaaatttgcatacataagctcaagctctgcaagaatttttaaattttgtgtcttcacttcgatgatcaaagcacatgaaacaatataataatattttagatgagatggatgacatttatgactgaatcttgccatatgacttcgggtcccatgtttgtatttatagggcacttggtgcaaagtgatcagaggtgagcttttaaagggacggcgaacacacctggctgcccttaggctgtcagggccttgatgttcaatatgataataacaccagtccccatctgccacttacgcacacttcgcttagcaattaaaaaaaccttttctcttacagtattaacttgcatcatgaaaatgatcaagtggggttaagtaatgtatatgtaaattaccacaggctaaagagaaaataaaagagatggatttaaaaagaaaattatgcattcatgctaaataatgcataaaagatatcctggcttattctaagaacaaaagctctgcaatagtttgcaaatagaaaagtggtggtagaatccactcatcccaaggcacattcaatgatatgttttatccttcagtattgtatttcaggttacactattaaatgaattggcttatcaaaccaatgaatcagtagataaaaataagctttttgttaagaaggaaaaatgatgactgataattccaaggaggcacatgctaggccagagatgcaaaaaatcaaaagaatcaagtcaaacacaagcacagaaaggtgcaaatgtgtctttccaccgataatggtctcaacrttggtgatttggcttctgaaaaacaaagtatcctcatattaatagcattaattcaaatgttattgattttttctagtttttaacttaatttgtatgtcttttggttttgtagtttataaaagctgtaagcataagaggtttatacatattttatatttgtacacatttaagtttaaaataaaagtgactaacgtcaacattataggtccgcaatatttctttttccttttagagtggaaaaataacagatgtgactcttacaaattttcatgagtccacccagcgtttggaataacataacaagtttgagaaatgttgttaaagacaactgatcatgattagaggaatgtttgaaaattactttaatatatttattcaagtttattaatgtatacagttagaaggaatctgtggcagtcctctctgttgcccagtctagagtgcagtggtacaatcatagctcactatagcttcaaactcctgggctcaggtgatcctcttgcctcagtctcctgagtaggtgggactacaggtatgtaccaccacacccagctaatttttaaacatttttgtagagacagggtcttgctatgttgtctgggctggtcttgaactcctggcctcaagtgatcctcctgcctcagcctcccaaactactaggattataggagtgagctacttactgcatcagcctggcttcttcttaacaaagaaattcaattcaacctcagtggtaatataatgaagattaaggttatactaatacaaagtattatcatttggctctctctacatgggtacgtttatctctctgtgccccttagagtacattctagcacttttatgggtacaccttctgatttggctagtgaggtacaacttaaattcyttttgaaacataagtttcttcagggcaaaagcccttgctcctttatctttttttttttgagatggagtctcactgtgtcacccaggctggagtgaagagacccaatctcgactcactgcaacctctgcctcccgggttcaagtgattctcctgcctcagcctccagtgtagttaggattacaggaatgcgccaccatgtctggctaatttttgtatttttagcggaaatagggtttcatatgttggccaggtgaactcctgacctcaagtgatccacccacctcggcctcccaaagtagctgggattacaggcacgagctatggtgctcagcccgtcctcctttatctttgtgttccccaagtacaaaacacttttctgtctacctgataagtgcttagtaaaatacaaagcagggacatgattaatttaggccaaaataacgtatgtggctcctaacaatttccacccggtgtttggaataaacaatcttgctatcttttttttttctttttttcctgtggcagagaaataaaaaaagaattggaaagccaatgtccaattatttactaaaacagaatccactggagagaaatgcaaaggcaggtaaaaaggcaatctcttaacatgaaaactcacaactgtaaaatgagaacctaaactatacagcgacaaactcaggaaaaagtctccagctactgctgtctctcagactctcacagtatgtgtaaccacttcctcctctgcacggaatcaccccagaagatcaactctactagatcatttgaggacaatgaacaaagtctcaagactgaattcccacagaaaacattctcatgaaaccacccaatattctggtgaagttaaagaagggcatgtgttcggagacaaccagaagcagcaatgctcaaaaccacaaaactctggattgccgactctgcacatcctggttcctctagatacagttcagtggcacattcacaaataaacgttttcaaaaactgccctcaggcagttctagagaaatgctttgacttgcctaatggtataatgtcaagaaaggaagacsagcactgatcattcatactcattattacagtcacagggcactgtctgacttgacagatacagccgagcagttaaaaggttatgggaatttaagtccattatggtcatacgattcttatggacccagagatatgaaattaatcagccacatgtgtagggacaaagtttgtcataaatagatataagttatctgcatgctaagaacttagttacttaactctgtttcctcatgttaatataaacataattatagaatgcaaatgaaatacttagcctggagcctattatataggaagcactcaataatttcaaactattgagtatattattagataggctccataattatttattcctttttcaacagacagtatgatctattgaaaataaagccaaactagatttctttgacccactcctttttctgtttgtattgttggcaagttgttctaaatcaacttgccaacatactattaacatgttattaacatagaagggatgcttattttgtttgctttgtaagaaatgcttctgattcagtaactgggcaatttatttaaatataagtaaaaagcagattttattaaaaactactttgtgctatcataaataactcattgttctctgtgattcagaagtggatttattattcttttggggttggggaaggcactgagactggtttcagcactgatattttgctttggtccacagacagtccaagtctaatgagttactaaaggaaaatgacattttactgaactgttttcttcataaatataacagaatgtaggaaaaatcaacagtaaaacagatgtacctaaaatattattattcctcatgtaagaaaaccatcttgaaaatcatgattgaaccacttattagcaaaaaaacacaatactttggagaaatatccagtggatgaatgcatgtataatttggggaatctttcaaagttacatcagagaacaatgtttatcagaaaataatttaacaaatatctgagagtgatactatgaaaagaacctaaactaattttggctattggagttcctgttttgggccttttaaattttaggtgattgactgtccagttgtcttcaagttgacattaatagttaaaagagattccatgcatcaaaaatgtgaaaattagatatatacgtgatatacaattcaaaagcatatgcagatctataaattagtacatccattcaaataaaacatgactagcacttattccttttgcagaagtcatagaatagatgacaggttctaagaatctgtgttccttactgccctgaagaagaaagtctctaatctcttaataggcctacaagataattagttccttggaaaggtattttaatatacctttggatggcttctaaaacgttatcttaatgatattgccatgatattttggccctcagtaatttccagctaaaccttgagccagaaggctcagtcctcagtctaggcatggagcagtcaaggctggttttattgtgtaaatgtaaaatattttagagtaacgctccctgtaggaaacaatgtgacagcaccactaaaaagccctcctataaacaaattaatagttgaattaaagatggccaggcagggtggctcacgcctataatcccaacactttgggaggcccaggaaggcagatcacttgaggccaggagttcaagactggcctggccaacatggtgaaaccccatctctactgaaaatacaaaaattagccgggcatggtagtgcattgctgtagttctggctactcaggaggctgaggtacaagaattgcttgaacccgggaggcagaggttgcagtgagccgagattgtgcccactgcactccagcctgggtgacagagtgagactctgtccgctccccacccccaaaaggaaaagagatcctagatcctagttgcatttaaattatatccacagaatcacactggtccatttatatgcatgattaatttcaggaatagtggtttttagaattagagtaagtttaggggcaaattactttaaactgagtccttctgatagaacaaagaagtgaagggcacactactaatataatattgatttaaatttactatatgcttactatgcttacacagtatcaaatggtttatacatatattatttcatttaatcttcaaaaagatgctggaagttagaaattccgatccccattttacagacgaggatgacaacttggaggttgtttaatgtctcattcgaagtcacctggtgggtaaattgcagagccagaattcaaacctaggcctttctggctccaaacctgaacaaaatcttaagagctatactcaactaccttctaagagccattactgctgctctcccagtgagacagagtctactattaggacttcccaatgaccattactatgtggtgtcaataaattattttaatcaggtgtccaggcacagtggctcatgcctgttatcccagcactttgggaggctgaagcaggaggatctcttaagcccaggtattcaaaatgaacctgtacaacatagcaagactccatctctattaaaaaaaaaaaaaaaaaaacacaaaacaattagcggggcaaggtggtgtgctcctgtagtcccagctacttggaaggctgaggcaggaggatggcttgagcccaggaggttgatgctgcagtcagctgtgatcgcgacactacactgcagcctgggcaacagagtgagaccccctgcctcaaaagaaaaaaaaaaaggtgtctttaaaaattcaataattatccctatgtaaactgtctgtaggaaaataatagtctcagtccagatttgctattatttaagtttggtacagcaaagatcagaagtttgccatgttggtccagacatctgagtgataagtaaacaaatcaggagaggactaagggagagagctaggcaggtcttaacaggaaaatgcatatggatcatcagaagtaaattcatgctattttcaccaagtacttcagttgttaaccaagactaacatttccagtctaatattatatgcagaaaaattcatttgccacaaagctagaaaagaaataggttagcaattttgaacactagggtttatcttaagaaagatagcttttgaaactttaactttttattaactaaaattctgtattgtttgataaacttcaaaatgggccattatttttaaaataaaaaaattaagagtaaaattaaactctaacaaaaccccagggctcttcaaataggataatgaaaggaaatagaaggttcaagtctgcatttgcctctagtctggtgaatcctgagacacatatccatttgccttttgtggttcagaatttcttgactcccaagttactgatttcctgataacataaaatatggaatgatctaatctacccagaatgaaaaaattatcacagatcatgtcctcatggtgaggggagttatataggaagcactcaaggaggaaacagcctgctgccaaaaataatcactggtgcctggggagagctggactagtagggaacagatttactggctggacttaataatcatattagaggggaaattctcaactcttaactcaggttcatggcctttctcattacatagtgctatacaaacaccaatactaaaaattttattgaatttttaaatgtgcattacattcacctataaaatactgttaaaggttgttttctaatgaatatatttgtattcgtataaaatgttagaactttttttcagcttttattttagtgtcatagcatacaaacatcttctttcagtgagaaccagtagtagcatataataatgccatggggacactacccattttacagatgtggtactgacgtttggaagctgatttttctaacaggggaaataaacatctcctgaggtttgtttaaaaaaaaaaaggacagcaacttagtaccattcacatttgcgtgataaatgaatttatagggagcagtgatttaaatacagcagttgaaagtaaaagccatatcacaatgcatggaaaaccatagccacatagacaggaagacacaccagtgaagtctcagggaagagaaaactatacatagatgcaaactaaatgaattgcctgctatcctctggcttaggatgaatcacaagcaaaccaagaaaacacaaagtaaagaggtatacctacttcaatctctcaagggctaccacttttatcattatattatgggaaaaataagaaggaatatttatcttaagtggtgtgccacagatgagaaaggacatatgcaaagctatgttggtactgggaatccttgctccaggtatgaatataaggtccacagtgaactttgacacatagattactgagtggctccattccatgtataaatctgttatcaaaaatatcattgaaataggaaattaaagaagttcagcctatttcccacccctgtgtttgtgggaatgctcctcacaactatataaaacagaatgttctcttagatatacaaacttcccctttacgatgttatgataagcaaaatatttaactcccaaaaacttgacagaaaatgaaagtgcagtgtgacacacactctggataggaggagtggtattatctcattgatttacttttacttatcatgacagcatctgcttcccatggtcacattctgtaaagatggaaatatatttcatagcctatcaaataattgcataaaaatagattaccatgtgaatcctatgttagaagaaagattatgcttaactgaggactctagatgccactaaaaaaaaatcttcaacatctttaggagattagagacttttcagactctaaaaagcagaaagaaaacaaaacaaaacttgaagctaccaacttgggcctgcagcttttccctctgttaggatctgttaagattctgtcaagtcattaaagactaatgacaaatgccctgtccaggtagattagatcacctaatctctctgatggtggagatttaaagatatgttaattcgtattacacactaatgtggaacgcagagaaaaagtgaaaaacttcttgagtttcctgttttgtgggggatggggtacacttagaggaacagatattaactagtggcatgtgttggttggaagtggtagaagagagagaaaatagagttccctttattttgtgattagcaaaagaggaagaattttgtttgttttgctttgaggtctaggattgctaacatttctaattagatcactgaggggcttgtttctgcaattttttagaactaaaacttcttacacaagattctctaggggaacgtggattactgagtggatgccataataaacaaacatgcaaaatcttcacttgcataattattataatttttccgtggttaagaacagcatgcttatgttggggaaggcactaagagttgagtcaaatgttattaaccatgtgaaaccaggtgaaactgggatttttatatacacagtgtttatagtataatacttgaaattttttgtagctttagcctttacaaactttagaaggtaatgacaactttaaagacatgagaccaaggtcaggcacagtgactcatgcctgtaatcccagcacttcgggaggccgaggcgggcggatcacctgaggtcaggcattcaataccagcctgactaacatggtgaaatcctgtctctactaaaaatacaaaaattagctgggtgttgcggtgggcacctgtcatcccagctactcgggaggctgaagcaggagaatcgcttgaacccggaaggcagaggttgcagtgaaccgagatcgcaccactgcactccagcctgggcgacaagagtgggactccgtctccccctacctccaaaaaaaaaaaaaaaaaaaaaaaaagacatgagaccaagaatatcgtgagtatatttggtaatttattttcaaatcgacaactatatacatatatatttttacattcagtatgtgcaaaatgctattctagatatttgaacagtaaggaggaaaaataatgatgagttggataagatccctatttgcaaggctcttaaaatctaattggaaaataacgcataaggacttgaaaagtcaaatcaaaacacaaaagtcata

SEQ ID NO: 97145 - DNA, 129143 bp, Homo sapiens
  misc_feature (1)...(129143): n = A,T,C or G
gagacagagtctcactctattgcccaagctggagtgcagtggcacgatctcagctcgctgcaacctctgcctgccagtctcaagtgatcctcccgcctcagcctcctgagtagctgtgactacaggcttatgccaccacacctggctaattttgtattttttgtagagatgggtttcactatgttgttaggctggtcttgaactcctgggctcaagccatttgcccacctcagcctcccaaattactggaattacaggcatgagccaccgtgtctggcactatggacctttctccttgccacaaggctcttgcttcactatcagggactcattccctaccccattctatctttcctggaaggcagaagcttttccagtggcttctgggagctccctgggcacttggtaaagatgatagaacaaacaagcccctactacaatccattctgattaggacagagatagagctcagtggagagagtggctatgtcccgtggcctgagattcctgatggtaaagggtgattctcagaagtgtccttgggtttgcagtagaagagccacagaggagtcgggaggtaaggacctctctgagagacttccctaaagacatgcagaactgagtctgatggaggggctgagcaagctgctctttcccatgagcagtcagagtcatgcctgaaccactgttggctggggtaggacatgtgggctggtcaggagagggcataagtgcatgactttccacccgggcctgttctcccccaatctatgaaacagacatgggtgggggacatgatcacaatagagattctggtgacattttctgtagtttattggaaataatttgtgtgcctatcactctcttcctgcaaacagaactcctcaagggcaggtctcacagtcttctccaggcctggcactgagtaggagtcaggtatgcactggccaaaggaggatgactgcctgcatgcatgagataggcaaagccagcccagaggcttgtctaggggaacacaaaggaacaagggatgcaggatgtttttttcttttttttttgagatggagtcttgctctgacgcccagggtacagtgcagtggtgtgatctcggctcattgcaacctccgcctcccggtttcaagcgattctcctgcctcagcttcctgagtagctgggagtacaggcgcccgccaccatgcctggctaatttttgtatttttagtagagacggggtttcatcatcttggcaaggctggtctcgaactcctgacctcgtgatccggctgccttggcctcccgaagtgctgggattacaggcgtgagccaccacactcgcctgggatgcagtatgttttgacttggatgcttatgacttggaggaaccatgtcttcattattttttcttgtcataacaagccttcagaatcatgtaactctaatagcaatgggccttaattagctttcttgggagcaatgcatgggcagtggggttaggctggtggcaaacatttctgacaattttttaccgcctttttttcatataatgcaagcaaagagttgccagttgcaacagcaaaggaattatgtaggcaaggcatcaagcaaattctgtaccttccagccttattcctttctcctgctttaccaagggccatggccagcttaagacctcagtatacaattgaggttgtccaggccagcccaggtaggctgctgagcagaacgaagatacaatcacttgtttgtagcctcatgccagcttaaggctcgcttagggaaccaccttattctctatgttagtgggcagtgccaacaaatctcagccaggaaagaaagcctctgtttctttgggcttccttccttcctcttcagttctgtttctctctcccaaagaaggagtggggcaggaagccaatttcctgagttgcttttcattgggaagtgagacaggcctcagcagcactttagcaaaaagaagggtgcagagttcaaggagccttgtaggcaggagacaggtctctcagcctctctggaatagtccaaagtccatggcattatatcctctagatacagcctgtcctgtgtcatccttctctattgtcttcctcctctgatctctctaatgcctactcttgcctgcaaagtttgccattcttcttcacccccatagacatcttcatctttggatctcgtgcctccccacggaggctgccatgctgaaaggatcagcccagggtaaactggacttatggggaagcagggaagagtctgagctctaccccttctccctttcttggggatgaccggcatgatgctttgcctacggcacaactacacctctgggtgtagttcctgaggtcctgtcatctcttcattcttccacgatttgccttctggtgactaatcatttctactaatcccagcagtgagttggctctgattgggccttttcccacatggatttttttgtttagttttgtttttttgagacagggtcttgctctgtcacccaggtgggagtgcagtggcaccatcacagctcactgcagcttcaacctcccaggctcaggtgatcctcccacctcagcctcccgagtagctgggactacaggtgcatgccaccacacccagctagtttttgtatttagtagagaaagggtttcgccatgttgcccaggctggtcttaaactgctgagctcaagcaatccacctgccttggcctcccaaactgttgggattacaggagtgagccactgtgcatggccctggatggctttttgttgttgttgctgttttttctgattccattttccctctggtcttctacaagtgtctgagaacataggctggagaagcaagctggcacatgtctgttggttccatttaggcatgtggattgattgtcctctcatctggccatctccaaaatggctgccatgtgtcacatgttatgctgaagtgggaagaagatatttcagcaagtgaagcttaggggactgggaaactcctgcagggtctctaggtctatcctgtccctggtggggcagcagttggacccaggaggacatgatacttgacacaccacacagctggcttgcataaactgaaagatttgtttattcatttgtcataaagcatagtcaagcctagtgaattttcctggatgagtgaagagagctcatcaacaacccctccatgaggagaaaccagatgcaatcccagcactctccctgttacttattagctcagcagctaaagccaaagatctctctgagtgcttttaagcctggtgattggtgggccctttagaagcgcaggtgagggaaatgctcagagcgtcatggagaagccagcacaaccatgagccccagagggcctgctgaaggccagcccaggggataggaccagtcagacaaggtcctgctgttgaggagccccagtctagatcaaaaggaggtaaacagcctctgggacagtgaatggaaatgggagattgaatcagagccccagataaccagaggccaataccatcccatggtccacaagagtccctgggctgaatgtcaagggtgaatgaacacagggcaggcatgttcctggggatgctcctcaaaggaaacagaactgggagagtttgagaggagaggaggggcacctctaacccacattttcaggtctcctgggtccactgtgctgtgccctttgtcaccagggcagcaaagaccctggaggtctgctaacagccaggaatccactctgaggagggcaactccccaagcctgcaggctgggtagagctaattaaccacacaggaaccagaggcatgttgatttaaatctgtggaaagccatagctcctgtggtttctacaaaaacaaaaaaataaacatcctttcccctgtttcaagtagcccaacccacactgactggggtctgtgaagctataacagcctgggttgggacaaggtcaggccactggcctgcccatagtgtttgtgagcatattcttccccaggaggaaatatatggcacaagaccgccacatcccagaccatcaccagggagacaactaataacagagttgtcataagtataccaggcacttgtcctggtgttttacctacatcaggctgggtgcattgactcatgcctgtaatcccagcactttgggaggccgaggtgggaggatcaccagaggtcaggagttcaagaccaacctggccaacatggtgaaatcccatctctactaaaaatacaaaaactagccaggtgtggtggtgggcacctgtaatcccagctactagggaggctgaggcaggagaatcatttgaatccgggaggtggaggttgcagtgagccgagatcacaccactgtactccagcctgggtgacagagcgagagtctgtctccaaaaaataaaaataaaaaaaataaaatgaataaaaaataaaatatctacatcagccactctacccttacaatcccccatattcgaggagctactaagattctaactttgcagaataggaaatggaggctcagtgagcctaagtcagttgccaagggtcctatcggggctgaggtgcagactcttttggagcctaaatgtgcacatgtagtcaccactcacgaagctgtatcaaacatcctgcagcacaggaggaaacacagcaaggaccatcatctgcaggaagagaggctctcttcatcctaggtcatcccagaggggccaggcagtttagcgtgaaaacgggaggtatgaagtcaggagaaaatatcaggaagtgggggctctgcatttcctctttctcttacttgctccatcccagaggtcgggaggagcagctcggagtgcacaggggaaggcccagggagggtcctggcccctcctcacaagaactgacacagccaccggtctgtccagcaggctggctatcagcattcactgggatccctggattattctaggttcagttagaactgctaacaccctatgtgatatatttcgcaacattaggagaattgaatgggtttgtaaaatgggttcaagttactcacgcctttctacacagtcatgatttatgacgtcagagatgaactggaatataggctcctaggaaatattctcccacaggaaagtacaggcttgtgtgagaagccaccacggcagacaatcctgagtagcgggcagaaaccggctgtaaatgtgagggagcggggaagtaatttggaaagctctcagggtaatgcagaggcaacctgcggccccgcatcgagacagctccaggcctgagaaccatcaagtcctcttttccatccccaaggtcactctcccagggctgactgaggtggcctcccagctggcttcacacagccctgtcacaccttccatctgtgcccggggcgcttcctgagactcccagttcctcagtgtgaatcccagatggttcccatcgccatctggataaaggctccactccccagctggccttaaagaccctcacaatccggcccgaccacccagcaccctccctctccttccctctacgaccttgcgtctctgaatacacttgttcctctgccttcccaactcctatgcatacttttgaggccattctcgggtagcccctctcctctccgaggcctgtccttatgacgcctgcccgctgtggcactccggttacccggaggagagttgctactctcgagttcaccgaggcggaaagcccctctgactccaaagcagggctcagcgcgacgtcccagaggccgcttctagtggcaggtgcccctcctcacagggccctcgcagccccgccggcccccgcccggctccttctcagcatgatacaaccgcgtcggccctggacagcgcatgcgcgggcgccggcggctgtttcccagcgaccccgaggctggcgggagcgcgcacaggggaaggggggcgtgtgcagggaagggggcgcgagacgcgcatgcgcagcggcaggcggcggcgcgagccgagctgggagatggcggcggcagcggcggcgccgagagtgtgagcaccgcccgggagccgccggcccgggcgcagcgcgaccccgaccccgcccgcccgcctgcccgccatgggcaacgaggtcagcctggagggcggcgctggcgacgggccgctgccgcccggcggcgccggccccggcccgggccccggccccggccccggcgcaggaaagccgccttcagcaccggccggtggcggacagctccccgcggcgggagcagcgcggtcgaccgcggtaccaccggtccctggccccggccccggccccggtcccggccctggcccgggcaggtaagcgcgtgtctcggcgcccggggggcggtgagctgcagcctgaggccgggacccgggcccaggatcccgcgatctagtgtggacagcgaggttcgacgtccggccgcactctgaaccctgccggattggcgtgaactgggtggtcgcgggaagcggcccttcctttccagctgccccgccttggcgtggcaggatgacgagcgcagggtcagtcggggcctgcagaccgtgactccgtcacgaaccccaaattcgcttctccccaacgctcgggcctgactgctcaggaggggcttatgtaaccttaacctggtccctccgcacaggagagcaatgggatggaaaacgtcctccctgtctgctggtgtctgcatgtgtccattgtgctgggccgagaaaacagcacaatgggagtggctgtcagggaagataagtgtcactgcgaggaacagagagatgaaaatagttgaaccatgaacttggtcttgggctttccttgggcatttagtggctgtaatcacctttgggggaaaggaaaattgcccactggacaccaagaggtgcttatttaggcccaacaatactaataggatcatgtgctttcaccaaggtttagggaaacattttggggtgaagcaaaaatgctattgagtcatccagcaccagatatgttctcgttaccttatgatttagatcaaaccagtggaaaagctgaaacccacacagaatgctttaaacagaacatatctgattaaatactgtgaaaccagtttgttttaaatgtatgccaacccaggtcctscaaaaacagtcaagtggcaatgaaggctgtaagggaatgccaatatataataagtcagtagactgaaaactcaggaaaactactaagagatgacacgataaaatggaaggcattatctttgcaccaaataggcttggggagtagcaaaacccccagggggtgggagggaggtgcttccagctccatgtgggtctgctgatatatgttgccctggcttttctgtgtggaagcacataaactgaggacgcataattttttattctttggctgcccgactgtgcctcttgtgtgtttatttcctcagaagtcatttcttagacaactaacagtaatgaaaggctgttrgtagcttgaaacctgcggcagacaggtcagcctgtgagcatcctttttagaggtgggatttgtccattttatactagctataatagtaatgcagttggatagcacacagctcttagcactgcaaacactgtccattttgctgcatgttgagttgctgtttgggttttagcttgagggaggctcacccaggctttagtgttctccttccaagggaaagcttctgtagctgaatggaaaaacaccttgttattgagagttccctgtatggggaatttgtcatttctcttctgataaccaaacaggctgctctgcttgtagtttatcagatgttgcagagccaatcatatgaaattctggaaagacctgggcagctcagagggaccggaaggaggctgatgtctattgctcatatgcctttttagtgtttcatttgtacttcatctgtacattctgctgcaggcagacccatgaactgctgtgggtgaggcgaaccacggactcctgatggatttagtagtcacacaatctcttacctggctgtgggcaaggctcatacctgagcctgtggtgctgaggtcctgtgactatcagactcaggaggtgagctggctatttgtccccaaagctcagaaccagagaccattaggaggygggatttactcctccagctgatattcattttatcatagcacctcagctgagcagcagctccatggcttatctctcctttagtattgcaatggcttctacttcctctcactagagcatctcagatacctgatgccaaatttagcatgttctaagatgctgctgaacagattggcccattgatggggaaaaagccctgtgaatgtgcttctgggcattcaggaaagagcattagcacaaagacatatttgctttcagtaagattttgaatttcggggcagtcagaaacctcatagaggtgggtagaaggccaggtaaaagggagatgattctgggggagttaaatgctattgccatattaccttgtcatcccaggctgaattagtcttttcatcctcatactgagctgagttggactctgtgagggggtggctccagcatttgctgctgaagagcctgacttgaatcccatgagtagcagtgctgccacacccatagtggtgcctcttagcccgtcgggatgatgtggagctttgggcattggagagtccctcaaggaagggctctctgcttctggtgtcagggtggccatgtacaattatataatctgtgccttttccaaggagtgctggtttgggagaaagctgaactctaacccaggctccactctccaagctgtgtgccctggtgtaggctgcatcctcttagatgaaggggcatcattcactcgttaattcatttacttatttatggagatatgcctaatgtacagtggaacacacatattgatgggattttatttatacatacactcgtgacacactaccagatcaagacagaactttatcagtaccccagaaagtactttttaaaataattacacgaaggagccatgtagaccagtggcagcctgtctagtttacaccagctctgtggacttgcacctgtcagttttttttttttttttttttgagttggagtctcgctctgtcgcccaggctggagtgcagtggcacgatctccgctcactgcaagctccaccttctgggttcacgccattctcctgcctcagcctcccgagtagctgggactgcaggcgcccaccaccgcacccagctaattttttgtacttttagtagagatgggatttcaccgtggtctcgatctcctaaccttgtgatctacctgcctcggcctcccaaagtgctgggattacaggcgggagccactgcacccggcccaacttgcacatgttttgatgtttgcaaattgatatctagtcgatcagctaaggtgtatttgtcagctgtcaagagcaagcacagttattggctttgtggatggtatggaaaggatatatagtgcttccctgtccttcagcacctcacagactggttggtcagatagctcttgaagagccaaatcatggaagaaccctaagagagacactgtgggcagctcagtatctgagaaatgtcaaataagcagtgcttacagggttgttaattgggaagagtggagaggcacagctaagctttaggagaggtagagatgtaaggctggaaaaatgactgggttaagagaggtagagatagagataaatggcataaagaatgtggtctacacaggcagggacagtgagcagagaatgaggctgagtgcagggtggtgggggaaagccagggcaaagccaacagaggcccttctccatcattgcccatcagaatgcgtaatcaatgccaaagtcgcctctcttcactcctggcccatatgttattgagacagacaccctaagccaaaggcagctaggcacagagaacctggttgtttactggaaggtgggcaaggctgctctgagaaccataccccgaattcctttttcaaaatggatttgtcaggcatagtatctctggtctgggattagtcagacttgttacattatatcagccaactcagcctctagaaaaatctggcactaacttgtaaagataaaatgaaaggacataattgccaggtctggaaataatgctcctttgtcacttagagatcttctttgtccccagtggctggatctcacagagggtatgtcatggagtgtgaattaaagtgaccttacatctgaatggtgacgatgtcaaaattttacccagagggcaaccatttttgcatttctccagggaaagcaggctacttttgataatacagttgctcacagcatcattaagactaataaggtgctgttgatttaaaaaatgtaaaaatgtaatggagacattaggaggagaaatactgtcttttgtttgtttgttttttgttttttgagacagagtcttgctctgtcgcccaggctggagtgcagtggcgcgatctcgggtcactgcaacctctgcctcccgggttcaagcgattctcctgcctcagcctcctgagtagctggtattacaggcacccaccaccagacccagctaatttttgtatttttagtagagacggggtttcaccatgttggccaggctggtctcaaactcctgagctsaggtgatctgcccgcctcagcctcccaaagtgctgggattacaggcatgagccactgtgcctggccgagaaatgctatcttaaacattttttttttactatggaaaatttcaaacatacatgaaagtagaggaaatggtctaatgaacttttgtgttcccattgcttagccactgccatcatcaacttatggccaattgagtttaatttatctctctcacatcctaccccctagagaagcaaattccagacatcccaaaatttcatcatcagtatttcagtttgtatttccaagaaataagggctttgcatgaacataaccacagcaccacagccacatctaaataagataatgatctcttcttaaactcagcaaatattcagtcaggattctacttttctgattgtcttatgaatttayttttattattggtttgaattgtgatctaaacagggtctacacattgaatttgtctgatgcatctgtctagtttctttatgtattttctctcctttttgctccttgcagtttattattagagaactatgacatttgtcctgtggtttctcatattcaggattatgctgattgcatccctgtggtgtcatttaagatgttcctctgtcccatgtttttsttgtaaactgagaattctgtctagaagctaatcagattcaaattttattcttttggtcaagaaattctagctttttaaaaaagagtttattgaaggcttcagacatggagaggctgagagttcactgaaagcagaaccagggtttgggctaattgggagccaaagaacaatgcagtggaccacttttctgttccttttctaaagatctccttcctctgagtcagtttggttctgagtttaagaagtcaaagctttcagaggaaagttgttttttttttcccccagaaaagtcatgcctttcaccccagtgtgggggagccctccctgcatatgtgagtaggaagcctcctactcacatttgggggcttaataaatctttccccttatcacaggtcctgcatttctgaattgggccctttcctcttgttagttgtgggggtgtggaaggccagacctactatgtgtgggctatgtgaggggaacctgttgctggagcctgtgggccaygtgcagtaagttggggctaactgtgaaggtaggttggcaacactgtaatagcagttatgactaccattactgaatgactgcctcatcacagacattctgctaggtgttttatttcttattccacctgcttggccattcagcttctgcaggccctgcctgtcctgactttacttactgcctggggactgactttttaaatggtaaaatggtggctaagccctgcatgcctacagcaagggctgactgtcactttaggacatgaggccctctgggtaagctgggacttggtgaacaatctagctgtgggggactcctgctcagtccttccatttggtgccaggagcatgtcatgctggtattgatcctgcatttgtagcacttgcccgagctccttttctggagggacctctgccatctcctctcactagcacagtggttgaagctgtggagtgaattgggacactggcctgtgggctcctgcctgtggtaggggtgatagaattttggtgtctcactctctgtggttccttctgtacagatcgggcttctagtgggggtctgttgccccctagcattctcttggcccatttgtcttatattttaggttctggtcagctctgctgtggaatgggatactccctgacacatctgtgttgtgccttgggctcccaggctggccacagggctgctgtgatctctccttcctattattcgtctttacgggcacatagggttctaaagagagctttgctctagcagagacctggggcccctacttctttctaacaagagggtcacatggaggcacatgggaagcctccagggagctctagatcaccccaggatcagatcaaatcttgaatggcctggagaggcctggttgcccctaaagtgggtgaggctgctgtcagggccaacggtgaagaagagattttccctgaggggaaatagaagggatggcttttggatcttggtcccaaacactgaggagatccaagagcctcagcagcaaggatcaccccacccagtcctatctgggactaacccctgtatccagaggagcccgagctcttcaatgccactggcttgtgtggggagccaaacctcccaaagatgctggaagaaccattaaggcatttgggttcttgggagaaagggtaggtgaggaaatttcctaatagttacactgttacatttgtgtttgcaggcaggtaacaagggtcactcccattaaaaaaatttttttaattaattatttaaattgacaaaaattatgcactatatatttattatatacaacctgatgttttgaaatatgtacatattatgacatattatggaatggctaagtcaagtgaattaacatagtcatgacttaacatacttaccatttttgtggtgaggatgcttaaaatctattagcagaaatttacaagaatgcaatacattggtgttagctatagtcaccgtgttgtacagtagatctcttgttgttgttattttttcttttcttttttttttgagacaaagtctcactctgtcgcccaggctggagtgcagtggcgtgatctcagctcactgcaacctctgcctcttgggatcaagtgattctcatgtctcagcctcccgagtagctgggattacaagtgtgtgccaccatgcccgtctaatttttgcatctttagtagagactgggtttcaccatgttagccaggctggtcttgaactcctggcctcaagtgatccatctgcctcagcctcccaaagtgctgagattgcaggtgtgagccagccaccatgcccagcctagatctcttgaatttattcctcctatctaactgaaacatctcctcaaccttcccttctacctcctactgtgtcacctacacttttttgtgtatgggagtgtttgtggggatttttacagttagattctacatagaaatggaacaattttaaagtgaaattttatccatgtattcaggaaactctgctgaacatcttttggatacctatccctgggtgaagtgtgaggaataaaagaaggagcataaaataggctctgccctaaaggggcccatggtgtggggagagagaactcttgtccagatctttagcctcaacttcttcttccttaaattagagtttgctcctgccttctctttgtctcacagaggtaagagaaatgagagtatgattaaaaggggttgcattatttcatgttctaaaatagtagagcatatatttgtatggtattttacagcttacaaaacacattcataacattcacgtattctgttgggaagctccaaaggcctaagaggagtgatgtagaagaacagccagctagcagactttagcaaaccaaaatgccgaatgctgtggagaactgtgtcacttccccgcctcctcctctgtgaagatgggagatttagcaagatgatgggaaaggctttgaggagtgggaaagggtcagaaagtaggacatttgagcaaagggcagggtaggatgatgtggaggaagaagaatagtggaagcatgctggctgggggtcagaaattcaggttttaatcaatcctgrcattgcctaaacttggctatgcacgttgggtatgtccttggttttttcatctgtaaaatgagagatttaactagatgatctccacagtcccttccagctctgacagytgatttctgtgaaatgtgtaaaaaggaagggtgatgcttcccatttttcttcagctctattgagcatagaaaacaaggtctaaatcaaaagtacattgtgcactttttagtttactttgtagcagctctaaatgaagaggcttgctcttccattgtgtggcagagatttttcagaatggacaagatgactgcacattcaagcctggagccaggggcggggctggctggcaacccacctctgggttgcttctggtaggcaggggctctcggaaaactgatggcctccttgtgctgggttggttggccagccagcaaggctcctacccagacctgcagagcctgctgcaggctccctgttctcagctgtgctcggctgcttatctcctgagtgttgttccacctacttcctacaggtgctctggcagcagccagtgggccatgatttccaggggagctggggttggcaaacgctttgtgatggggaagggtggggcatgggaagggctagcctgaaagagactttagatcttcagactccagtttgggcagactccttcatttgtagaatgaagagatacatgtggttctctctgcagcttctgcagctgtgtgggttctgtgggctcaggccagatctcctccaatgtcaaagtccggtatgtgaggctgcttccttccgaagtgtggtttggcttcagtaggttatatgtttgctctgatatccttttattttgagcattgtatccaacccccaacaaatgccagaatgtctgctgtcatactctgtaggggctacagctctcccttggtgtgaacacccaagatcagyggcctttggttcttctcaggcagatgattctactgctggagagttcttttttcctgtttgtctgaatcaggtttccttacacctcctatctgctggtcttggctctgctctccagcaccgctgacttatttttgctcacaggtttagcaggcgctcactgtacctgccacgtgccagggctgaggtccctgcgcttacttcctcaatcctgattttcttctctggacttcacttctccagctcctgtggctgtgatgggactctgagacccttgccagcctggactgccctgcccaaggctgtcagtatcctaaaagtacagagaggccttagagaacagggtccagggctcagcatgtcacttggactatgagtgacatagtctgaaggatgcggggccttccctctcacagcatgagaacacccttcctacacctttatgagagcttttgggcagctactcccacacttatccagcctcatgctgggcatcttcacacgaagtctggggccttccatcctggacttacacagcccaagtgtgaatctgtggaggcctgcatgagtctctgctatgttttctctggttatacttagagatcctttccaacctagtgagactcttttggaacctgactgtgttccatgaactgggggtaataactaaggcaatgtacttgtttcaggaaccatactgtgagaacttctccccttcctaggccctgtgagcctactttctaaacccctgcatctgacctggagtggggtggccagtgttggatgctcaaggccaaggccttgccagctcaggtttggagtgatgatggctgagtagtgggagtagctgcctgaaaactctcataaatgtgtaggaagggtgttctcatgctgcaagaggaatgccccttgtccttcagactatgtcactcatagttcaggtgacatgacagctacggttggattggagaggcaaccaccccttgcaccctagccatggcagcccctgtgctctgcagaggaaacccttgtgcagatttgtcctttcctggtcagccatgttatgctggcctgtctttggggtgcattggcctttggctctgtagggtaggtatctctaggagcagcaagtgctctgcagatgaaaatttcaaacacacataaaaggagaaaggtaaaaaaaaaaaagaagaaaagaagaagaaaggatggtaggctgaagtctctcctgcaaacctaccacgtagcttcaacaatgattagcattttgccaacttgttttatctatattcctccactttttttttttggactagaggattttctttttttttttttttttttgagacggagtctcactctgtcacccaggctggagtgcagtggcgggatctcggctcactgcaagctctgcctccagggttcatgccattctcctgcctcagcctcccgagtagctgggactacaggcacccacccaccacgcccagctaattttttttttttttttttttttgagacagagtctcgctctgtcgtcgcccaggctggagtgcagtggtgcgatctcagctcactacaagctctgccccctgggttcgcgccattctcctgcctcagcctccggagtagctgggactacagccgcccgccactactcccagctaattttttgtatgtttaatagagacggggtttcaccgtgttagccaggatgggcccgatctcctgacctcgtgatccacccgcctcggcctcccaaagtgctgggattacaggcgtgagctaccgcgcccggccaggattttcattcaaaatagaaatatatcatttcactcatgaatagtttaggatgtacctctagtagttagagggtgctttactatttaattcaatggcatttatcacaaccaacaaagttaactttaatttcttactataacccaatacccagtccatatttaatttttctttattgttccaaaaatgacattttattttatttaatgtatttttttttgagacggagtctcgccytattgcctaggctagagtgcagcggcgccatcttgactcactgtaacctccacctcacgggttcaagcaattctccctgcctcagcctctcgagtagctgggactacaggtgcacaccaccattcctgactaatttttgtatttttttactagagacggggttttgccatgttggccaggctggtcttgaacgccttacctcaggtgatctgcctacctcggcctcccaaagtgttgggattacaggcatgagccactgtgcctggccccaaaaatgacattttagtttgttcaaacagtatccaaacaacgtctacatattgcatttggttgatatgttctgtaagtttctaacagtctccttgctccttttgttttcaaatccatttatttggtgaagacatcaggacatttatcctagactatctctcattttggttttgcctaagcacatcctcttgaagttattttcttgcttcctagtgtccttttatttcctataaactggtagttagatctagatcagaatagattcaatctttttggaaagaacacttcattggtattgtgtacttcctattgtatcccagaaggaggcagtatgtctgtctccttgacctactttagtgatgaaaagatggatcaggcctgggtgcagtggctcccccctgtaatctcagcactttgggaagctgggatgggcagattgcttgagcccaggagtttgagactagcctggacaacgtagtgagaccccatctctacaaaaatacaaaaaaattagccaggcataatggcacatgtctgtggtcccagctactcgggaggctgaggtgggaagatcacttgaaactgggaggtcaagactgcagtgagctgaaatcgtgccactgcactccagcctgggtgacagagtaagactgtgtttcaggaaaaaaaaaaaaaaaaaaaaaaggattaggggattcaggtagtatcagtgattaatccattataaagtccttatcagttttttttttgcctgatgaatttagcattcactaatgatccttagctagatccattatttcataacaggttgcaaaattagctgaaattcttctataaaaattatctgtcaaccttttttttaatgcaccaaacatttattaaacattgcagtcaatagcaggaacacaagaaggaaaaagacacagtcctaccctgaagatgccctccaaactgggttgaatctccatgcttgatgctcctttcaatggattgtttttaaataataatgtagatatttttattaatgataatactcatgaatgtagtttaagacttccttctggttccctttgcccttaggttatcccttttcagggatatatagttctctgttttagagttattagaaatgattctactctgtggttatctgattaagaggatataaaattaagctcttttttcccagtttgcctttaatttgtaaggattactttttgatcagttttctgttgttaccgtcattctgcacaataaaccagcccaaactcagtagcttcaaatagcaattttttattctcactcatgcatctgcatgctggctagaattcactgatctagaccaggctccaggctgcagttgggtccaggtcagatcagtgtgtctctcatcttccctggacagcagtctagctggggcatgttcttcttacggagatgagagacacacaagagggtgtgcctaacctcacagcacatttcaagcctctgacctgatgacacatctgctaacattcctgtagtcaagcaattcatggttaagcccaagtcaaggagttgtattgcagttactatggctgtgtaacatgttaacccaaaacttagtagtggaaaacagccactattctggtcacagattctgcaggtcaggaatttgggcagagcacagtagaatggagtgtgtttctacttcacaatgtctggagtttcagctggaagacttgaaggccagagattagaatcttctgaaggctcatcaattatatgtttgagagtcgatgctggctgttagctgggagccccagggcttctccatatgatttctccatgtgggctcatttgggctgcctcatagcatggttgctgagttccaagggtggggagagggcaaggtaggggttgggagacaggtggaagaccgtactgacttttatgatttagtcttaagagacatgcagtgtcacttctgccacattctgtttactaacacagtcacaagatcctgcctaggtttaaaaggaggggacgtggactctgtcagtacatgtgggactggaaatcttgctgagaccatttttggaaaatacagtctgccacagctggaaaaaatatattctgcctctagttggaggaactgcaaagacacatggcagagaacagaaatcgatggaaagtaaagaattgaaaacaacaatggcatataccgtacttttttaaaatttaatttttaaaaattatataaagctttcctatgattccaaataaaacaagatatattgagagaagtctaattccatcttgttccctctactttattctctttgcctttctgataagaaacagtttttatcagatttttcccactgtttctttttgcaaatttaagggaaaaatatatttgtttacctttcttttttatgtaaaaggtarcagactctaagtactcttctgtactttgcttttttccatgtaatcaatcttgaagatcaccctgtagcagaatatagaaatcctcctgattcctttttgcatctgcactgtgcctcaccatgtggatatgccatggtttatctatggacattgggctgtgtccagtcttttgctcttacaaaaagaagcacagtgaggmatctggaaaatgtggcattttgtaattttaccagtgtgtctgtgcgatagtttcctagaagtaggattgctgaagcaaaatggtaaatgtataagttgtttttctctgtgttgctaagactgagagccaaaggcagaagcaatartattcaggcatgagaggatgatcatggtggggtgcggggttttgcaggacagggaggtgggaaggggctgagtagtaagagtgatgaaaagtgctcaacttctgaatatattctggaaattgagccagaaggattgctgaatggttggctgtgaagagttgaagagaggagtcaggaggagctctgagttttggcctgggcatctggtgtacacagggaggaggaggaatgggcctagaccaggagtttgttcttggacaagttgttttttagaggcacccaagtgagatgttaggtaggcagctgggtattcaagtctgggttggaaaaataaagtagcacttcacctgcaagtgctttaatattaatgccacctggttcctacaagtaccctgaaaaagagataagggagaggaggaaattgaggcaatactagggttccaagagagtgaatcaagtgcattcaattaaacaaatatttaccttatcaaatgaaacattggaaatgaaagcactcagcatgaggcctgccattaagtgcctactagttgatgtcaggttccatgcccagggctgaggatagaaagatgaacaggtagattatgcccttatttattaccctagatcatgtttgagttaaacttgattgagggtatagttcctgacctctgggagctctgactcagtgggggacgcttggagggctcaggggcctactgtcgtccatcctcatcttcacagacagctgctaaaacagattatagaatttaaggctcagactgggcagttcacttgaaaggcctggctcattctattggctctagaatctgcagctagtcagagatgaagctcaggccaccagagccacagagaaaagtctctcactataggaaaagtgtcactttgactctttagccctcactcctgttcagtaaacttcatgaagccaggtggagggtgttggccttcagctggagtgacagtcgtgtgggacaggcgccccttgacagattttgagtattgggaagagggcaggagggagggagttccaggtctggggctgctgctctggggttgtgatttgctgttgggcagctgagcagagatatcataatttgactttgggatgtatatttctctggacttagggatcaggatgcaggctgtagcacacgaagctggctcggaagccaacagactggaataggactttcccaatggccaagcactcatctctgctcccctcctgtgctgaaagcactttttgcaaatgatggtacttagcactgattgcctggcagcctaagatacaccacccatagagcagagtcagaagggggtttcctgccagggcacttttggggagctatgatgcaggctaagccagtggaagaaagggaggaagggagcagacagaacagggaggcttgatctggtgctcccaacagacccggtttgccactttgcctgcctccactccgccccttcctccccagctttattagggtgagtgttggagcccacccaagggtccatgctgtcattggtactttgcacctacatggccattctgttgtttactttggtttgagccgtggaaacagagactgaagagcagcaggcaccagcctctgtgctgtccctactcaggcccccagttgggggtgaggagccctgggaagaccatccaaagttccaggggcagacgccagagctacacaatcacctccttttctagatagtaagaaacaaagaaaaacctctacacccctgagtgttgagtgaggaaagcaaacatgttctccctgtattcaaattagccagagagcctggtggggactcttgggggcaacaccttcccttccaatgccaaggcaatacctccccttccaggctcactcctctgagcctgcctggtagtgcaaataacttgttttcagaggcaagaagaaagaggaaactagaagttttgcctttttggaaagcatcctgtgctacctgcagtcccacatgaacactgactctggggctcccaggcctgtgaaatggagtggaagtgaccccaggagtaccagagctgagccttccagcaaagtttggcagggaatgtgggcctcagtcacactccttcagcttccttttccttagtccctactagtggctcaggaaaaaacaagaagttcagatagcgacaggcattgcttttgaaaagatagtaacagtacttagtagtaactgaggaattttaaaaatacactgtgctttttttttaattctgtgtagctctggccaatagagagttaagagcactggtgggatggaaatactaattccagagaggtagtgggcatttccaagcatcccacagcaagtcaggggcaggacagggaagaggagcctgggtttcctagctccagcctctgcttggtgaatctccctggctactttggaataagaaagctttcatgtgtccagtgaagggtcagggcatccagtgggtaagaatggcatacttcctgcccctgttgcagggcacaggcctctgggtagagtagactggggttggggagacgggggtgggcagcttcaagtagctttggggtataaggctccagggccagaagagcccaggactcataggatggagtttggtggcaaagcctctgccacagtgagactacttggaacagcccactttggtagtgcactcactctgagccaggccccagaggcctcagggtatagtagggaatgaggacagagattgttcatccctttcttcctccaactgccatggacatgggggataactctgtaaacaagccgacatgttctagatgcatatggagcacacagccatcaggagtaagacccacaccatgtaagtgattctggtaacgtgtactgattattattcgatggcatgcagtgggggtgggtttaggcataagggatagaggtagcaacaccaactccccataccccaataaattagcttttccagagaccctgctttatcctcagagaaggctttgctccccagagcacatatcattttgagaatattgtttctttgtccattcattcaacaagcatttagcccctgctgtgtatcagagtctgcgcaggctctgagttcacagsggaaacacaacagtcagcaggttggatcccacagactgtatgagcacaacacagtctgaatatagcattgaatactgaaacagtgttgaccattggacttgtaggagctcttttcttgggaaaactttagtttataacatgatggagattgaattaatctgacataaaaactttttgggacaaaaataaatgattttgtttattgtccataagagatcttaaaaagtcttttgtttgggaatggaacctctactcaaacccaggtttgggctccctagggccttgaagtcagtgggagcagctgagtagggagtggttgatggatcaaggaacacatttaggggaaaatatcacaatccaacttggacagcctcaggtcgaaagtgggtgatattataagatcagagtggtatcctttggaactcaaggatagtttgcagccaggtcttggacaagaatgaggaatcagggaaaccatcccctgtatctactttctttcttttttttgagacggtgtcttgctctgtcgcccaggctggagtgcagtggcgcgatctcggctcacggcaagctccgcttcccgggttcacgccattctcctgcctcagcctcacgagtagctgggactacagtcacccgccaccacgcccggctaattttttgtatttttagtagagacagggtttcaccatgttagccaggatggtcttgatctcctgaccttgtgatccgcccgcctaagcctyccaaggtgctgggattacaggcatgagccaccgcgcccagccaccttgcattttcatgggctcctcagatccctcagctgtgtgtgcagaagaaaggaggaaggccggtgaataggcagcctctgccaagtacctcttttggggatgactctcaggtactycgagactgggggaggccaagtctcagagtacctgagggacccaggctcatggagacttctccactccgtctttcctaggtgcaatgccagggtcttggatgtagcggtgagcaaagctggtgcagccctattctcaaggagataagggcctaatgggagagactaactttaatcacatacaaatcaaaattctattgaaggagtaggaccagaagccatgagaactaatgccctgaggcagtgatgccaggtgaagacatgtgtgatgtgtgtctgaggggtgaataggagtcaaggaaataggtaggtggggaggaaaggggggtcaagccttctaggcaggtggaaccacacatgcaaaggccctgaggctcatgatcaaagaaataggacatgccttttcagtggaagatggaccagaaagatggaggggagcaaagggacatgttctggcaatggtacacacagcctacttctagccaggacatcctcctgctatgattgctgggactggttgttctgtctttcctgtcccctctaactcctccccagctttttcctctgggctccaayaggagctcactgcccctccctgctttggggttgtttgtccagctagttgctcctgccactatgagagggcaccaaaatagttgttgcccccatgaggagaggtagagaggtagcagcagtactttctctctgktttttttttttttttttgagacggagttttgctcttgttgcccaggctggagtgcaatggcgcaatcttggctcaccacaacctctgcctcctaagttcaagcgattcttctgcctcagcctcctgagtagctgggattacaggcatgtgccaccatacccggataattttgtatttttagtagaaacggggtttctccatgttggtcaggctggtctcgaactcccgacctcaggtgatccgcccgcctcggcctcccaaagtgctgggattacaggcatgagccactgcgcccagcctttctgtttttgagatggggtcttgctccgttgcccaggctggagtgcagtggtgcagtcacagcccrttgcagcctcagcctcccgggctcaagcaatcctctcacctcatcctcccaagtagctgggactagaggtgtgcgtcgccacatctggctaatttttgtatttttgtattttttttttttttttttgtagagatggggtttcgccatgttgcccagactggtcttgaactcctgggctaaagcgatctgcctgcctcagcctcccaaagtgttgggattataggcgtgagccactgtgaccagctaatagtacttttaaaaacatgtttttggatgcatagtgaaattattatctctttcccaggagtcatcaggactagaggtacagtcaggtttgactgctgaccagggatcatactctggcaggttccccacaggaagtgcattgcaggggtgggggcaggaaagcctgcacatggtagcttttttcaggtgaccatgacacccctgaccacagttggagtgcaatggcgtggtctcggctcactgcaacctctgcctcctgggttcaagcgagtctcctgcctcagcctgcctagtaactgggattacaggcgcctgccaccatgcctggctaatttatgtgtttttagtagaggtggggtttctttttttttttttttttttttttgagacagagtctcactctgtcaccgaggctgtagtgcagtggcacaatctcggctcactgcaacctccacctcctgggttcaagtgattctcttgccccagcgagtagctgggactacaggcgtgtgccaccatgctcagctaatttttatttttttctttttaagtagagatggggtttcaccatgttggccaggctggtcttgaactccggacctcaagtgatccgcctgccttggcctcccaaaatgctgggattacaggcatgagccaccgcacccagctggtgtcccttttttatattactcttctgagttctggtatgtcagtacttttgagttttgactatgttgatgagactcttctggaattttttcttttggcttaaaattttaaaaaattatacaagtaaggccgggcgtgatggctcacgcctgtaatcctagcactttgggatgccaaggcgggcagatcacttgaggtcaggcttgagttgccgaagatcagcctgggcaaaatggcaaaatcccatctctactaaaaatacaaaaattagccgggcgtggtggtgggcacctgtgatcccagctactagggaggctgaggcaggagaatcacttgaacccgggaggcagaggttgcagtaacccgagatcgcagcactgcactctaacctgggcaagagagtgagactctgtctcaaatatatatatgtgtgtgtatatatatgtaaatatatatgtgtgtatatatatgtaaatatatatatgtgtatatatatgtaaatatatatgtgtgtatatatgtaaatatatatatgtgtatatatgtaaatatatatgtgtgtgtatatatatgtaaatatatgtgtgtatatatgtaaatatatgtgtgtatagatgtaaatatatatgcgtatatatatatttgagacagagtcaaatatatatacatatatatgtgtatatatatagtatatatatgtatatatatgtgtgtgtgtgtgtatatatatatatatatatacaagtaagacacagacacattcttggagtaatattcaaacaattcagtcatatattgaagtacaacgtccactgcccctttttttctagtgcagtccatctccaccttgggtcaacttccactgccccttccttttccagcattattacttttctgggcatatttctaggatctttttagaagattataggatctttttagaagatcctagaaatatgcatttatatctgtgaacctattgtgaatatacacacgcatacttttttgaagaaagatcatactaaatgcattgctttgcaccttgcttttttcactgaacaatacgggagatacttctccccaccctcccacttttcagagaattagctgttttggtcccagataacttttgtaagagacaaggtgttgtctcttactgaattagagtaaccgctggtgccttttggggctgttgggtactcctgtgtcccaggtgaatctccaagtaaaccactatatcttctgttctagctggattcctacttgctccatctctgagggcactgtgagctgcagcagcatcctgcttggggaggacagtggccttgtcacctaggttctgcctttggattccagggagcttccaggctcttgtctccctttctggccagggctgtctcttgaatgcaggaatatctgggaaattccctgtttcttccttggtaagaggtgtgaattcacttttctttttttttcttttttcttttttctttttttttttgagacagagtcttgctctgtcactcaggctggaatgcagtggcacgatctcagctcactgcaacctccatctcctgggttaaagtgattcttctgcctcagcctcccaagtagctaggattacaggcacccaccatgatgctcggctaattttttgaaattttagtagagatggggtttcaccatgttggccaggctggtcttgaactcctggcctcaggtgattcacccacctcagcctcccaaagtgctgggattacaggcgtgagccactgagcatggcctcactttctttattcataccctcatatctgggcagtctgccttgctcaggctcatactcatctgagcagaagactgctttcagaggttccctgggagcagggccattgcagcatgagtagtcatttgcagccagcatcctgcctttcttcttgatgccagatggtgccctacattggtatatgctgcctgtgtcccttcagagactcaaccccaatccggaaggagggtggttcccatctctctggaactcttctccaaaggttttggtgtttggaatttgaaatttttttctagtgcagtccatctccaccttgggtcagacctcctttccagggcacgatagtgcttggagtcattcatttattcaacaaatatgtattgagcacctgttacatgccaaacactgttctaggcagtacttaatgttggctactaattatgtcctgctcccgaatttcttcgctatcttgcttgtttccctatggcttgtgagaggcttctgcctctaaatttaccccaggaatatgaattttgaatttctaggcaatcaaattacaagagtttgttcctgggttttaactcaaattctaccctactgggaacattttttatcttctatgaaatggcaaacagctaggagacatgtttcctaggaactggccttcttggtgcatttcagaggaagcacttcatttcagagggttgagattgtgagagcagggcttggaggccaggagttcccaggccaggtcctagccttgctgcctgtttttctgttgaccttcagctgctttgtttcttttttcttttcttttctttctttttttttttttgtgagacagagtctcgcactgtcgcccaggctggagctcagtggcatgatcatggcttactgcaacctccacctcccaggttaaagcgattctcctgcctcggcctcccaagtagctgggattacaggcatgcaccaccatgcctggctaatttttgtatttttagtagagatggggttttaccatgttgcccaggctggtctcaaactcctcacctcaagtaatccacccgcctcggcctcccaaagtggtggaattacaggcatgagccaacgcgtcagcttgctttgtttctttaatctttagttttcttggaaaaaatggaaatgataagaatacccacctgtgtggttgttaggcaggtattatgtaaaggaagagcctgctacatagagtgagctgagaactgctgggggtagcggggttactgtcctgattcccagcagtgaaaggcatttaaatcattacaggtttcacacctaagttttcttttttcattttaaacatcacttgttattttctaattttgtggatgcttaatacattagcacactaatacatgcttacaatttagaaacgaatattgcatatttgggggctgtaggctcggctatccttttcttaaagacaggaccttccttgttgcccacctaggatggtctcaaactcctgccctcaatgctgccacagcctcccaagtaactgggattataggcacaagccactgtgcctggctagttactcttttaaaaatatctttctgagatataattcacttaccatagaattcactcattttaactgtgccatccaatggtttttagtgcacttagagttctacaaccaaagctacagtttttttttttttataagacggagtctcgctctgtcgctcagcctggagtgcagtggtgcgatctcagctcactgcaagttccgcctcctgggttcacgccattctcctgcctcagcctcccgagtagctgggactacaggtgcccaccaccttgcccggccaattttttgtatttttagtagagatggggtttcaccgtgttagccatgtggtctcaatctcctgatctcgtgatccacccgtgtcggcctcctaaagtgctgggattacaggtgtgaaccaccgcacctggcccaaagctacaatttgagaacattttcatcacccacaagaagaaaccccatacccaaaatgtcactttccattcttcccccctctatctatcctccaggcctaaggtaaccactaatctactatccacctctctagatttgcctattctggacatttcatataaatggaatcatgcaatgtgtgttttgggggtttggcttctttcacttagtgtgttttccaaggctcatccaggatgtaagatgtagtgtgtatcagcacttcattcctttattcatttatttgtttagagagggaatcttactctgtcacccagaggacatggaggctggagtacagtggtatgatcatggcttactgtaacctcaaactcctgggctcaagagatcctcccacctcagcctcccaagcagctaggactacaggcatgcaccaccatgcctggctaattttttttttttttttaagtgacagaatcttcctatgttgcccaggctggtctcaaattcatggcttcaagtgatcctcctgtctcaggcacccaaagtgctgggattacaggcatgagccactgcactcagccagttacttctttccttcttattgcccagtgatatttcattgtatggatgtaccacattttatccatttatcaataagtatgattttaggtatgggtttttcatagatgcgctttacaattttttttttttttgagacggagtctcgcactgttgcccaggctggagtgcagtggcaggatctctgctcactgcagcctccgactccagggttcaagcaattctcctgcctcagcctcctaagtagctaagattacaggcgcccgtcaccacgcccggctgattttttctttctttcttttttttttgtatttttagtagagacagggtttcaccatgttggtcaggctggtctcgaactcctgacctcatgatccaccagcctcggcctcccaaggtgctgggattacaggtgtgagccaccgcacctggctagatgcgctttaaaaaattgaaattcctttctatttctagtctgttaaatttttttaagcataaaaaggtattgaatatcaagatgatcatgtagtttttgtaatcttgatagatggtttttgtccatcattctattaatatgctatattaattgattttttagatgttaagccataattgcatgtctgagaaaaattcatttggttattatattaaatcctttctatatgtcaccggatttgttttgctagtagttgtttataatttttgcatctatagtaacaagatatattggtctaaagttttcttgtgatgtttatgtctgtttttttacaaatttaatttgattattttattttgtttatttcattttatttagatacagggtctcattatgttcctgaggctagattcaaactcctgggctcaagtgatcctcccaccttattcccctgagtagctgggactacaggcatgtgccaccacatccaatttatgtgtggttttgatatcagggtaattgtggcctcatggaatgagttgagaagtgttttatcctgttctattttttggaagagtttgtgaaagattaatatgaaatcttaagacagttttattgagatataattaatatgccagaaaatttacccatttaaagagtataattcagtggtttattacgtattacattataaatttttttaggatcttgctctgtcaccgaggctggagtgcagtggtgcgatcatgacgcactgcagcctcagcctcctgggctcaagcagtcctctcatctcagcctcccgggctcaagcagtcctctcatctcagcctcccaaagggactacagtcatgcaccaccatgtctggctaattttttaatattttgtagatatcaggttttactatatagtctagactggtctcgagctactgtactcaagcaatcctcctgcctctgcctcccaaagtgctgggatttacaggcatgagccactgtgcctggtcacattattaatcttttaaaaatggtgataaaatataaatatcataaatttgccattttaaccattttaagtgtacaatttagtggcattaattactgtatattcatgattcatgttgtgcaaccatcaccactatctatttctaaaatttttaatcaccccaaactctgaccattaaccagcacctccccattgacccctttcttcagcgcctgttaacttttttttttttttctttttgagacagggttttgctctcatcactcaggctggagtgcagtggtgtaatcttggctcactgcaacctctgcctcccgggctcaagtgattctcatgcttcagcctcccaggtagctgggcctacagaagtgtgccaccatgccaggctaatttttgtatttttagtagtaaagactgggtttcgccatgttggccaggctggtcttgaactcctgacctcaagtgatctgcccacctcagcctcctaaagtgctggaattacaggcatgagccactgcgcctggcctatccatttattgatgggcacttgggttgtttctactttttgactccagtagtccccccttatctgcggtcttgctttctgtggttttagttacccacggtatggtacaatcatattttgagagaacacattcatatagcttttattacagtatattgttataactgttctattttattattagttattgtgaatctcttattgtgcctaatttatatattaaacttcatcataggtttgtatatgtaggaaaaaacaaggctgggcatggtggcttacgcctgtaatcccagcacttggggaagccgaggtgggcggatcacaaagtcaggagatcgagaccatcctggccaacatggtgaaaccctgtctctactaaaaatacaaaaattagctgggcatggtggcacgcgcctgtagtcccagctacttgggaggctgaggcaggagaattgcttgaacccaggaggcagaggttgcagtgagccgaaatcgcgccactgcactctagcctgaagagagagcaagactctgtctcaaaaaaaaacccaaaaaacaaaacaaaaaaaaacaaactttgtgtatataggcatctactgggggtcttggaacatatcccctgaggataagtgggggctactatattgtgaataatggtgtaataaacattggcattcaagtatctgttcaagtccctggttttacttcctctggatataaacctaagagtggaattcctggatcatatggtaattttatgttaggcttttcgaggcgctgccaaaaatttttctgtagcagctgtaccgttttacatttccaccatcattgtatgagggttccaatttttccacgtccttgtcaacacttgttattttctgtttattttgtttgtttttagtaatagcctaaagagtgtgaagtggtatcttattgtagttttgatttgcatttttctaatcaatggcttattggccatttgtaaatctttagagaaatgtctgttcaagtcctttgcctatttttgttttcaagacagggtcttgctgtgttgcccaggctggagttcagtggctatttacatttgcagtcataacacactacaggctcaaatttctgggctcaagcaaccctcttgcttcagcctactgaggaactggaactacaggcccagctgaaatgaactgccttttgtgtgttgattttatatccttcagttttgctgaagttgtttattagttctaacttttttgtggcctgtttagggttatctacatgtaagatcatgtggtctgcaggtagagataattttacttcttcttttccaatttggatgtcctttatttattttttttcttgcccaatagctctgactaggacttccagtactatgttagatagaaatggtaaaacttccttgcacatcgttgtcttgtttctgattgtaaagggaaagcttctaatttttcactattgagtattatgttagctgtgaacttttcataaatagtccttatcatattgagaaagttcccttctatttctagcttaagtcttttgaatcatgaaagtgtattgacttttgtcaaatgctttttctgcatcaattgaggtaaacatatagtttcttcccttcattcccttcattctattaatatggtgtattacatttatttatttatttatttatttatttatttatttatttatgagacagggtcttgctctgttcccaaggctggagtgcagtggtgcaatcttggcccactgcagcctctgcctcccaggttcaagagattctcctgcttcagcctccagagtagctgggattacaggtgcgtgcaactactcctggctaatttttgtatttttagtagagatggggtttcactatattggccaggctggtctcaaactcctggcctcaagtgatttgcccacctcggcctcccaaagtgctgggattacaggtgtgagccactgtgtctggaacattgattgatttttggatgttcaatcaaccttgcattccagaaataaagcccaatagaaggatgtacratacttctaatatgctgctgaattcagtgtgctagtattttcttaaggatgtttgcatctcttttcataaggaaaattgatctgtagttttcttgtagtatctttgttgatattaatttatttttggctgggcacagtggctcatgcctctaatcccagcactgtgggaggctgaggtgggaggatcacttgaactcaggagttcgaggctgcagtgagctatgattgtgtcactgcattccagcctggatgacagagcaagaccctgtctgttataaaataaaatttttaaaaaataaattctttttcaatggttagtaggattcaccagtgaagacaactgagcataagcttttctttgtgggaagttttaaaattacttattcagtttatttatgtgttataggtctattccgatttttcatttcttcctgagtcagttttgatagtttgcatcttggaatttgtcaatttcatctaaattacctaaggatgtgtggttgttcatagtattctcttgcaatccgatttatttatttatttatttatttatcaagatggagtctcgcactgtcgcccaggctggagtgcagtggcgcgatctcggctcactgcaagctctgcctcccgagttcactccattctcctgcctcagccttctgagtagctgggactacaggtgcccaccaccatgcccagctaatttttatttttattttttttatttttagtagagacggggtttcaccgtgttagccaggagggtctcgatctcctgacctcgtgatccacccacctcggcttcccaaagtgctgggattacagacgtgagccaccacgcccggccaatccttttaatttatttaagattggtagtaacatcctttcttttatttctgattttagtcatttgaatctttttttctttgttaaaagaaggcttattgatttttttttttatcttttgaaagaaccatcttttggttttattgtctttctctattttctattctgtatttcacctctaatctttattattttcttcattatatttacattgtgtttagtttgctcttctttttctaagtattaagtcggaagtttaggttattggtttgaggtcttttctcttttttgttttattttctatttttcatttttttgggcacttagtaggtgtatatatttataaggtacctgagatgttttgatacaggcatgcattgtgaaataagcacaccatggagaatggggtatccatcccctcaagcatttatcctttgagttacaaacaatccaatcacattctttaagttatttaaaaatatacaattaagttattattgactatagtcaccttgttgtgctatcaaatagtaggtcttattcattctttctaactatttttttgtgtacccattaaccatcctcacctcttccaccaccctcccactacccttcccagcctctggtaactatccttctcttctccatgttcatgggttcaattgttttgattttcagatcccacgaataagtgagaacatgcgatgtttgtctttctgtgcctggcttatttcatttaacataatgatctctagttctggccgtattgttgcaaatgactgtatctcattctttttttatggctgagtagtactccactgtatatacgtgccacattttctttatccattcagctgttgttagacacctaggttgcttcgaaatcttagctattataaacagtgctgcgacaaactcaggagtgcagatatctcttcaatatattgatttcctttcttttgggtggatacccagtggtgggattgatggatcatatggtagcccaatttttagttgtttttttttttaattttaatttttattttattgaattatttttggtgtgtctaggtcaaggaaagaggagatcgtgggtggggaaacagactgagggaatcagaagcaccactgtccatccggaattaaatccacatcccagtatcttctgcacatatttcactaattatttcctctcggaactcctcccctcgtgcttcttcctctggtgaggccggcgctcccttcccaggccgcagcggacagacagggattgggtttcgtgtgcctgccacaccaggcaggctcttgcggctcccaactaggcggccttgcactccgtgtgcactggccacacatccttgcctcctccacccggtccgccgccggtttccttggaagttaaatcttggaggatttgtccacacccctcacgtttcttcagccgcccctgggcgctgcgtctaaccccaatttttagttttttgagaaacctccaaactgttcttcatagtggttgtactaatttacattcccactaacagtgtacaagggttcccttttctctacatccttgccagcatttgttattgcctgtcttttggataaaagccattttaactggggtgagatgatacctcatttagttttgatttgcatttctctgatgatcaatgatgttgaatacctttttatatgcctgtttgccattcgtgtgtcttcttttgagaaatgtctattcagatcttttgttcatttttgatcggattattagatttttttctatatagttgtttgagctccttatatattttggttattaatcacttgtcagatggttagtttgtacatattttattccattctgtaggttgttccttcacttttttgattgtatcctttgctgtgcagaagctttttaacttgatgtgattccatttgtccatttttgttttagttgcctgtgcttgttgggtattggtcaagaaagttttgcctggagattttcccctatggtttcctatagtagtttcacagtttgaggacttatatttaagtccttaatccattttgattttatttttgtatatgatgagagataggggtctagtttcattcttcagcatatggatatccagttttcccagctctatctatctatctatctatctatctatctatctatcattatctatttacttatttatttattctgagacagggtctcactctgttgcccaggctggagtgcaatggcacaatcatggctcactgcagcctcaacctcagcctcctgggtagctgggactacaggcacacaccagccaattttgtgtattttcagtagagacagggtttcaccatgttgcccaggctggtcttgaactcctggactcaagcaatccgtccatctcagcttcccagagtgctgggattactggtgtgagacaccacaccctacccccagcaccatttattgaagagactgtcttttctccagtgtgtgttcttggcacctttgtcaaaaatgagttcactgtaggtgtgtggacttgtttctgggttttctattctgttccattggtgtatgtgcctttttaaaatgccagtacaatgttgttttggttactatagctctgtagtctaatttgaagccaggtaatatgattcttccagctttgttctttttgcttaggatagctttggctgttctgggtcttttgtggtttcatataaattttaggatttttttttattctgtgaagmatgtcattgatagtttgatagggattgcttttaatttgtagattgctttgggtagtatggacatttaaacaatattgattcttccaatccatgaatatggaatatttttccattttttggtgtcctcttcaatttaattcttcagtgtttcatagttttccttatagagatcttttacttctttggttaagttaattcctaggtatttaattttatgtgtggttattgtaaatgtgattactttttatatttcttttgcacattgttcactgttggcatatagtaatagaaatactactgatttttgtatgttgattttgtatcttgcaactttactgaatttatcaattctaatagttttcttgtggcatcttccagtttttacaaatataagaccatatcatcagtaaacagggataatttgacttcttcctttcccctttggatcccctttatatctttctcttgtctgattggacttaagtactgttgttactggtggagggtcttgactacaagtggtccaggttcttggcattttgaacaaagaattggagaaaacgcacaaaacaaacgaaagaatgaagcaatgaaagcatagatttattgaaatgaaagtgcactccacagactgcgagcaggctagagcaagcagctcaagagtgctgcttacacaattttctggggtttaaatagtctttagatgtttcctattggttgcttgatttgctccctgtgtagatgaagtggtagcctgtgaccagtatgattggttgtggaaggcgatcagtcagaggctgaagtgaagttacaaagttacaccctatgcaaatgtctgattggttgcgggagaggaccaatcaggggtactttctgtttctcatctgccatgcaaaaggagtaacttctgtcattttgttacttgggcagggaaagttggggtttttcttttcttttcttttcttttcttttcttttcttttctttttttttttgagacaagagtctcgctctgtcgcctgggctggagtgcagtggcgcaatctcggctaactgcaaccttcgcctcctgggctcaagcgattcttctgcctcagcctcccaagtagctgggattataggcgcctgctaccacgcccggctaatttttgtatttttagtagagatggggtttcaccatgttggccaggctggtctcaaactcctgaccttaggtaatctgcctgcctcagcttcccaaagtgctggaattacaggtgtgagccactgcacccggccgggattttccttttgattcagttctaggaagtcagtgcaaattgaccttaggttcccttcctccagaccctattctcctgcctcactatgttgaatagcagtgatgacagtgggcatccttgtcatgttccagatcttagaggaaaggctttcgatttttccccgttcagtatgacactagctgtaggtctgtcgtatatggctttcattattttgaggtatgttccttctatccccagttttttgagggttttttttaaaatcatgaagggatgttgaattttttcaaatgctttttcagcatcaattgaaatgaatctttcttttcttgaatataggtatttgcagctagaaatttctctgagtactgctatcactacatccaatgttttgatatgcagtgttttcattttaattcctctcaaagtactttaaaatttcttttgtgatttcttctctgacccatgagttatttaggaatgtgttgttcaatttacacttatttgtgaattctgcaaatttatttckgttattgatttctaatttaattatattgtgttcagaaaacattcattgtatgatttcaagtcttttcaattttttgaggtttgttttgtggcctagtttatggcctaatctggagggtgttccatgtacatttgagaagagtgcgcattctgctgttgttgggtggagtgtttttttttttttgagacagagtctcgctctgtcgcccaggctggagtgcagtggcgcgatctccacgcactgcaagctccgcctcccgcgtttacgccattctcctgcctcagcctcccgagtagctgggactacaggcgcctgccaccacgcctggctaaattttttttttttttttttttgtattttttagtagagacggggtttcaggatggtctcgatctcctgaccttgtgatccgcccgcctcggcctcccaaagtgctgggattacaggcgtgagccaccgcgcccggccgggtggagtgttttttaaatacccgttagttctaattagtttatagtgttgctcaagttttttattttcttgttgatcttctgcctagttgttctatccattattataaagtattgaagtatccaattactgttgttgaattgtctatttctcccttcaattccgtcagttttgcatcatgaattttggggctctgttcttaggtctatgtatgtgtatatgtttacaaatgttatatctttctaatggattgacctctttatcaatyttcaatcttcattttctttttctttctttctttcttttttttttttgagatggagtctcactctgtcgcccaggctggagtgcagttgcgcaatctcagctcacagcaacctccgccttccaggttcaagcgattctcctgcctcagcctcccaagtagctgtgactacaggcgcatgccaccacgcccggctcattttttgtattttagtagagacggtgtttcaccatgttacccagggtggtctcaatctcctgagctcaggcgatccaacagcctttggcctcctgaagtgctgggattacaggcatgagccaccatgcctggccaatcttcattttatttttccttctttctttttctttgttttttttttttgagatggagtctcactctgtcgccaggctggagtgcagtggcgcaatctcagctcactgcaacctccgcctcccaggttcaagtgattctcctgcctcagcctcctgaggagatgggactacagtcgtgtgccaccacgcccagctaatttttgtatttttagtagagacggggtttcaccatgttggccaggatggtcttgatctcttaacctcgtgatctgcccgcctcggcctcctaaagtgctgggattacaggtgtgaaccaccacgccccgccaaatcttcattttcaataacatttgttttgtgttgtaaagtctgtttggtctggtattagtatagccattacagctgtctgtggttgctgtttgcatgataatctttgcccattaaaaaaaatttcaacctatttgtttctttgaatctaaaatatgtcctttagatagccttttgttggattctttaaaaaaaacaaatctgataatctctgcctttagattatttaatccattttcatttaattaacattattaatatggttggatttatatctggcattttggttttttactatttgtctcatgcttttttatttatctcttccactgtaatttactacttttttttattaagtgggcattttctagtgtaacattttaattatatattttaaaattatgtgcctagtggttgctttagggcttacaatacacatcttaatttatcacaatctacttcaaattaatgctaacttaattccagtgaaatatagaaactttactcctatacagctacgttacttcccccatttttgtgctattgttatatatattatatctacatatgttataaacccaataaagcataataattattacacataattatatagttataattgtgactttatgtaatattatataatgttatataaccttatatgatctttttaagagggtgagagaggccaggttcagtggctcatgcctgtaatcccaacactttgggaggccgaggtgggtgggtcacttgagaccaggagtttgagaccagcctggctaactaacatggtgaaaccccgtctctaccaaaaatagtaaaaattagccctgggaggcaggagaatcccttgaaccccggaggcagaggttgcagtgagctgagatcacaccattgtactccagtctgggcagcagagtgagactccatctcaaaaaaaaaaaagaaaaaaagaagctgagaggaataaaaggagagcaagtgtatatttgtagagtttgttgtatatcggccctcttatttaccattcctgtgggttcaagttactatctgatcatttccttacttcaatacagctttgttcccacttacctcctttgtgctctttttgtcaaacatattacacttctatatgttacatagaaacaatacagacacatacacacattgttttatggaattgctttttaattcagttaagagagtaaaagagatgaaatatgcaattatgctttcttttgtacttacctacctaattacctttaccagcactctttgtctttttgtgtggattcaaattatggtattgtgtggtgtcacttgctttctgcctaaataactttgttatttcttgtaaggcaatctgccaccaacaattttttttcctgcttttgtttatctggtaatatctttattttgcctttatttaaaactaatctatttcttccagatttttgtttttgtttttgtttttttttgaggcagggtctcactctgtcacccaggctgtagtgcagtggcatgatctcagcctcgacctcccaggctaaagccatcctccctacctcagcctcttgagtagctgggactacagatgtgtgccactatgcccaactaatttttgtattttatgtagagatggggttttggcatgttgcccaggctggtctggaactcctgagctaaagccatccacccaccttggcctcccaaagggtacgattacaggcatgaaccaccgcccccagcctcttccagagattttcaaactgcctttatatttgttatttaaaagatcactggctctgataaagttgagagccaaagacagagtaatattataaaatgatgaaatatcaacacatctctcattcacaatttttaaaaactgacaaaccaatgggataggataatttgagagagacagttgatttttttaaaattgtgattattatttctcaattatttatttatttatttatttttttttttgagatggagtctcactctgtcccatgctggagtgcagtggcatgatctccactcactgcaacctctgcctcccgggttcaagcgattctcctgcctcagcctcccgagtacctgggattacaggcacgcaccaccatgcttggctgatttttatatttttagtagacacggggtttcgccatgttaaccaggctagtctggcactcctgacctcaggtgatccacccgcctcagcctccaaagtgctgggattacaggcgtgagccaccgtgcccgaccaattatttctcaattttttaaaaattgaatttcacatgcagctgtaagaaataatacagagagggccggacgcggtggctcacgcctgtaatccccagcactttgggaggctgaggcgggcggatcacgaggtcaggagatggagactatcctggctaacacggtgaaaccccgtctctactaaaaacaaaaaattagccgggcgtggtggcgggcgcctgtagtcccagctactcgggaggctgaggcaggagaatggtgtgaacctgggaggcggagcttgcagtgagccgagatagcgccgctgcactctggcccgggtgacagagcgagactccatctcaaaaaaaaaaaaaagaaataatacagagagattccttttacattttgcccaatttttcgcagtggtaatgtttagcaaaatggtgcagtatgatattataaccaatattcataaaatccaccaatctttctcagatttttctagttttacttgtactcatttgtgtgtgcttaagttgtatacaattttatcacttgtgtaggtttgtgtatctatgaccacagtcaagatactgagcagttccaagcacagggatcctttgtgttgtctttttacaactgtattcacctcgttttgcccaacccttccaccccatccctaatccctggcaaccacaaatctatcctccattaaagcaaaatatgttatttcaaacatgtagtataagtggaataatacaatgtgtaaccttttggggttggcttttttcactcagtgtaattccctagagattcatccacttgttgtatctgtcaatagttcattccattttattgctgagtagtatttcatggtatgcatgtatcacagtttgttcaaccattcactgttgaaggtcatctgggctgactccagtgttggtctattacaaataaaccttttatgaacattgatgcacagatttttgtgcaaacacaagtcttcatttttctggtataaatgtccagaaataaaatcgctgggtcatttggtagttgcatgcttagtttttaaagaaattgccaagcttttccagattgattgtgccatttatatttccaccagcaatgtaagagtgattcagtctctctgcatctttgtaagtatttggttgttttttcattttagttatcattataggtctgtagtgaatcctgttgtggttttaatttgtatttccataatggctaatgatgttgaacatcttttcatacactttttgccatgtgtgtatcctcttcagtgtgtctgttcatgttttttgctgttttctaaatttttttcttctgttgagttttgagggttctttatatattctagatactagttttttttttkttttgttttgttttttgtttttttttttttttgagatggagtctcgctctatcgcccaggctggagtgcggtggcgtgatcttggctcactgcaaactccgcctyccaggttcacgccattctcttgcctcagcctcctgagtagctgggactacaggcacccgccaccacgccttcctaattttttgtatttttagtagagacagggtttcaccgtgttagccaggatggtctcgatctcctgatctggcgattggcctcccaaagtgctgggattacaggcgtgagccaccacgcccggccgctagatactagtttttaaaaattaaatatgtagtttcaaatacattctcccagtctgtagcttttcttttcattcttttcacatgggctttaacaaagcaaaaccttttaaatttgatgagatctaatttgtcagtctttcctgtaatggcttatgcttttagtatcaagtctaagaactctttgtctagttgtagatcctgaaatttttcctaacatttaagtctattagccattgttagttaattctcatataaggtttcaagcttaggccaaaatttattttttaaaacaaatatggatatccagttgttctagcaccatttgttgaaaaggctgtctttcatcctttgagttggttttgcagctttataaagaatcaatttagtatagctgtgtggatgtatttctgaattctctattctaaatcctctattgatttatgtgtttatccttccaccagtagtatactgtttttattactgtagctacacaggaagtcttaaattgggtagaataatttctcccactttattcttttttgagaagattattttagtattccagggtccatgcctttctacataaattttagaatgagtttttctatgtctgtaaaaaaattactgagattttgataggaattgaattaaacttacagattaatttgggaagaatgaacatcttttctacattgactatgttcagtccatgaacatagtatatcttcccatttatttagtttttttaaaatttctttcatcagcattttataatttttaacgtacagatcctacaattttttttttttttttgagaccaagtcttgcttgctctgtcaccaggctggagtgcagtggcacaatctcggctcactgccgtctctgcctcccaggttcaagtgattctcctggctcagcctcccaagtagctaggaccacaggcgtgcaccatcatgcccggctaattttttgtattttagcagagatagggtttcaccatgttggccaggatggtctcgatctcctgaccttgtgatctgcctgccttgacctcccaaagtgctgggattacaggcgtgagccactgcgcctggccacaattyttttttttttttttgagatggagttttgctcttgttgcccaggctggagtgcaatggcacgatctcggctcactgcaatctccacctcctaggttcaagcaattctcctgcctcagccttccgagtagctgggattacaggcatgcaccaccacccctggctaattttgtatttttagtagagacagggtttctgcatgttgaggctggtcttgaactcctgacctcaggtgatccacccgccttggcctcccaaagtgctgggattacaggcgtgagccactgcgcccggcctcacaattttttttttttaaagagacagtgtcttgctttgttgttcaggctggagtgcagtggcataatcatagctcaccgcagccttgaactcctgggctcaaggcatcctcccactttggcctcccaaagtgctgaaattacaggcatgagccaccacacccagcccctgtaaatgttttttaagtgtattcctatttcattttatttggaattattgtaagtggtgttacatttttattttgatttcttcaccttcattgtttgtatgtagatgtgtcattggcttttatgtgtttattttgtatcctgcaaccttgctgaactgacttaataattttacatttttttggtaggttctttaggatgttctacatagacaattatgtcatctgcaaatatatagtttttccaagtggttgtgtttaaatattaaaaaaaagaaatatgtagttttatttcttcctttctaatctatatgccttttatttcttttacttattttatttgccttattgtggtgactagaacttccattattatgttgaataacaatagtgagagtatatctttgcatcgtacacagttttatggggaaagcattcagtttttcaccattaagtataatggtggcagctggatgtggtggctcatgcctgtaatctcagcattttgggaggccgaggtgggtggatcacgaggtcaggagattgggaccatcctggctaacacggtgaaaccctgtctctactaaaaatataaaaaattagccgggtgtggtggcgggtgcctgtagtcccagctactcgggaggctgaggcaggagaatggcgtgaacctaggaggcggagcttgcagtgagccgagattgcaccactgtactccagcctgggtgacagagcgagactccgtctcaaaaacaaaaaaagtataatggtggctatagtttttttgtatgtgctctttatgaagttgcaataattccctgttattcctacttgatgagacttttttaaattaaaaaagtttttgtaattttaattttttgtagagatgaagtctcactatgttgcctaggctggtcttgaacttttggcctcaagcaatcctcctgcctcggcctcccaaagtgctgggacttacaggcatgaggcaccatgcctggcttttttgaaaattctagagagggtctcactattttgcccaggatggagtgtagtcttagtcacagacgtgatcatagcacactacagctttgaactcccaacatcaagtgatcatgctgtctcagcctcctaagtagctgggactacaggcctacaccattgcacctggattgctgaaacttttttttttctttaaatcatgaatgggtgttagcttttgtcaaatactttttctgtgtcagttgataagattattatattgttttccttatatcgttgatgcggtggtttacaataatggattttcaaaagttaaaccatttgctttcatttttgaatgatagttttgctggatgttaaactcttgattgacagttgagcttcttaaatgtttagattaatgttttcatcaaatgtgggaacttttcagacatgatttcttcaaacattttttatgttcctaatttatgtcttttccttgtattcccatatgttgatatacttaayggtgtcccacatttctttgaggccctgttcatttttctttattcttttttctctctgttcttcagattgcccagtcttactgatctatatttgagttctctrtttctttctcctaccagctcaaatgtaggatttttttcatttccattaatgtacttttcttttctgtttttagagacagggtcttgctctgtcacctgggctagagtgaagtgacatgttcacatcttactacagcctcgacttcccaggctcaagcaattctccttcatcagccccctctccccacctgccagtagctgggactacaggtgtgccccaccacacccagcacatttttaaatttttttgtagagacagggtctcactatgttgcccaggctgttcttgaactcctggcctcaagtgatcctcctgcgttggcctctcaaagtgctgagattacagacatgagccactgcacttggttcattattgtactttttttttcttcttctttgagacggagtctcactgtgtcgtccaggctggagtgcagtggcgcaatctcggctcgctgcaaactccgccttctgggttcacaccattctcttgcctcagcctccccagtagctgggattacaggcatctgccaccacacccagctaattttttgtattttttattagagatggggtttcactctgttagccaggatggtctcgatctcctgacctcgtgatccacctgccttggcctcccaaagtgctgggattacagrcgtgagccaccacgcccagcctcattattgtacttttcaacaacagaatttctagtttatttttataatttctctttattgataatctgtatctgataagacattgtcatcatagtttcctttaattttttagatgtgattttctttggttctttgaacatatttgtaattgttgctttgaagtctttgctgagttcaacatctagactcagaaacagtttctattgcttacttggttttctgtgtatgaatgggttacactttcctgttgctttgcatgtctcataattttttgttgaaaactggacattttaaggaatatattgtacaacttgttattgattctgtcctctttcagggtttgatattgttgctgttgtttgcttggtcatttgtttagtgatgtgactaaactgactctagctaaactgactctatggagtctgttttccctgaagtgtgtaacttctgatatcagatttttttcttgttttaattttttatcctaggggtcacccctgggtgagagatcaaaggtcaacaattgatgaaatcttgtgcttaagcctctttgaccagtcaganttttgcccttgaacttttggcctcaagcaatcctcctgccttggcctcccaaagtgctgggattacaggtgtgaggcaccatgcctggcctttttgtaaattctagagagggtctcactattttgcccaggttggagtgatccacccacctcggcctcccaaactgctgggattacaggcatgagccaccgtgcccggccgccaccattacacttaatggtgaaaaactgaatgctttccccataaaactgtgtacgaagcaaagatatactctcactattgttattcaacatagtaatggaagttctagtcactgcaataaggcaaataaaataagaaaaagaaataaaaggcatatagattagaaaagaagaaataaaactacatctttctttctttttttaatatttaatgtattggatatgcacatgttttggaggctgctatcacagttcaaggagtttacatttttgccccacattcagccagaaactagcaggttggattttgattgcttctgagaggttggagccttgggtatgtatagagtcttccaggcagctaaggatgtgtgtaattttgcttttaagcctgtttgcccctgggtctgagtagctttattgctccatcagtgtttggccagaggttgtgctgaggtctttcgtactggtgaggcttcctcattttattgatggagccgtttgttgcttggggaatgttttcaaatctgccttacatcctgctctgattgctcatgagtgaatgtggcctagtgcatgtccacagccttcctaatccctggggttgacagtgaccccaagaggtatcttcttggatatatttttccctggaatagagcttcagcaacatgaaccttttcgagggtggatgttgagaaacctggaggtctgcctctcttggggtgaaattgtagtcttaaactggaaactgggaagaaaggggaccccatcttcttggccatacctgctgggggtagagcatctggaatagcattttcataagacagagctagggatgggggagggaatgagttgttgtccaaacaccacagactctcactgttcttaccaagatttagtagactttctcgattgaatatttttccatttgctgtatgcccttaggacaatttccagagactttaaatgattgttcattataatttcctctacttaagttgttttattggagaaagtgtacaccagccccttctctccaccattctagaagtcgtttcctaagttattttaaaatatactgtaactcctcagtataaagccaaatgttcttccttatcaattcttatttactccatgcacagccctaggaattttcctgggtgggtaacatggactctgtcgttaaggatttgtccagtggagtaaaaagaagcaaaacatcctgaatttgcttccctgtataagcagtgagggagtcctgctgtgtgcttaggccctggcctgcttctggggcctacacagggataggccctttgtattcaaggagccagaagaaacctcagtgggaggcaagcaagcagctcatcatcaagtaatttgctgtgtaatgtatgaattggggatgaaatggtgggtcgatgattcccacgacaatgctgtgtcagttcaggaggaggagagagaggagttcagaggcagatcctgaattggcagcctgagcccaggccttgaagaaccaggccttgagcctgggcctggggctgggatgttggcagaggaatgggggagtgtttagggaatgggggtccaggtgaggaagtcagcgaaaggataattatctgtggagcgtgcaggggctgtgaggaggccagcctggctggaaaggaaggctggactaagggatttccgtacatgaggttgagtagggtggtgagaccagaagccaagggcttggaatgtcaggctaaagcatttagacttgagtctaaaggtggcagaggaccaggtgcagtggcttatgcctgtaatcctaacactttgggagactgaggtggaaggatcttctgctcaagccaaactccatggctggagcacaggattttgggaccagcataggcaacacagtaagaccctgtctccacaaaggtaaaaataaaaataaaaaaaattagtcggttgtggtgaagcgtgcctgtaatctcagctgctctgtaggctgagacaggaggattgcttgagccagggaggtcgaggctctagtgagctgcagtcatgtcactgcactccagtctgggtggcagagcaagaccccatctctaaaaaataaataagtaaataaaggtggcagaggaacccttgaagattgctgaggtttgttaaggaaattcttctggctcctgtgtatggcatgcatggaggaggggagcctgtagccctgggaatgagtggaggctgtagtcataacccagaggcctcatcttggagccagtgacagaggtgactgagacagaagaatggccccccaggaatgaggaaggagtaggtgaggagccatccccaaggcttagtcaaggcagggcaagaagccccagttttttatccttagctcctgcgatatggtcagtggccagtggtagatatcagctctctcagagaaacccctctaggggaacagacaggagaactggttctccaagaggaaggcaagtagggagtgccctgggctccagagaaaggcagctagtggcttagaaatatggccagaaaaactggagggacagagtaagtggtctgcagtgcaggtggcaatcgttagagccacctggatgtcacatgtgagaccttcccctataaggttgtgcaggagttaaggaggttcttgtacttctgggcgtgacagcatcccatgtgctcagctctcccttcctttccaaggtttcatggggtgtaccagtgcctggaagactggagagacctgaataagagcatggcttctttgaggttcgtcttctgagtatagcacctccctccagtgccagcttgtggctctgtgtcttggccaaaaagttgagggtgaagccaagtctggcaaatagagcccaaggcttgggtgggaggaccaggagctgatttctctggaggccgtcattcttactgaagctgctccatggtgtcgctttcagagtgaaggctgattttgagtgtaacctggtttatatccagtctcagaatgacaccagaacagttttccagtttttgtatgtatcactagcatggtttgcttctgaagtatttattcttttatttttcaaaaggaggtagttattagatttctgaaaactgtaggatttgtttaaatgagtcacagcatttggctgaaatagagaggactccatctgttgcttttgcgtggtccccagttctgttctatgactgagctataagagaagcaggagaacttggtgttccctgagctcaccatcactggccctgcctgtctgacacaagccttgccctagtagagatgtgggaaagtgggccctgtttcctgagagcctctctacttgggacccctttaattagcctactgtgtttgggtgagttggggtaggggctggagccaagggctcctcatccactgaactccaccagctctttccttggagtgcccttgagtttgccccttggatcagaaagaggaacatccattgcagggtgatttcctcaggtcctcttgacctgctgtgctctgatgctctcctctgtgtccctggggcagcaggacaactcattctgactgaattcgccccagggcaactggcagtgcctcaggtcaggaagggtcatggagcatgaaacaatacaagggaaagggcaccagctkggggaaggagagacctaggtaccaatccttgctctgccttgctctgccttatatgtgtcacttcctctctttaaatttttttttttttttttttagccagagtctcactctgtctcccaggctggagtgcaatgacactgtcttggctcactgcaacctccgcctcctgggttcaagtgattctcttgcctcagcctcatgaaaagctgggattacaggcacacaccaccacgcccagctaatttttgtatttttagtagagatggggtttcaccatgttggccaggctggtcttgaacttctgacctcaagtgatccatccgcttggcctcccaaagtgctgggattacaggcgtgagccactgcagctggccctctctttaaatctcaatttcctcgtctagacctccagtgcagtgctgttatgaggatgattaactgatgggtgtaaaatgtctgtcgcatgctaagaaacgaccagtttctgatcttctcccatagtctggcctcctctcttctgcacactctgccccttcttcagatcacgctcatgggcagagtgaagggagaggtgtgctgtgagtcagggcatggcacggaagatgctgacatcccacgcagctccctgcagtgttgctcctggcacttcatgcttggccagcagattcagcctgacccacttggccatacctgcctctcactgggcagctggggcctggtcttccacatctgtggccagggctgggcccctcaagtcatgcccctccactgctggcccctcaaggacaaccagcctggaaacttgagggccgcaggtcccaccctgatgccttcctgctttgcgctaggcctggggaaagcctctgagctgtcacaggaagtgtgcttgcctctgtgactcacccacctcttgttggtggttgctacctggctactgtggaacctaggtaaactgttcctcctatggggccagttgaagtggtggtgagcagatgtcaccagccttgcccaattccttctttggttcctgacttcttagggtgtatcttaggagttgcctgctgaggttgccaccctaggcagtgtaggcctgttagattataccatgattattgaatgagcaaatgactggagctttgtctaagagggccctcatgtatgaggagtgctgagtagaccctatgggtcaggaagaggatgaaggtctgcaggtttgtgggtgtgttaggtgaagcctacctcatgrtaggaacaaggtgaggatctctgcagtccattagaagggttctctgatcttacacggggattctctctttctctgtgaattcacatcatataaaattaaccaatttaaagtgaacaatccagtggtatttaatgcattcacaatattatgcaaccatcacctctatctagttccaaaccatttttgccaccccaaaagaaaaccccacactcattaagcagttgctccccattttcccctccccttctaaccactagtctgctttctgtctctatggatttatctattttggatagttcatataaatggaatcataaaataggtatccttttgtgcctggcttctcttacttggcctaatgtttttaaggttcatccacattgtagtatgcatgtatcagtacttcattgcttttgttttatcttgttttgttttatttattgtggtaaaatatatgtcacataaaatgtaccttttttttttcttctaaagagatggggtctcactatgttacccaggttggccttcaactcctgggctcaagtgatcctcctgcctcagcctcctgagtagctgggactacaggtacatgccactgtgcccagctcaaaatgtgtcattttaaccatttttaggtgtacagttcagtggtattagatacattcacattgttgtttagccatcaccaccatccatctccagaactttttcatcatcccaaacagaaactctgtacccattgaacagtagtaactccccattttcccccagctcatgataactactgttttagtttctatctctatgaatttgacaattctaggtacctcgtgtaagtggaattctacagtatttgtccttttgtgactggcaaatttcacttatcgtttcttgaaggttcatccatattgtagcatgtatcagaatttccttccttttaagggtcgaataatactccattgcatatatataacacattttttttacccattcatctatcagtggacatggttgctttcaccttttggctagtgtgaatgatgcatagattcttgagtactgcaacagcctggtggacagctggagcagggacatacatttgagcactggacaagatgctgaggtttcagaatgggtccaggaacacagtctgctcccatttcccaggcctcccacacctacatcccccacccctccccatatttcccctgactacaccccttcagccacactggcgtgcttgctgctccctacctgcaatccacaaccccgcctcaaagcctaagaccctgtcatttcttcctctgggatgtccttcccagggccttggcatggcctctcccaatatattaatatttgcaggctgggcgcggtagctcaygcctgtaatcccagcactttgggaggctgaggtgggcagatcacctgaggtcaggagtttgagaccagcttggccaacatggtgaaaccccatctctactaaaaatacaaaaattagccagacatggtggtgggtgcctgtaatcatagctacttgggaggctgaggcaggagaattgcttgaacctgggaggtggaggttgcagtggagaccatgccattgcactccagcctgggcaacaagagcgaaactctgtctcaaaaaaatatatatatacatatatatacatatatattttatatattatatattatattatatatatatatttataaatatatataatatataaatatatatttataaatatatatttaatatataaatatatattttatatatttatataatttatattttatatttatatataatatatattatatatattatataatatatattatatataatatatattatatattatatataatatatattatatattatataatatatataatatataatatatattatatatattttatataatatatattatatattatatatattatatatatttatatataatatatattatatataatatatatttatatataatatatattatatattatatatatttatatataatatatattatatattatatatatttatatataatatatattatatattatatataaatataatatatattacatatgtttaatatatattatatataatatatattaaatatatgtaatatatattatatataatatatataaaatatataacatataaatgtatataatatataaatataatatataaatatatataaaaatatatataatatataatatataaatatatttatatatataaatatattttgtataaatagatataaatatatatatttatatataatatatttatatctatttatatatagatataaatatatttatatctatatatatagatataaatatatttatatctatataaatagatataaatagatataaaaatctatttatatataaatatatataaatatataataaaatatatgtatttatataaataaaaaatatatatttatatatacatagaaatatatatttatataccataatatattatattatatataattataaatatattatataaaaatatataattttttatatataacatatataatatatacgtatatattatatataaatatatattatatatgtatatattatatataccatatattatatatgtatatattatatataaaatatatataatatatattaaaaatatatattatatatattaaaatatatatataatatatattaaaaatatatataatatatattaaaaatatatatatatttttggcatgactctgctctggtgtctccttttcagaagtgccccctgacccaccagggtagtttctctcctttctcattcatattgttcttctaagcacctatcatactctgaatgaattggacttacctatttgtcttcttgatctttgcttatatcctgcaccataaggcaagtcctatgaattgagtggccttgtgtgccttgctcactacgaggtagccagcatctgcagtgcagccyagtgccagggaccgtgaagctcccagtgaggacctgacatgcagtaaagccacacacttgtggtgctctggccaccattggagccctgaccccttccacctcccccttttgtatttggatctgtattcacatcctccatcccaggtaccccactctgttctctggaactatcaagctaccytgagtccccagcaccttccccagacattccttctgctgggtaaaaacctgaccatgccaaaatattatttgcaggctgggcacggtggctcacacctgtaatcccagcactttgggaggccgaggcgggcggatcacctgaggtcaggagttggagaccagcctggccaacatggtgaaaccccatctctactaaaaatacaaaaattagccggacatggtggtgggcgcctcagtttgcaatattctccttactccctcagcagggctgtgcagacccccatgcacttgcctgatcatctgggccagcggacctttgcatgagcttggctctcagaccctggtctctcctcttttgtcagacacaggccatacagttctaccattatctctcccttagcactgctgcctggacttctcattacttcctactactctgaagattttggcatcagaatccaggcttcctgcccactccacttgttgtcaagccagggaaggaagaaagggaggaaggcaaggctaatgtttttctcagtgcctactgggcatttggcactgtatttcctcatgctggggtggccctggtccctctgttggctcagtctggcccaggcattctgggtgtggtgattcagggctgggctagtccctcagagcacttgcccttctctttgggagcaggactgcttggcagtatattactcattagtcagtggctagcaacgtgccatgtagggtgtgatcacatatgctgtcacatgctcacacacacatgcacacagtgcatgtgcacactcacgtgtgagcacacactacacacacatgcacgtgtgcacacagtagttcatcacacttttttctcaggtcttaatcaccactctcaggcagatatttcctttatgacagcatctgtcttgatggaatttaggccacagtagctgaatttaatgctctcaatgtgtgaacacacgtcaggtaggaacatgggcatccctgaatctgtgctccctagatgctgagccctggaaaggggaagagagtagaggagggagctcctggtggtcagtataccagagggagggcctcttctcgtcaagggtgggtccagccacctgaaagggattgatggctccttggatgggaggttttggccttaggccaggccttcgtggctgttaccccacatcaggctgaacagtgagggggactgagaatcaatctctgaggtgggagggaagaatgggaggagggtatggagggatagaggtcctctcctgcgggaagcctctcactgggtggtctctgccagcgggaggcaatctccccaagtggccaatagtggaattgtccacagggagaatctagaaatgaacccccagcaccttcctgactctcacgggctgagagagaaggaaaggcaggagccaaagtgccacagataggtattagatttctccttctgagttagacccttcagaagtgaaaaacaaggaaaccacagaggaaagactgcatagttggcaagaaaggaaaacagaccaccatctatgtacatttttttgcaactaggctgacaggcatgtggaaccatggacacggtaatgtcaaaggctggaaagtggtggatggctttcctttttaaatgtcctttgatgttgcagtgggtattatttagaagaggagatgtttttcctgctggaatcttgagtctcagttactgtcttgagatggcatttttaaatcagtctcaacgtctttcataagccttataaaaaattgcattcaggcttggcgtggtggctcacgcctataatcccagcactttgggaggctgaggtgggtggatcacgaggtcaggagttcaagaccctcctggccaacatggtgaaaccctgtctctactaaaaatacaaaaactagctgggcatggtggcaggcgcctgtaatcccagctacttgagaggctgaggcaggagaattgcttgaacccaggaggcggaggttgcagtgagccgagatcgtgccactgcactctagcctgggtgatagagcaagactccgtctcgggaaaaaaaaaaaaaaagaattgcattcagtaggtcaatacgtccttagcatcagccctgtctgggcatttagcttcatgctgcatgcaggtgaggagagagagggaggccaaagggggcccacaagcacacaaggagccctcctgcatgaggccatgaaaagtctgcaggaaggcatagcagatttctgggaactgaggaatctggtgagggcccatagacggcaggatgcttaaaccaggttttgaaggttaaattgacttttttttttttttttttttttgagacagggtctcactctgtcacatagactggattgcagagcacagtggtgcaatcatagcttactgcaacctcaacctcctaggctcaagggatccatttgcctcaggctctcaagaagctgggaccacaggcacatgccaccatgcttggctaatttttttttttttttgtagagatgggatcttcctatgttgcccaggctggtttcaaactcctaggcacaagcgatcctcccacctcagcctcccaaagtgctgggactataggtgtgagccaccacacgcttggcctgaattggcttttaaggaaactgccttgtagaaagagaatagagcatgagctgttagaagttggggtcagatgaggagcctcaggtatccctgccaacggcactgcaggaagaggaaaaactgcctggataggaggagccacayggtagagtgctttgaaggctgtgggcaagggtgtccagggtcgggtggtaaccctgcatatgctgctgtgcctgacatgcatatggtgggattaggtgggaagagtgagcacttagcacaatataactggtatgagcgttcacacatgtgactatgattgtggcagctaccacaggaaagccaggcctttttcaaacaggctgtctgagtgagactcctaagcagggcctactctcatgtctctgtaccagacttcagagtcttttctcccccagacttgtctatcgtcagcctgggatgcccttgcaggccccgggattattgcagtgggtcctctgtgttctatgcccagtgtgccagccaccgctaccacacagagcctctgcttctctgatcaatcacccgagcccgtgggtcattcawtccacaaacattcactgagccctgctctgggccaggccctgtgccaaactctgaggactctgtggtcactgtgtgtagaggaaagccagatggcccacttttctctggaaccacccctcttccccatggcttcctccagggttttctgagactctgccagtccacattgatttctccttctgggagcccccagaccactgacccctcccaccaaacacacacatgcacgttcaagttcccatgcttttgtatgtgatagatggagttttgtgtgtgagaacacttgctttgtattcttttgattgtaataaatttgaaattgcaaggcaaaggtagagttcagagggtttcattcttattttactacctgttatttctaggcgggtggatcacctgagatcaggagttcaagatctkcctggccaacatggcaaaaccccatctctactaaaaatacaaaaaattagctgggtgtggtcgctcaggcctgtaatcccagctactcaggaggctgagtcaggagaattgcttgaacctgggaggtggaggttgcagtgagccgagatcacaccactgcactccagcctgggcaacaagagcgaaatttcatctcaaaaaaaaaaaaaaaaaaaaaacaagtaggcctgatttctggacagagaagtttttaacatgggatgaatagatattagcttggtgtttctttctcccacaaaatagacaataggcattgttttttaattccactgacttcccattagaaaggtattaaggggtcccaggcagggtttccctggaagtctcaaacaggaggctctgggatgcctcatacactgggatgtttctggggccagtccagtcccctgagcacagcagatgttcagcaaattcatgcatgcatttagtgtctgcatagtgatgcagacattgggtgatcttgccaactgcattgttggcctgtatctctcttcctgtgcctagagcagggctgagtgtgaagtagacccttagccatctttgtgggctaaagatgtgtccaggcagcccctaagggcaggctgagtgctgagtctctcatcagtattgggtctgatgactggtcaggaacttgaggtttctgggtcaaagtcctggcttctgccctgtttggggcaggactatgggaagtggcttgcttcctccctagtcacaaaggcttgcagttttctcttagtttgtcttgacttccagattgtagcaaaattttgaagagagctgacaagcacagcattgtccccttggtaaaaggctgtagtagtaggatttgcagtagctggaacctgggaaaagctggctcagctttatgtaatgacttcagtctcccgatttgagcttcctagctttaggagctgacctaggtcagaacactgtgatgctgcacaacccaaagttgtatcatgcggggtcctaatgcaggtgtctataagcctggggctggctggggagcaggagcctccgtgacttgggctgcatcagaactcctgggctatacttgagagccatggtactcccagaagacgaggttgggaaatgtgaagagggctggcactggggccaaagctccttagaagtctgtggaaaggtggttgagaatttacctgtccagttagacgttccctcagaaagcygagcctagtaggggaacacatggagatacctggttggcctagaacactcttaaaaagtgccccagtcactgtagactggaaaggccaggaaggtcttagtgcaggaatgcactgtgacttctcagagaaatgtcaatgtcttgggttcttttggtttcccaggccagggtcatctggagagtctaggagatcatagggggagctcctcaaggagctgctgacctaggtcttggctctgggtagtgactctggcctggccatctgcctgccttctcttccctccctctatttctcttggctcccagcatgggctcccacctgtcctagctcccctaggaatttcctgctgatgagctattacccaagtctgatgactaagtaggaaaaaagacattttttccttccaaaaactgcaagaggaataagaaacagaaaagaaaactttaccttcaacaaaaataacaaacacctgtaacctgaaatacaacaaacaaagaatgattttttttttttttgagacagagtctcgttctgttgcccaggctggagtgcagtggtgcaatctcggctcactgcaagctccgcctcccgggttcacgccgtcctccttccccagcctcccaagtagctgggattacaggcgcatgccgccatgcctggctaattttttgtatttttagcagagatggggtttcactgtgttagccaggatggtctcgatctcctgaccttgtgatctgcctgcctcggcctcccaaagtgctgggattaaaggcgtgagccaccacgcctggccaaataatgatttttcaagtccaggatcaaaatcagtccaggatggaggattttaggaggggacacttgtcagagtccagagggccaaaacaaattatgatctattggactggttagcaaagccaacatatgcggataagcttagggagtatctttgagccctgtgtgatgccaaggagttactagggaggtggaattacccaaggaattgagcagggtgtggcaggtgaggggaaaactatgggttgccagcaattcagacaatagaaaaacaaaggaaattcaaaatgggtataattggtatctctggagaagagaacaaaacaaaaggaacacaaaaatattcaaagatataatggaagaaaactttccccctgaaataaaagaacacataaatcttttgtttgaaaggccaggggccaggcatggtggctcacacctgtaatcccagcactttgggaggccaaggcaggcagatcacctgaggtcaggagtttcagaccagcctgaccaacatggagaaaccccgtctctactaaaaatacaaaaactacctgggcatggtggcacatgcctataatcccagctacttgggaggctgaggcaggagaattgcttgaacctgggaggcggaggtagcagtgagtagagatagtgccattgcactccagactgggcaacaagagtgaaactccatctaaagaaaacaacaacaacaacaacaaaaaaggccagactgaattttgaaaaacacacatattcaacccaaaaacgtatcttggtggtgtcactcaattccaaagagaaaaaaatagctctattgcatccagaggggaaaagtttatatatatatatatacacacacagagcgagagagagagagagagagagagagagagagagagagagagagagaagggctggcccagagctctccacagtaataatcaacgacagaaaacagaggggctagctatatctctgaagtcctgagggagagaaagtgtaaacccagaatttatatccagccaacctgttgttcaagtttttattattattattattattatttttttttgagacagagtttttgctctgttgcccaggcaggagtggagtggtgcagtctcagctcactgcaacctccacctcctgagttcaagcgattcttctgcctcaacctcccaagtagctgggactacaggtgtgtgccaccaggcctggctaattttctttttttttttttgtagttttggtagagatggggtttctccatgttggccaggctggtctcaaactcctgacttcaagtgatccacctgccttggcctcccaaagtgctgrgattacaggcatgaaccgccatgcccagctgtagttcaagtgtaaaggtcatgaagatgcgttcagacattcaagaactcaggaaacgtggtttctatgagttctttttaaatgaatgaatgaataaaaacttctagagataaattccctaagacatacatggagatgctgtgattaaaggagtagtaacctcaccactacttacttgccctcagatgagccgtcattcacacagtgcttgtcaccggcaccatggtgcaagagacattcagtcttttttttttttttttttttttttgtgagacggagtctcgctctgtcgcccaggccagagtgcagtggcttgatctcggctcactgcaagctctgcctcccaggttcatgccattctcctgtctcagcctcccaagtagctgggactacagatgcccgccaccacgcccagctaattttttgtatttttagtagagacagggtttcaccgtgttagccaggatggtcttgatctcctgacctcgtgatccacccgccttggcctaccaaagtgctgggattacaggcgtgagccaccgcgcccggccgacattcagtctttaaagttatactgaactcatggcatttgacacgtcagctgactggtggccacatatagctcttgctattctggaaaagccatgggatagaggtaaaaatgggactgaggggaagatcaaaggtaaacgccacatgaaccactactgtatacctactggtctctttctagaatttggcctgaggtgggcctggtgcaattcttagtgagacactacaagaatatrgatgtcacttgaggcaggtctaagggtttggttttgttctacatcatggatgacaagtccatggcctttgtgcttaattgatggtgacaatctttcccatgaatccttcccaagcccacytcccaggyggtcactaccaatttattggggttaaaggaaagttacccttatgttacccttatttcctatccttgctctggattctggagactagctggtcccagaggaaaccaaaagcaaatcaattttccctgaaagatgttctcaatctagtagacccactcaggccccagggctggggaatgaggtccccaaggtttacttttgtggcatttgtggcctggattccccttgctttcagactcctggtggtctccccgtctgatgctggcagcttcttctagcctatgtttaatggcagcaagtcttgttcctaccagtccctcttgtcacattctccccttgctgacccacctgcagtctcatgctggactctttctctcagcaacatcagagcagtcagagctcactgccttaaacatgttctcttctggcccaaacaggctggcctggaacaaattgagccttgttatttggccacaggaagagtcccacctgccagacatttctgagtggaaaggatgagtggaggtggcaggtacctggtaacactgatggttccttcatgtgggtttgtctgctcaggggtgttgagtgcatgtctgcccaagtgcatcagtatacacctggcgtcactggtgtatactgatgcatggccaccatggtgctttgtccccagctctaccaaggacctagctctctgggttactctggggtcttttgagtcttggaaacttaccatcagagtgggactacaacataaaggggctgggaagttaggaagagaagatgtcggcctcaagggagctctgcctatggcatgacctctcaccctgcccaggaaccctgggtgtggtaccttccctctccagccagcagacagcaccttagaggctttgagcccatgatgccatcttcttgggcaatcacaggctctttctgtggctgtggctgcgttttatggagatccttacctttgtgctattgccgtcagcactgcaaattctttttggcccctaggacaatcaggaagctgatgaggccagcccttgatggctgggggcctccctgtcactgacctaagtacactttccatggagcctggtggagggtaggactgaatctggtctgggaaaccaacagagactattttaaggactggcgattaagagtgtaagaattttcttagcagtggcctcaactaggacacatatgccaaggggttgaggratacgggagggacaaggcagaacatatggaaatttctgtttatatttattgkctatctcatcttttaaaacttttccacttggggaggtgggttttataaaaaatatgcatttatataattggtagatgaatattcatatgttggagatgctgaaacatgttgtattgatagaggcacatgattaaaaaggcaggaggccactggcttgaaggctgggcaggccaggatatgttttcttgtgcaaaaactggaatttttttctaagcctaaactttctagattctcatatccattcctgagagagaagctctaggacactggacctggccccagcacccactgctctacagcctctgctttgctgcctgggtgcacaggaaccactggcgtggcccagtagtccttcctgccctgggactcaaaggagagggtcctcccacagcatctgcccatccctaattgcccattacagaaaggtcagccatgaattcatcaaaacctcttttgaagctgtggggctcttctggccactctgacttagagaaacagtttctttaagttcactcccctcctggtgagcaaagacagccatttattaatggaaaacatttctttcaaatcctcaactgaaggcggtggggggcatgctctggaatgctgccttgtggggcccagcttggttttccctctggcgcctgcactggctccatgcctggctgcttttccgtctggtctgaatcagcctggtcaggccctccttcccactgtgcaccagggcagccacatctctcctggtggttctgccattatggacgtcactggtgtctgaagcattttttagtcactgacgctggcctcgtgcctttctgggggcttctgacagaggggagcccagcctctcaccagtgcaatcaggattatgtctcccagcagtggtcctgggatgggacaggaggccacagggtactaaggattggtgggggagaggctaactgaattttctctgttcccgttcccagcagccctcctgtggccagggggctccttcctgccttggcaaacagctctgagttaagattgtttctgatcagctaatagccttaaatgctgaaaggaagaaaagctggtagaaatctggctgtttgtacattgtttacctttcttggccatcttaaaaatatatttgtcccaatatctaatgcatgtggggcttaaaacctagatgacgggttaataggtgtagcaaaccaccatggcacatgtatacctatgtaacaaacctgcacgttctgcacatgtgtcccagaacttaaagtaaaataaaaaataaaataaatatatataatatatatatatatatatatatataattttataatttgtccctagataaggcatttctagtcttccctgtttgacttctagccactccttcatctctctgcccttcctgtctcttgtgtctcctttatggcggcacccctctcccctccttgcttacacacccttaccctggccctccccagcaataggactcccatggctgctgggaggagcagtggcctcaaggggcctctctgctgatgaggccacatccacaagaccaagtcttccttggggtgggctgggtcctgcctgtggacacctccctctctttttcctcattcccttctttctcctgcccagcggccatattttggcggagacctttgtttgtgtctcttaagaagagcctcctggagggcttacctcttccctcctgaggaggccttggacgggtgtagtcactgtggctctcatggaatgtgtgttcaggtgtgtggtacagacagttatgacccctggagctcctgccacggtgggcccttgtgttcagctggagaaggaactggcccctcccaagctggactggtttgggacagggcttgggcatttatggtgtgtggcactcataggtgtagcctttcttcctgtgacttctcggctttcacatacgtagactcatcatggcatggggcattgttgagtgctcctcctcatgggaacttctataaccctgtggggtcattctcttttttctcctttccctgacttctctggttctgacatctcctctactcctatgaactttggtcctccccacaaagctttctgggtgatttctagcctgagaattgtctgtgaacaagacctgtaactctcccagataaaaatatctacacttatctgaattgaactgaagctgtgacccatctcttaatgtctcttaccccctacccccacctcaacacaaccaaaccaaacccaaacttgtgattttgtgatttcgcttcccatttcttacccactaattgacttctctccctggattccccatctcaattaaaaggaacactcctccctggagccaaagccagaatacctgctgctgtaccttcccttcctcttgccacacagactatctcctgggccagtgccttattctcactggtttcctacctcatcatcttcttctccttgaagagaccctaaacattcccctatgtgaaaaccttacaggctgtgctcattttagcttttagcttcccaattagctcaggtagttcaacacacactatcacacgattgctgggagctgttctaggtgctgggagcaccaatgacttacgtcttccaagcttatcctgcgtagctactcagactgagcatgctctgctgtgcctctgggtcttcgtgcatgctgttgcctctgcctagcatgccctgtcaccttggcatgaacagctcatcttttaagacccagtttaaatgtcttctcatcctcaaagacttctgcctctgtccatcactggaccatgcagcagtgtgtcttgcagggatttgtttgcacatctgtctctactctagaccagaggctcttggaggactggactcctatatgaatcattttttaaaaaaatattttaattaaatattaaatgactttataaagaatataagaatacctatacaacatgtataagatgtgaagaataaaatatgaacacctgtggacccaccttccattgaagagatatcattcctttataccatcaatacctattatagggcctggaactaatccaggggtcagtaaatgtgaattcctgaatgaatgaatgaataaatatctattgttggagtcattttctctctgagtctcccagcgttgctagttaagtcccaggtgaatggtgtcatggccctagcccagccccactctgtgagctcattctactgttcacacattgttctggttgttgtgcatgtgcttactgagtgtccattcaatgccaagcgtggcgctgggtcctaaggatatagtggggagcaaaatggtgaaacctcttcccagggagcttccacktaagcagctcttcagaaaaaataatccaaagaacccaaactgcaatgctttctaccccctctacagctaccctagaaaggcagtgtgggatgtggttaaggacatggactggtggcctagatattggaatcccagctccaccatttgcaagtcatgatggctttgtatgttacttaacttttatgtgtggcagttttctcatctgtaaaatgggcaaaatagatcctatccagtgaatttgctgtgaggcttaaagcagttactatgtgacaggtggctcatggtgagggctcggtcagcattaccacaattattgtcagcagagccttctatggtacggctgggggtgtagccaactgctatagggaggaactttaggtattgttcctgaagttctctcctgcatgaagtcagacccagagaagggccgagtgtcatgccaggcacttgccgtgtttcctcagctttaaaactttggggccacattttactgctctgagtcatttagtgcttacagtcaccccattcaggaaataaatattgagcatccagtttgtgccaggcactgtggtaggccctgggacacagctgtgaggaaagcacacggagactgtgcccacacagaactggcagtttaatgcagggatcccaraggatatacaaaagcaataaatttgttatatgatgggtcagaaggtgctcagtgccacagagaacaaagaggcaggggagacaagcacagttttaaatagattcagggtaagtgtccctgaaaggatgccaccagagcaaaaacttgagagggagcaagtgtctgcagaaagaacagcaaatccgaggcgggcggatcacaaggtcaggagttcaagaccaacctggccaatatggtgaaacctcgtgtctactaaaaatacaaaaatcagctgggcatggtggcacatgcctgtagtcccagctacttgggaggctgagacagaagaattgcttgaacccgggaggcggaggttgccgtgagctgagatcgcagcactgtactccagcctgggcgacagagtgagactcygtctcaaaaacaaaacaaaactaaagaaaaaaaaaagaaaaaaaaaacaaagaacagcaaatccaatggccaaatgcacatgtcaggagtgggcctggcataagggaagtggaatcagggagaggataatcagagatgaggccagagggaaaggggcaaaatctcatggggccttatgggccattgtaagacttttggcttttcctttgggagggaaaggaagccagtgcagggcttaagcaaagcagagaagtggcctgacttgtgtatttaaagccttattctggggctgggcttggtggctcatgcctgtaatcccagcattttgggaggctgaggtgggcggatcacttgaggtcaggagttcaaagcctggccaacatggcgaaactccgactctactaaaaatacaaaaaattagcgaagcatgctggtgtgcgcctgtagtcccagctacattgcagtgagccgagattgcatcactgcgctccagcctgggcaacagaaggagactcacacacacacacacaaaaagacttatcctggcaactgagaatggctcaaaccaggtggggtgaggaggagggagtaggtagtagtggccagcttcagaaaccaacaagatatactgctggattgacttaggatgagacaggaagggaggcagagacggcaccaagggggagactaggaggcccacatttagggggaagatcaggggctcagcttgggtgtatcaaggtggagatgcctacagggcatctctgtgaagatgtggagttggcagttagacaggtgaagagttcagagcagagttctgggccagagatagacatttggtgggtatcagtggaaagtggatttaaagccctgagactgggtaagtcttgagacttagggattgtgagtactcacagaagcacgtttgtgtaaagactgagccctgggtctctccagtgtaaggagtggtgttctggggttggcagatgaggaagaatctgcagaagagattagaaaggtgtggccaggcaggaggaggaaattcaggagaaggtggtattcccgaaggcaaatagtgaacttatttcaggaagaagggagtgatcacccaggatcaagtgctgctgatggtcaaatgagatgaggaactgagatgtgactgtcggatttgatgatgtggaggtccctactgactgtgacctgagtaatgtctgtggagtgatgggcaaaagccaggttggaggggtaggttgagagggagagaggagaggagtgggaggtagtgagtggaggcagttcttttattatttattttagagacagagtcttgctctgtcactcaggctggagcacagcagcgtcgtcctagcttaccgtaaccttgatctcctgggctcaagagatcctcctgcctcagtctcccaagttgggattatgacttggcaacctggcaagtcaccttgccaggcaagtggagataattattttaaggagttttgctgtaaagaagaggagagaaatggggcagtagctgaaggagtagtggagcaaagtactgctgcttctacttttttgttgtttaggatgggagaagcttgtttgtatgataattgaaatgatccaatagagagggggaaatggatgatgaaggataggggagaatttgtgaaggtgasaagtgggccttgggattgggaggcaggtgaacactgggggacaggagtagggaggctgaggttgtgcaggtttcttctggtgggtcccactttttttgtgagatggtcagcaggtcatcagtggcagttaagagacaaaaggaggtgtttggaagcttgaagatcaaggagaggatataaggaagcatctaggaagatgggagaatacaaagaccgtggacatatatcgcgatctccaggtgtcatgatggctaccatgaggtgtgtgggtgcacatcaatgccaggaacactgcccttgcatgcagactttgctgggtgcagaagacattgcttgtttattcactgtcaccacagctgagtttagaaccctaaatgtctccagaaagactatattgtgatacaacattgatttaaaaagtcactgtatatatagattgcctgctacttattgggcaacacaaatacaatagaaatggctacatttctcagaaggcttgcaccacctggagagggggccacagcccattcacatgttgtaaaaagctctcagtagcttctgatttgctttcaagggctgcctttaaactccagtcttaaataatttatgtaaaaaatgaaactattaatttggacaagtgggaaatatttctttaggatacctagaaattagtatactgaaagggcccagagaagcccaggttcccagtgtgggccactgatgctgtggccaccaccatgctaggcttcacagctggtggcaaagatggccctgaggggttggactcaaactctggttgtcttgctgaagaagcaattggcgggtctgtgactggatagttaggtctgtgccactgatggttgatgacaggaatgttaaacactatttaatagtgtttcttttttttaggagagtctttattagaccaaggatatgtttctctacccgccagttcctcagaagggaggaaggattgcagagtatcttggggtgggtgtccccaggcgggctcctcatcttccccctgaaatggcttgttctaagctgccctatcagttggctcttaaatctttttggcaagcagatggccttcagatgggggcagcaaacttagaatcttctcctggggcactgaggcagcagctaccagggcagtctcctgcacaggctgggcctccacactgctctcagcaagtcagccctgtttcctgagtgccagcattcaccccaatgagtacagactaaagcagggagagaatttcagggaagcagtataaagcattgtctttggctttttgtgctcatcctctttcaaactggaaaagaggaaaattgcagagatgaacttaagttgggtcaaaggagaaggaatatatgattgacatttagcctgacagtttgctttctacctcatggaactacccaacactgttggctcctttgcagccagattgggatggaggtgagggttagatgcattggacctcactcagtggttcctcaaggctggatcctggaactccagccccacccagcttcacactagtggaaaagtaacactttatcccatcttggtagatttggtctggcatcaggcttgccagagggctaccagaaggaaggctcctttgtgtagaggcaggcccctgatacaggagatggcattaactaggcattgcagtatcccccatccccagcaatctagggtcagcctctgaaggggttcaaggcaggatatagcagattggccagtatggtatctcaatatagtaacttgggctcatgttggaatcacctagggaggaaaaaatactaatgccagggtcctgcctccatagatttttatgtaattcgactgaggtgcagtctgggagtcggaattttaaaaatcaccctaggtatttctttcttttctttttttttgaaatggagtctcgctctgttgcccaggctggagtgcagtggcacgatcttggctcactgcaagctccacctcccgggttcacgccattcttctgcctcagcctcccaagtagctgggcctacaggcgcccaccaccacacctggctaattttttgtatttttagtagagacggggtttcacccatgttggccaggatggtttcgatctcccgacctcttgatgtgcccgcctcggcctcccaaagtgcggggattccaggcgtgagccaacgtgcccagccttttttttttttttttttttttttttttttagacagggtctcactctgttgcccaggctggagttcagtggcacgatctctgctcactgcaacctctgcctcctgggttcaagtgattctcccacctcagcctcccatgtagctgggtttacaggtgtgcgccaccaagctcagctaatttttgtatttttagtagagatggggtttcaccatgttgggcaggctggtcttgaacttctgacctcaagtgatctacctgccttggcctcccaaagtgctgggattacaggcttgagccaccatacctggcccatcccagttatttctaacatgtaggtttagaatcttggtattcaaagcatgggcctcagatgagagtattggcatcaccttagagcttcttacaatgcaggccctactcagatctactgaatcagagtctgtactttatcagaatgtgagaggacatgttttaatcctgcctcatgccctggtgccaagggttcaagttggagatgcttgtcaaggctcagcacaggacacagcaaatgagggccatgatgattcttctgggcaggaggaagagggtggtgatggggcttggcagggtcacctagcttggtagagacctccgcaagctgcttctctaagctgtatctctaacagtcattttcaatgtcatttcagcacttcccggagactggaccccaaggaacccctgggtaaccagagagcagcttccccaactccgaagcaggcttctgctaccactcctggccatgagagcccccgagagacaagggcacagggaccagcaggccaggaggctgatggtccccgcaggacgctgcaggtagacagcaggacacagagatcagggcggtccccctcagtgtcaccggacagaggcagcacccccacatcaccctactccgtccctcagatcgccccccttcccagcagcacgctgtgtcccatatgcaagacttcggacctcacgtcgacccccagccagccaaacttcaacacctgcacccagtgtcacaacaaggtctgcaaccagtgtgggttcaaccccaaccctcatctcacccaggtaaccacttctgcgccggctccccactcacctgctacctcattaccatacctcccctggttcccttcccctctttcaccaactctcttttcctggtcatttcccttgaccaccagcatttgtgtcctcctgcagggatgtgtcctggttccaggatgtggcagcaaagaacagggcctggccccagatctcccaagggatttctgcatcccctgaaagcttgggtagagtctgagagtagaagatactttctaacctggtccaagtttggtctggaaaaatggccttcgagaggaccaaagacaatcttatgaacaatttttcccaatggaactcatttggagtgggccatgagcagctctaggacacagagggaggcaaatttccctgatctaggccaggaggcctctgtctttgacagcaggccctagatggggatgctggtgaggggagaaaagtttcaggggaggcaggaaactgccttccagctgggctctgggaagcacctcttcttggctttagttctagtcagctggggacctgaggtggtggggcagctaccccatccctaaagaaatgaccttggggtaaagaaccaggctgggaaccaagcattcaccaaggatgacagtgtcctacactcaccaagaggccactgtaggaccatttctgtgagtttggcttctttttcgcccaagaggacaagaggactctgggtccacagccccagcctggctttgttcaggatgctttgaatgactgtgggatgtctcaccaaatgagttggggccatcgctttaaaatgaacagagtaggtctgctgatttcctcctactcctctgggagtagaagcctctgtttctccccacaagaatccgtctttggataggatggagagaggctggctgcaggcacgggcatggctgcctctgggattaacagcagctggagccgtttggaccatgtgggagggggctgagtgagaataattgttcacaggtcagggtctatatatgccatgaggtgctgtgggtgtgggacgtgtggtttgtgagaggtaagtgtgagattctgaggaaggagctgtcggtgtggggagatgactcagtgcctttggagttgctcctggagtgtgggggcttcctgaagaggcgtgcatgctcgtgattattgcatctgtgattagaaacaggccatcctgcactgttcagttaggtaagtgcttgctgttcagaatttggaacaatacgattaaggccagggaagctcacctgtgtgtttctgccagtgagaagccagaagcccctcacaggaacagggaggcttggcaggtggactgtaccgctatgggacatcccctcctcatgctggccttgcccctctgggttccagctcccttgagatgcagcacagcacctggacaactccgagtgaggtgggtggggataaggaagagccacacatggtggccccaggctcctggtgggcatcccattcctcaccaaaccatggcccctgcctataggctctccaagcccaggaccttcaatgaggtgggaagggagccagcctttggctgtgcctggaaaaacagcagagtaggaagaccttggagacactcagtccatctgcctcattgtgctgggaggaagctgaggctcagggccaggagaagatggggcctcacacttacttcagatccatagtgtttggtgaagagtgggtctcagccaaatacttcaaacaaatgctgggctggacaaatgaaatgtttctttgctgtgagattcctcaggattttcagtgtcctgaggggcatcacagagttccaggacagggctatggttggcagcctttcccagacttgctttcacagaacatcttaggagctgctgttccatggcacccagtttgggaattgctgacctggtcccttctccaagttcacacrtggtgaatacccttctctgctggggttttcaggtagaaccttcgcttctctagagttggctttcagtggtgttcttgttaaggaaaaaataatccttggcacatcttcctgaggggtgataaagcataattcgtgaaccagtgcagttgctctttgtcactttgctaagagcaggttcaccttcctggtcatgcttccatgtgatgagaaaacaggtttgcaggctttgctcacacacctgctgttagatctgtcctagtcagactacatctgtcctggccacttctaacttgatgttatgtcagtcaagaaggctgggattgccctggtgtctctgggctgaactcctgcctggcctgagattctgggcatgtgtaaggggctggttctgaagttaggtgtctgggtgggtgatggggtcagagagagtgaccttttccaggaaactcagctacagcactcactttctttttcagttcctcacttcccaggagtggcccaatcagagtagaaaaaggtagaggtactgccagtcccagcgcagatgcactgcagacactggcaactggagagtgtcctggggatcctgtgtgggctgggtagtatgcctggagctgctagtrtagtcacgctgagcctggttgaggaggtccagcagcctgggtgctgtgtccagggcgtgtcggcaggatgcgttgttcctcagcttcccagtggacagagggatatagcagtcccagagaaggacgtgggccacacaagtgacatggaggctttcagggcatctccaagatgactagtgaaactgtgcttggaactttgaaatgtgaccgcagaaaatggaactttgttcatgtgtgtcactaatagagacttactggctggtttggaactcaagctgctgtgtagatctggagtgtgattgaacagttgtgccgaatggctgcatgaggacaaatgcacagaaaggagggaaagaacttggccccactgggcagtggtcaccaggacttggtgtttttgtttttgtgtatgatggcatcagtcagagttattactttagctgagtgctgcagaaacagcagatgagatctggagatgggaatcacacacagttagctccatttggctagcagcagtgtctgagatctggaatcactgtttttctggccagcggacccaagtttcccctatcagccctaggctgckggaggtctactacacttacacagacagacatggtactcaccattctgcccatccagcagagagcaggaggcctgcccatgtagtttgctgggtttctgagtgcctagagcatgttgagactgtatggaaattggggaaggagctcagagcacagtccctgtttacagatgaggagactgagtcttaggaagtcttggcttattctgggttattctggagcaaaagagctgtggatctagaccagtggcttggtctccagctttcccccagggatttgcagcctcattttccccatccatagtccattttgctaaggctgaagctggttcagaacaaatagggcagtcccagatactcttcttggtggaggccatttctttctggatatccccagtcctcgtagctcagggcaagcgagtaatttaacctgtccgaaaccacagagaaagactgggtgtttctgtttgaggcctgaacatttctcaccacccacaagagaccctccctctgacaatgcactgatgccagggggccagaggtgttagcattcagtccttactgacaaggagaaggcaggaagaccattctccttttctctctgtagatgtggggttttggacaaatacttgaatttcctgaatgtcagatttctctgaaggaaaagcaggattccaaggattggcatcagtgcctttgctaatgcccatgcctgctcaggcctgctagtccacctttccgttcttcagtgacttacatgtgggcccgccacccctttctgcaccagaagggtggcccgtgttgcccttgttaggcttctattctgacagttgggggtgggagggagacaaggcatgggcctgagcctgctaagtagaagatgagaagatgcagttggggtgggcagtggggatgggagtgagttgctggggaatatgaaccgtggcctggggcaggcatagcctgcttctataggcttctcagggacttmcatgccccactcagagcagccccagaagcacatcctggcctggagctcctgcagatgccagtctgtcctcatcctcagaacagcatcccaggagtgactgcggtgcagaggcagggttgcctgcatgcccgagcctccagtctgatcagctgaatcctcccagagcaccatctagagtgaaggggcccacgctctgcccctgtggggagcagcagggctgccaccccatccccagccttccaggccaaggtggtccatctgcctcccaccacccttgctctagtcagaattacttataagcctctctaggaaaactacagaggagtaagcatggtcttacctcatccattccaaggtctggactttgctgaggccaagccaaggatatttaacccataccatccccaactcctacccaatggcaaaccatgagcytacgcagtttcccagggtgggcggcgtggagaagggagggagacagtgcagtggctccgagcctctctctcccctgcctgcatcccactgctttccggcaagggccagggctccagatggctcgggggtggtgctgtgagttcagtacagatccctctgctacagccagcagccttgtctcattccctctactccctcctggccacactgccacctgggccagagaggaatgaggagcaggtttcaggacatgggaccagcagtgtactgaggggaggtaaaggtgtcttccgctttcctgggcccaggagggtgtctgcccagccttccaatgctcacctccaaacaaaatggaagtggatctccaggtggcaggcccttcaggaggcctttctcccaccgaatagctagtccttgggcagtttgctttagagtagccactttgacctaaacagtctccaagtcaatagagaaatactctccaaactttagtcactctggagcagccagccctgttgcttagtacatgccccgaagtggtccatgttcccagaagacaggacctttggcctgcttacttgcttggaccactgcagggtggaggccacagccactggggccgtgaggagacaacaggcatggaattctaccttttagttatggaagagggccataagttaagctaagaatgaatgtaaaattaattcagatctgaaaataagaaattttactcctaaaacacttgttttcatatctaagggcaaaggaaacagaataaaaagaaaatgcagtaaaaatggtagagaaaaaaagaaatccatgaataaagtaggagttggaagaagtggaagaaggcacaagaaggggaggcaggaaagggaggtgatggaaagagagccagaggcaggaagaggcagggaccaggaaatcttggtaaagttcccagttgctggctggtaacctgttggttttgctgcttctactctttattttgctcagcctttggcctggacaggcatgtttaacccactgagtcagagggcagccctctcccttcttcctgtccttgcctccctccacagtgcttttcagtcctattgatagccgggaactgtcccagacactggagaaacaggtagaaatgaagcagatgtgctgctcagctctgtgaagccttcagaccagtgcaggaggcaccactgccaccaagaaccacacaagcaaacacacaatcacatctggggtcaaggaggggagggctatggcgggtgctgttggtacgatgctgagacaagattcctgggggtagttgggcatggtggctcacacctgtaatcccaacactttgagcagctgaggtgggcagatcacttgagcccaggagttcaagactagtctgggcaacatggcgaaaccccatctctacaaaaaaaatacatggtgcaaagatacatggtggtgcatgcctgtagtcccaagtatttgggaggctgaggtcagaagatcacttgagcctgggaaaatctaggctacatgagccatgatcatgccactgccctccagccagggtgacagagtaagactctgtctcaaaaaaaaaaaaaaaaaagttattgggggcttctccaaagagagcattaggctgtagaatgtcagaattgctggatgggaggcagttggaaaaagaggaggcctgaggggatgtgctttgttcatgtgagggttcaggagcaaaggtccaggacagctgtaccacaggacaggaccagaaggcatgcaggtcctgctgggcttgctggggtctcctgatgcactcccaaggtttgggaaggtggcagtaggaaggtcagatgtgcatttaaaacacccctctgatgcaatctcaagggcccttcaaatagccaaaataattgtgaaaaagaagaacaaagctgaagaactcacacttcctgatttcaaaacttactacaaagttacggtaatcaaaacagtgtggtactggcatagagacatatagaccaatagagtagaatacgtagcccagaaataaaccctcacatatacggtcagatgatttttgataagagtgccaagaccattcagtagggaaagaacaatcttttcaacaaatggtgttgggaaaactggatatctacatgcaaaaaaatgaagttggaccttttccttacatcatatacaaaaattaactcaaaatagatcaaatacctaaacataagagctaaaactataaaactcttagaagacaacataggggataagcttcacaacattggatttggcagtggtttcttggatatgacaccaacagcacaggcaacaaaagaaaaaatagacaaaatagacttcatgaaaatttaaaaattttttacatctaaaggcactattaacagagtaaaaaggcaacccacagaatgggagaaaatacttgctaattatatatttgataagggattgatatccagaatatacagagaagtcttacaactcaacaacagaaataaacaaacaaaaacccaattaaaagtgggcaaagaggccaggcgcagtggctcatgcctgtaatcccaggactttgggaggctcaggcaggcagattgcctgagctcaggagtttgagaccagcttgggcaacatggtgaagccccatctctactaaaaataaaaaaataagccagacgtggtggtgggcacctgtgctcccagctgctygggtggctgaggcaggagaatcgcttgagcccaggaggcggaggttgcagtgaatcaagatcgcactactgggtgacagagccagactgtgtctaaaaaaaaagtgggggggagcaaagaggagtcaggtgtggtgatacacacctgtcttcccagatacttgagaggctaaggtgggagggtatcctgagcctaggagtttgagaccagcctaggcaaatagctagaacctgtctctgaaaaacaaaatgggcaaaggacttgaagaaacatttctccaaggaagatatacaaatggctaataactccctaaaagatactcaacataggtcggctatggtggctcacacctgtaatcctagcactttgggaggctgaggcgggtggatcacctgaggtcaagagtttgagactggccaacatggagaaactctgtctctactgaaaatacaaaagttagctgggtgtggtggtgggcacttgtaatcctagctgctcaggaggctgaggcaggagaatcrcttgaacctaggaggtggaggttgcagtgagccaagatcacgccactgcactccagcctggacaactgagcgagactctgtctcaaaaaaaaaaaaaagaaaaaaagaaaagatactcaacatgactaatcattagagaaattcaaattgaaactacggtgagataccatctcatactcgttaaggatggctgctgtaaaaataaataaataaatgttggcaagaatgtggagaaattggaacccttgtgcactgtttttaggaatgtaaaatggtacagccactctggaaaacagtatggcagttcctcaaaaaattataaatagaattaccatatgatccaacaattccacttctgggtatacactcaaatgaattgaaaggaaggtcttgaagagatatttgtacacccatgttcacagcagcatttttcacaatagctaaaatgtgaaaacaaccaacagcccattgacaaatgagcaaatatgcaaaatatatgtatatacatacatacacacaacgaaatatcattcagycttaaagaggaaggacaatctgacacatgatacaacayggacgaaccttaaggacattatgctaagtgaaataagccagtcacaaaaagacaaatatgaggtggtcagagtagtcaaagtcacagagacagaaagtagaatggtagttgtcaagagctggaggaagaggggagccgggtgcagtggctcatgcctgtaatcccagcactttgggaggccgaggcaggcggatcacaaggtcaggagatcgagaccatcttggccaacatggtgaaaccccatctctactaaaatacaaaaaaaaattagcggggtgtgttggcccatgcctgtagtcccagctacttgggaggctgaggcaggggaattgcttgaacccaggaggcggaggttgcagtgagctgagatagtgccactgcactccagcctgatgacagagcaagactctgcctttaaaaaaaaaaaaaaagagctggaggaagggggaatggggagtttcacgggtacagtttcagatttgcaagatggaaagaattacgaagatgaatggtggtgatggttgtacagcattatgaatacaataccactgacctgtacacttaaaaatggttaaggtagtaaatttatgtgtattttaccacaataaaaacaatgcaaaattttttttttatttgttcatttgagatggagtctcgctttgtcgcccaggctcaagtgcagtgatgcaatcttggctcacggcaacctctacctccagcctcccaagtagctgggattacaggcatgtgccaccacacccggctaagttttgtatttttagtagaaatggggtttcaccacattggccagtctggtctcgaaatcctgacctcaagtgatccacacgcctcaccctcccaaagtgctgggattacaggcgtgagccgcagtgtccggccaaaaataatgctaattttaaaaaccctctggaaatagacagaggtgatggttacacattatgaattattaatgccactgaattgtatactttaagatggttaaaattacaatttaatatttattttaacacacactatatatgtgtgtgcatatatatacatatacactaaaacaacacatacacatacacacacatatatatacacccctcccccgcccagctgctatgtgaagaacagcctgcaggggtagcgggtgggctctgggagccagagtggcagagggggctgaggctgaggctggggtagtggtgatgatgactgcgaagagccatgatagattcctggtgtgtttgggtggctaaacagacagaattggattggatgtggagggtaggagatggagatagagaatttttctgtttgggccattgccaagttgaaggtgcctgacaaatctaagaccctggcatgaaacaggcaggttgggatggagacttttgtttcatattcacaagcatatagtgacatttaaagtgccataggagagatgtggacagagagaagaggtgtcaggatctgggctccccagcactgagaagaacccagcaaaggtggctggcaaggataagcaaagaagagtagaaaggccagcaagtggagggccaagggatccaggaggggagaatatctgagcagtagtggggagtcaactgccaagagcccatcacaggagctcttgatgccttgctgggtggagcaaaacagaacaaccaggttgacaagtcatttttacccccaacctcaagttatgaatattttcaagcctacaaaattgttgaaagaattgtacaaggaacacccacaaagccactatctggatttataatgaacccctcctctcctggctttatcacgtatccattctaccatctatttgttcttctgtctgtccatctatccatccatctttttgttgaatgtcaaagtacattgcagtgggccaggcatggtggctcacacctgtaataccagcactttgagaggcgaaggtgggaggattgcttgagcccagggattcaggagcagcctgagtaacatggcaaaaccctgtctctaccaaaaaaaatacaaaaattagctgggtgtggtggcgccatgcctgtagtcccatctactcgggaggctgaggtgggaggatcacttgagtctgggaggtggaggttgcagagagccatgatcatggcactgcacttcagaaccagaccctgtccccctccaaaaaaaaaaaaaaagtacatcgctgatatcagtatacttcccactaagcacttcaagcgtatcattaactagagttcagtatttatttaaggtttctcttttttagctaaaatttacatataatgcaatgtacagcaattaattattccagtcggtgagctttgagaagtggtctgcagctcagccccatgtgggttgcaggtcatctggagtgaccatggaagtcatttakcaggagtttaagaggcgagggccaaggacttgcaggccaggataaaggggcctggagggagggcagcagaagccaggaggggaagctgggcatgaaccaaagggtcctggggattttaaggagaagttgaggctagtccaagggtccagcctctcctggagagggttactggtgactaagaggagtgtgtatggggagggtgcaggggagttggccagtcatggatggggtgtgttacagggtacaccagatcatcctgggtcgggaggggggctgtccagagcagtgtgggaggagttaagagatattgagggcagagagacagatgtgtccagggatcagcaaggggacggatcctctccctttcgtggagatccaagccagtgaggtcttctagccccaggtgcgattaggttcagcctccactccccagatcctgacctcagatgttgggcaggttcccaagaccttcctcagggctctgatagattggcacaggcctcccctggstggtccagctctggatcagtgtgaccctgcccactgggaccctgtggtacctgcttcctaagcctgaggtcagctagctgacagtaaggtgctagatggggcaggcaacatgtctattgctgtaccagggtgagtatccaggctaggcctgactccctccctctcagctgccaccttagctgcccttctgcacatcggcctgtccttgttgtccagggggcatgggaaggtatgttcctcctgatgagacctggccagtgactcatagcccagaaaggcatatagtcacactggccagtggggccctcccaggaacctctagatttggcacctgcagggagggctcctttatgagctgtttctgtgatgtttcaacttgtaccaaaatggaaagcataaatgcggcatcaggcgtgatgtcagtgctgagtgatctgaaacactgaatgcctgctctccctggtagggctggggctctccacaggaagaaggctgagtgacgtctgcaaccttccttttccttgctgctgggggggtgagaggaggcgagtgggaagagaacatgtgacttcggggggctctcagagcttcctgacagccatggaggtgaccgtgaggtagactccaccctgtgagcatcctttggggccagatatggcaagcaaggctgagtcccacccttgagggctgagacactctgtgcagccagtgttcctgcagggaagatgtagaagctcttcccagaactgccctccttgctccagagcccagtggaggaattaccagggagtgaccattgcagacagatcacagctgctcattcaacttagagttcatacagcctccagcttgggccccaagcctctggatccttggccagtgccaccttagctgcccttctgcacactgaatagtttgagtaaggaagcagctaaaaaagactcttctcagggagaaagtcctctcagagctacagagcccacagggtcctatgwttccaagtccctagcagacaggtggcagtggctccctgcaaagcctgtaggaaggcttcctgcagcttctgcttcccccacctcttaaaccacctcttgaccttgtactgcactgagccttcccatccttactgccacttaggcccccactgggtcggggtgcacgggcttccatggaggtccctaccagtscttggagatggcaagatgggcttccttgctagcaagaagagtcagctcattcaaagctaatgtctgacagagctgtccaccttagggtagccccaggaaggctcctgagacacgaggctcgtggctggtagcctgcacatctcctgcccatgtgccagatcaggatcttggaggtattagacagcagaaccctagctgaggcttcttgtcacactggtaaaaggatagtccctctgattctgatggagagccagcttggagagggcctaggagccacagggagccttctgggttcaacctcttgatgaggaggcatcactgtgtgcagctaaggaaggctctaactgtactggcactcaggccagtggagtctgccacagaactattcatgtatacccaggctgggtgggcgggtgggttggggtgcacagccatcatctctctccctaccccgtggacagcctccatccccctgagtgtggggataggggccttgcagtatggaggaagagactgaggttgggctcctcccaggaaactcctggggatctgtcggggaggcagagagggggatgtattgctggcctcagagagctccctcagccagtgtcctccttaggaggccttgcatgctgggcctgagcctgggaggggctgtggggagggtgcggtcaaggttccttaccgtctggaagaggctggatagaaatagctgcacccatctgggcgatgagtcactgaggggcgtttcagccttttcttggagaagttctattttaggtgagatgcctgtgccacagcctggatgacaggggctggggaaaggaaagttctggcggtgagtgcaggcggtttggcacgtgcctttgttcagcctgattcagaaccccagggacagtcaccccaaagttgcaggataagaagccttacctcctaaattccctttcccaggaagaagtctcacctcagggcatgctgcagtgcccaggtgaatgagagagatgggacgttgggtgtgggctgggcacccacgggaagaactgaatttgtggctgccaccctgggccagaggctgagcttcccctctgaggagtaatccccttccagggtccctctctggatgagtagaaatggcctgctctggggaactctcactttgatgggaataagcccctccctcccaagaatgacctttctaaagaggtctttagactgggttcagggactgaaattgttttctctctggctttctctacccaaacatagacaaagctgccttgcttctttctttctttttctttttttttttttttttgagacagagtctcgctctgttgcccaggctggagtgcagtggcatgatctcggctcactacaacctctgcctcccaggttcaagcgattctcctgtctcagcctcccaagtagctgggactacaggcatgtgccaccacacccggctaattttttctatttttagtagagacggggtttcaccatgttagccaggatggtctcgatctcctgacctcatgatccgcccgcctctgcctctcaaagtgctgggattacaggcgtgagccacggtgcacggcctgccttgcttcttaaaaagcatttgggtgggttaattgttcccagctagtgggatggcttctcacctcactgcctcggcatcactgttcttagagtttctagaactgggattggcctttggggggctctgccagggtttgcagtgctgacttctagagcctgacttggcctttggaagaggcaggactacagaaggcaccaggctccaggctgtccaggctgtggtttaggagctacgcagagctgtcagggctgatcttgccagcagcaacacttcctagccagggaaccattgagaacacattgctaaaacatctcagatcttggttttctctcctgtgaggacaaaatgagagaatgcctgtgaacatgccctatgtggtgcttggcacaagggggtgcttgccaaagtgcagtgttctccctcttcttggctgctgcccttgggttgctgggataaggcacctgagcccaggtcccccaactggcaagtcaacctgtagcagtagccctggggcctcaaggcagagagcagggctggagccacatgtgtgggtaaataaaaggggccttctgccccagagatgagacggcaccttcccctggtgatgactgggtggccaatagggtgcatttagaacctctggctgcaaccacagacagagaacaaccttggcctccagcctcagctctggttgatgaggaggagactcttcattgaggcaccaaatctcggggcttccaccttgttgagctatgacctgcatgaccaaattgccaggatgaatgaagcaagcccctctgggatgagccctgctctgtaccacatgttgtgtgcagccctgagaacaccctatcaacgagagctcatgggctgctttggggcacagaagacaccttgtaaacaacaaatcagtagacactttgggaaagaataagcactatggagaaaataagctgggtgatttgacacagagtacccggagggtgttttatttttatttatttatttaattattttgagatggagtctcactctgttgcccaggctggagtgcagcggcacagtcttggcttactgcaacctccgcctcctgggttcaagcaattctcctgcctcagcctcccaagtagctgagattacaggcgttcgccaccacacctggccaattcttactattttcagtagagatggggtttcaccatgttggtcaggcaggtctcgaactcctgacctcaaatgatcctcctgcctctgcctcccaaagtgcctggattacaggtgtgagccaccgcacctggccaaaggagagcattttagattgtgtggccagaggaggtcctggtgggaaagtgttacctcatctgaaatctgtacwacaagctgggccagggggcagagggaataaggagtacaaaggccctggtacagaaatgagctcaggggaccacttggcagagcagacagcctagagtgtctgcagtgaaacagccaaggggagatggcaggaaaagagaccagagagagggggaggctggggtggggctgggttgggtcacagagttgtgctgaagagttcccaaggtgtggtggaaatccacttagagtgtttgatcctattggtgagatgctctgatttacatgtgggtttttggagaaaaattattgggtcatgtaactggaagtccaagggtagacttggggcatagccagatccagggratggaatgaagtcatcagatctactcctttctcctttcgttgactcctaccatctatggacatcattcttagcatctctctgtatgttgggaaagaagactactgctgctgcaaagctacatccttctgattagtaatccaaaggaaaacgaataaagaccctctctcctgttgttcattaccagataacgtggagggctctaaccgactctgtttgccaggtcacgtgcccatccctgcacagggctaatggcagagggaaactatgtgtttatcacatggatagcggcacatgtctcgtttgctctggaggcatgaattatcccacttctttaaaaagctatcttccttaagggaaaaaaaaaggctttaaaaaattctacttaacatcagtcacttacattgcattactttaccctcacttattttgttctcaagatttttcattctgtagtatcttgtttcttcagctagactctaagcttcttcaggataggaatcatggtttctttttattctctatgcctccttctcccacgtattactcttcacttatttattcattatgtgagtttttactgaatacccattgcatataagcactgctctagggccatgcctttcctcttgggttaggttttaaaagatcagtctggctgctatgtgcaaatggcctgaagtgggaagcaggggaaggctactgggttcatccgagcgggaggttggggtgcacagatctgaggcactgccagggggtggcggggaggactctcaagcaggagggtctggcaggcagtgagttggtggttggggtggggtgggggatgggactgcctccactgcctcacatgcctggcaactcctagagggcaggggagtgccatctgtccttcagccctgccacctggcagcccagaaatgcctgagcagggcttggtgctcctgcctgtgctaggagtggccttggctgctgtggggcctgcactgacctgggccatgagtactgccaatcctggccaccctgctgactattttgcttttctcctcaggtgaaggagtggctctgtctgaactgtcagatgcagagggctctgggaatggacatgaccactgcacctcgctccaagagccagcagcagctgcactccccagccctgtctcctgcccactccccggccaaacagcccctggggaagccagaccaagagagatctcggggcccaggaggaccacagcctgggtcccgccaggctgagacagccagggccacctcagtgccggggcctgcccaagcagctgcccctccagaggtggggagggtgtctcctcagccccctcaacccaccaagccttccacagctgagcccaggccacctgcaggagaggccccggccaaaagtgccaccgcagtgcccgctgggcttggtgccactgagcagacccaggagggcctcactggtaagctcttcggccttggcgcgtcactgctaacccaggcgagcaccctcatgtctgtgcagcccgaggctgacacccagggccagcctgcccccagcaaggggacacctaagatcgtcttcaatgatgccagcaaggaggctggcccaaaacccttgggctcagggcccgggcctgggccagcacctggagccaaaactgagcctggggctagaatgggtcctggatctggacctggagccctgccgaaaactgggggaacmaccagtccaaagcatggcagagcagaacatcaggcagcatcgaaggctgctgccaagccaaagaccatgccgaaggaaagggccatctgcccactgtgccaagccgagctcaacgtgggcagcaagagcccagccaactataacacatgcaccacctgcaggctccaggtgtgcaacctgtgtggcttcaacccaacaccccacctggtggaggtaagagctggaccaagcatgctcccttgaaccttgatgagaggccgggcctgggtagtgagtgtcatgggaaccagaaagagttctgggtctgcagcagccatggggctgctcctgtacaactaatgctgcagaggggctgcattccctttcctgtccctacctcaggccccagttctactcagaactaactttcactcagagttgggggtaatggtgcctactgactcagactagtgccctaaggctgatcccagagtccctgagctggcctccccatttccagctaccatgggcatggccctgatgaaagacaccaacctcccctgctcagataggagaacctgaggtcccacactgccatggacctgtgaccttcagaggggtagggatcgaatggccatgatgcagagggttgcgtcccacatccagggtggggtgggaggctttctcacaatggggcagggcatgtcccactgtccaggctccagcccagcaaggtggtattcaaccttgattgtctcttctgaggtcataagtgttgacgtctacttgtcaaagtcacagcctttggtccacatgttttacccaggctggggctgggctctccttagagctgctactggggatgctcagagatgcttctctttcccacaggaaggtttgagacagacctggggttgtggccattctctccgcagcccctgctccagggaagggcactgagcactgtgcagtgctaggcaggagggagcaggaggcccagtgtaaggttcagtgttccctcgaagcctggagtccagcccaagaggctcagaaggtgaaggtgccctggcagaattagaccagcctgggccaggagcagatgctgcttctgctcctccctcagtcctgtggcccactctccctggcccagggtcacccatgtgacccttaccatgctgccttgggcgtagcttggtgtgtctccttagagtgccctcagtcttgatagatgaatgtgtttcccagctgtgtcacgttaggagatgttcgagccaaggccctgcctcttgcacatggggagccacctgagccctctggtctcttgggctgagccatttgtagctgatggtggcgcaggggtgtgcggagtgcaaaccaccactggcccaggatgggacaagagaggagagcatgatgttgccatggcctctgtggcaccttgttctgacttcccttgggccaggactccacaggagtccccgtgggaccccagcatgactaggaagactactttggccaccaaaggccacactttccaatatgcagggaagggcagccctgagcaagacaactgacctcctcatgtggcacccatctggtcttctaggcaccacgaagccaactctccaagctctagatctggtggctcactggcgacagtttgcctcactggctcggggaaaggggtgcaccagggtgtcaccacaagactaggagaaccctagctggctgctctgcccagagacctccaggcacaagctcactgctggtcaggtggggcacactgacactgagcgactgtgagccccagtggacttctgagttggcctggcctggaggactcctgtccccaagagacctcccagcccacatttccttattaagcagaatgtgcacgaatgggaggggaaaactgtctctgtccaggagcataaatgttcctgacagttcctcttggccgtccctgggccaggccacgggaagtgctgattctgcccaaacagaagagtttcgttcacacgctgactagatgaaacgtctggattctggcctaggcctctcattagctgcttggttctggctatcctggaccctggagcttctgtctcttgatggccggtgttccccccatcacacctctctcaatttcctgctgtctccatgtcctgccccactgccccctccttagccaggaccactctcatctccatagggtctgatgggtcccatgggcctgaaagaaagctgggggatgtcctggtcctagtcctggtcctacctcatccccagctcaggctgctcctgacagcagtcaggggtgatgaagtctctctaactcctttctcatagctctccctatcaatgctgctgtccccagagggcctgcagctattctagggaaggtgtggataggcggccataatgcctctcccatgattcccaccatagagactgtaccaccatccaccaccagagatgcaagccagcagcccggggtcatcctcacctcctcctctttaacctctgcacctgctccatggaccaagccctgccagctctgcctccccactgtcacaagaatctggcctctctcccacccatgctcacagccttagtccttccgtccttatcctcccttacccacacaatgaccaaaacctctgtgcagcttcacctgccttgggtcttgcaaggggctggtgctgatatgttcaccatcccttcagcattgcttttcttcactgaggcccctaaccaggctgtggtctgtcttggatctcacctcagtcaatggccacttggcatcctgagcaattttgtgcttctctgtgacctacttggtgtgttcttggttagaggtttctgatttctcagcacttgccagagacacttaccctgccttgggagtgtggtggtaaggccagcaggtccttctccaggtcctaagggtgggtctgccatggctgtctctctctggaccttgcctgcttaagaacgactgtgctgtgtctttgtgcacaaagaagggacagacccgtggagcccccctcatagctcccacagccctgttagacctcctgggactccacctgaggccacagtcaaccatctgggccagtgggttgggaattttccccataggttggaaattttcctgaacatttctgagctgtaaaaatctttcttctttctagattgggagttcagagcacacaatagaggagagagtagaattggatcctttttccttttgaactttcctctgaaaaaaaataaccatagtgctatttagtgagtcatttcataattaagagttgttgattccagttttttttacctatttgtcttttggaaggataatagtactctctggcttaatttttaattgacgttcagttcaaaatagagtttgtgaagaaattagttgaattggaattgtgacagtaacattaccagtctcttattatatcatcattgccaaaattccagctgtgcccttgagaagtcgggcctccctgggcaaagtcccttgcacctgtgatacatggggctgggcttgctcattggggtaggggttgcagcaggggcatcaggccagaggtcctgttgcctcccatgtagaatagggaccacaatactcccttttaggtttccgtgagaaccaggtgagatgctgtacctcagatgcttatgcaaggcctgacacagtcagcccttaagccaggattttggaacaggagtatcctaaaagagggtctctgtgtgagaaaggaagcgtccccatgagcccctatctgggtgtggatggaccctgtggctggtgtaagcttttggtatgagggatgccccacagggaacaaacacatttggtgctggggggtgagggggttacagcccagctacaaggatacacactggggacaccatggtgggtttattttatgggaggaagaggcccagaaagaaggagcttaggcatgtccagcaacagggaggctcagggtcgcagagtcaggagaggaatagcagcaccagtgatggccatccctgtggtccagtgtcctccaagatgacccctgggcatccttttctctggagttctcattcacagccccctggtctggcagcagggctgagggtgtttagggccaggcagctggccatagggcattgactggaacggtgtcaccataaccatactggcatgcaggccagctccacacatgaagagattacgtggaatgtaggttcattcagatgatggcagacagtgcaggatctgtcctggctcacaaggcacaatggccagtggtcccagaaggcagcagctctcacgtgcctagagggcaccccactaactcagtcatcccgtttccccttctttaccctaaatagtgatgccctgaaccactgagtgccatctgatggcatacacacctgcctctcccactgttagttgatgattgtccttggggaatttgtatcttcctgccctagaaaggaactggacagagggaatgaggcagaagtagtcatcagagccaccccattatccatcccctgcccttttgtcaaagaggccaggcgaaggggtaagcaggcagcactttcccaaggactggagctggcatgggctgagtgaggcagagtacgagagggctgtgcaatgaatggatggctgaatgaggaatgaacactgaaattgcggaatggaaacgagcrgaagaataagggaatgaatgattgggatggaggtaggggtatgttggggttggagaaaatgagaatagaatgaataaaggaattgggaccccagctgtcccagcccccaggcacagagattctacatggcctgccttccacccgattctcattccccagaagacttgggcctgggccaggtctcccctggctctactcctaccagccccagtgccctgtacccttcttccccactcccagagggcttgtgaagggcctccagcagccaggtcaatgtttatttttagcccttacttcacacgcctcttcctgcctgctctcccttcctcactgcctactatagcagagccaggagcaagagggcctgccaggcaacctgcaacctggctgtctccatgaataaatgtgtgaaggagcaaagcaccagggagcatgtgaccacaggtaacatctctgctgagagctgggcctctgggctcaggcaagctggcctctccagcatttggtcagagcacttarcattaggtctgcttcctccatccagactacccttccaaggtgacttgcttcatttagactgttgcttctgtgtggggttcgcaggccagagatggggttaggagtttgccaggccaccaaggtgggccagggcagatatccaaactttgagaggcctaacatgggatgggtgtgcacagggctccaaagtggagttagggcagcattgccttgggccagcccactgggcctagatcctaaacccatcatgctgaccatagggctggggaaggggctgtttgatcatttccagagctctctctcttgatctctgcctatagccctgccatctctccagggtcattttgccatctcacagtcctttctgacatgggggaatttccattgtgtacacaggtgatgctgggggcatgtgagctagggttcctggatcaggctctgtgctctcccatgtcctgttcatctggggctcggtctcaacctatctgtattttccccaggcacctctgggggtgcaccctgccaggccaagtgagcccagggcctggccagtggccagcacttactgccttgtggggttttgtgtggagacacattgagcatcagataaggttcaagggagtcagtagtggtgttagggctgggctgtgcagagaacagagtgagtatatgtatgtagggcatctaaagggtccccctccacagctgggccactgccccattcctctgcctgggacttgtgcatgaggttgggcctcggggaagagcagaagctccagtgggagagaagcagtctcgaccctgagtaaccagcctggggagcaggcctgtccctcaacacacaccaaggccctgccacctgcccagcctagcctctgctgaagcccagagcagagaagtggagtgtagctctctgtggacagcaaaccagggcagaatcattgacatgttatctgccatggtggccctaggatgccaggctaagggcaggcaccctgggggtaccaggcttccaaggctgccagaggcagcatgtgaagtgagggtactgaggttgtcagccttcctgggggtggcaagggccaaaggycacctccttttccagtcctctggctctgtgaccttgtggttcttatggtccacctcggtggcagagttgctggtgggagcctgtatgtccaggcacctgggatgagtgagttccctgcaggacggatggagcactaaggctctgcgccacagagtaagaacaggcacaggtgtctgtgggaccctgctctgggctccactgtaactctcattctccatcccatgtgggccagagaaggacttcaaatcctgccaaggaggagccctgactctggaggaggctactgggagacatgcccctgtcagcctcagacctgctgcaggaatcacccatttaggcctcagagatgcccaaaccctaygcctgtacaaagcagctggggctgggagacatggacttcgcttcttgtgttctgggggcttcaccattgatacctgtgtcatacttgtaaatgacctgtttggggttgtgggctccagaaaggctgcatgccagtgcctgtctgtctgmtgagtcatggctgtcttcagcccccagcactgggcctgaaacagtagaggatcctgagagtggtggactgatggttgagaatttgatcccagtccagctctggaaggagcagggcccctgacacaagggccaccacacatagtccccatcagaggaacagtccagagccctgggggcaggaggaggcctctacctgagggtctctgctggccttagacaaggtgacttgggctggggatttgagcagggaggactgctcagcccctctgtcctccaccaagcagggttactcccagacagcctcccctggccccaggagtctgcaccctatctagcatagcccttacctgggaaagagtgtggggaaggatggagtcagacctgagagctgggaggcaggggaagcatagtgcctccaggaagtgctccatgcttggatgccactcctcttccacaagggttctcaactgctggactccataccagcccactaggagccgtttgctccctcagattgagacctcagcttcccctgtgcttagggctaggccctcccatcccccacagttctcccccttttctggccgggtgaaaagttctctgtgggttaaggaaagtactcttctttggggttgttacttgcattctgactttgtgtgtgttcatcttaaaggtaggggaatttgttatttgggggcagtaaattggtcagtctttttctccttatgtctttggtgttatgctttgaaagttctctcctccctaaggttacagaaatagttatggaaatattatttgaggacttcagtgtctttttaattttcatcaaccccctctcccatttccttgcagaaaacagagtggctctgtctgaactgccaaaccaagcggctactggagggcagcctaggagagccgacccccctgccgccgcccacctcacagcagccccctgtaggggcccctcaccgtgcatctggaacatcccctctgaagcagaaagggccacaggggctgggccagccttcaggccccctgcctgccaaggccagccctctatccaccaaggccagccctctgcccagcaaggccagcccccaggccaagcccctcagggcttctgaacccagcaagaccccaagcagtgtccaggaaaagaagacccgagtccccactaaagctgagcccatgccgaagccacctccagagactaccccaacccctgcgactcctaaagtaaagagtggggtgaggagggctgaacctgccacccctgtcgtcaaggctgttccagaagcccccaagggtggggaggcggaggtcagtcccattcacttcccagagaccctagctttcagacaggacagtctatggaaaggcttgcctccctgggtggctgaggctgtaggctcaggacaggtgccttggggccacacaggagggaagggacacagtagaaggaaagtctagatgaggttctggcacgcttggagactgtgggttttacactggtgctgtgtctggcaccttgtcagatgctttgctgggttttgataccctttgatctagtaaagtttctctttgaagaccaagggctggtttgggcttgccatggaaccttcaggttattcaaggccagaaggagatagggtgggtggcgggccctaaacccttgggaaatggacagactcttccccagggtcctgggattgacagggaggattgggttcccaccacragctttgccatggggagtcagtgtctgcttttcaccctgctgcaggacctggtgggcaagccttactctcaggatgcgtctcggagcccacagagcctcagtgacacaggctattcctctgacggcatctctagctcccagagtgagatcacaggagtcgtgcagcaggaggtggaacagctggacagtgcaggggtgacagggccacatccacccagcccctccgagatccacaaggtggggagcagcatgcggcctttgctgcaggcccagggcctgrccccaagtgagcggagcaagccactctccagcggtactggcgaggagcagaagcagcggccccactccttgtccatcacgcctgaggcctttgactctgatgaggagctggaggatatcctggaggaagacgaagactctgctgagtggaggcgccggagagagcagcaggacactgccgagtcctcagacgactttggcagccaattgaggcacgactatgtggaggacagcagtgagggtggcctgtcccctcttccaccccagcccccagcccgggcagcagaactgactgatgaggatttcatgcgacggcagattctcgagatgagcgccgaggaagacaacctggaggaggatgacactgccacctccgggcgtggcctggccaaacatggcacccagaaaggtggccccagacccaggcctgagcctagccaagaaccagcagcactgcccaagaggcgcctgccccacaatgccaccacgggctatgaggagctgctccctgagggaggctcagcagaggctaccgatggcagtgggaccctgcagggtgggctccgtcgcttcaagaccattgagctcaacagcacgggaagttatggtcatgagttggacctgggccaaggcccagaccccagtctggaccgggagcctgagctggagatggagagcctaacgggctcccctgaggaccgctcccgtggtgagcactcctctacattgcctgcctccacacccagctacacctcgggcacctctcccacctctctgtcctccctagaggaggacagtgacagcagccccagccgcaggcagcgtctagaagaagcaaagcagcagcgcaaggcccggcaccgctcccacgggcccctgctacccaccatcgaggactcctcagaggaggaggagctgcgggaggaagaggagctgcttcgtgagcaagagaagatgcgggaggtggagcagcagcgcatccgcagcacrgcccgcaagacccggcgggacaaggaagaactgcgggcccagcggaggcgagagcgctccaagacaccacccagtaacttgtcacccatcgaggatgcctccccgacggaggagctgaggcaggcggccgagatggaggagctacaccgctcctcctgctctgagtactcaccctcaccctcccttgactctgaggctgaggccttggatggtggccctagccggctttacaagtcaggcagtgagtacaacctgcccaccttcatgtccctctactcaccaaccgagacaccctcbggcagctccaccactcccagttccggacggccgctcaagagcgctgaggaggcttatgaggagatgatgcgcaaagctgagctgctccagaggcagcaaggccaggcagcaggggcccggggaccccatgrcggcccctctcagcccacaggcccccggggcctgggctccttcgaatatcaagacactacagaccgtgagtatggccaggctgctcagcctgccgcagagggcacgccagccagcctgggagcagccgtgtacgaagaaatccttcagacatcacaragcatagtccgcatgcggcaggcctcctcacgagacctggcttttgctgaggacaaaaagaaggagaagcagtttctaaatgctgagagtgcatacatggacccaatgaagcaaaatggtggcccccttacccctggtaccagtcccacccagctcgctgcccctgtgtccttctctacccccacctcctcagacagcagcgggggccgagttattcccgatgtccgtgtcactcagcattttgcaaaggagactcaggaccccctcaagctgcacagctctcctgcctcccccagctcagcctccaaggagataggcatgcccttttcccagggccctgggaccccagccaccacagctgtggctccttgtccagctgggctgccacgaggatatatgactccagcctccccagcaggctccgagcgtagtccttcaccatcttccacagcccacagctatggacacagcccaaccactgcaaactatgggtcccaaactgaggatctaccccaggcccccagtggccttgctgcagctggacgagctgctagagagaagcccttgagtgcgagtgacggtgagggtggcactcctcagccttcccgggcatattcctactttgcaagctccagcccacctctctccccgtcttccccctcagagagtcccacattctcccctggcaagatgggccyaagggccacagcagagttctctacacagacgccaagtccagcccctgcctcagacatgccacggagccctggtgcccccactccatcacctatggtagcccagggtacacaaacaccacatcgacccagcacgcctcgcctggtgtggcaggagtcctctcaagaggctccctttatggtcatcacgctggcatctgacgcctccagccagaccaggatggtacatgccagtgcctccacctccccgctctgctcacctactgaaacccagcccaccacccatggctacagccagacaacacctccgagtgtgtctcagctgcccccagagccacctgggccacctggctttccacgggtgcccagtgctggtgcagatgggcccctggcactatatggctggggtgccctccctgctgagaacatctccctgtgccggatctcctctgtccctgggacgtctagggttgagccaggccccaggacccctggcactgcagtggtagacctccgtacagctgtcaagcccactcccatcatcctcactgaccagggcatggacctcacctctcttgctgtggaagcgaggaagtatggtcttgccctggatccaatcccaggacggcagtcgaccgccgtgcagcccttggttatcaacctcaatgcccaggagcataccttccttgctactgccaccaccgtgagcatcaccatggcctcgtctgtgttcatggctcaacaaaagcagcctgtggtctatggagacccctaccagagccgccttgactttggccagggtgggggtagccctgtgtgcctggcccaggtcaaacaagtagagcaggctgtccagacagccccataccgaagtgggccccggggaagacccagggaggccaagtttgccagatataacctacccaaccaagtagctcctctggccagaagagacgttttgatcactcagatgggcaccgcccagagcattggcctcaagccaggcccagtgccagagccaggtgccgagccccaccgggccacccctgcagagctgcggtcacatgctctgccaggtgccaggaagccacacacagtggtggtgcagatgggagagggcacagcaggcactgtgaccacactgctcccagaggagcctgcgggtgccctggaccttaccgggatgaggcctgagagccagctggcatgctgtgacatggtctacaagctcccctttggcagcagctgcactggcaccttccacccggcccccagtgtgcctgagaagagcatggcagatgctgccccacctggccaaagcagcagccccttctatggtccccgggaccctgagcctcctgagcccccaacctaccgggcacagggggtggtggggcctgggccccatgaggagcagaggccctacccacaaggcctgcctggtaggctgtactcctccatgtctgacaccaatttggctgaggctggcctcaactaccatgcccagaggatcgggcagctcttccagggtcctggacgagactcggctatggacctcagctcactgaagcactcctacagcctgggctttgcggatggacgctacctakggcagggcttgcagtatggctcagtcacggacctgcgtcatcctacagaccttttggctcacccgcttcccatgcggcgctatagctcagtgtcgaacatctactcagaccacaggtacggcccacggggagatgcagttggcttccaggaggccagcctggcccagtacagtgccaccacagcccgtgaaatcagtcgcatgtgcgctgccctcaactccatggaccagtatggtgggcggcatggcagtggtggtggtggccctgaccttgtgcagtaccagccccagcacgggcccgggctcagtgctccacagagtctggttcccctcagacctggactccttggtaaccccacctttccagagggccacccaagtcctgggaacttggcccagtatgggcctgcagcaggccaaggaacagcagtcagacagctgctgccgtccacagccactgtacgtgcagctgatggcatgatctactcgactatcaataccccaattgctgcaacactgcccatcaccacccagcctgcctcagtcctgcggcccatggtgcgtggtggcatgtacaggccttacgcatctggtggaatcacagccgtgccactcaccagtctgacacgtgtgcccatgattgccccccgggtacctcttggacccacagggctgtaccgctatcctgcaccaagtagatttcccattgcttccagtgttccacctgcagaagggcctgtctatctggggaaacctgctgctgccaaggcccctggggctgggggsccttcaaggccagagatgccagtaggggctgcacgggaagagcctcttcccacaaccacccctgctgccatcaaggaggctgcaggagccccagctcctgccccactagctggccagaagccaccagcagatgctgctcctgggggtggcagtggggccctcagccggccagggttcgagaaagaggaagcatcacaggaggagaggcagcggaagcaacaggagcagctgctccagctagagcgggagcgggtggagttggagaagctgcgacaacttcggctgcaagaggagctagagcgggaacgtgtggagctgcagaggcaccgtgaggaggagcagctgctggtgcagcgggagttgcaggagctgcagaccatcaagcaccatgtgctgcagcagcagcaagaggaacgccaggctcaatttgcactgcagcgggaacagctagcgcagcagcgtctgcagctggagcagatccagcagctgcagcagcagctgcagcagcagctagaggagcagaagcagcggcagaaggctccctttcctgcagcctgtgaggcacctggccgagggcctcccctagcggctgctgagttggcccagaatggccagtattggcccccccttacacatgcagccttcattgccatggcagggcctgaaggacttgggcagcctcgtgagcctgtgctgcaccggggtctccccagctctgcctcagacatgtcactgcaaacggaggagcagtgggaggccagccgtagtggcatcaagaagcggcactccatgccacgcctgcgggatgcctgtgagctagagtctgggactgagccctgtgtggtcaggaggattgccgacagcagcgtgcagacagacgatgaggatggggagagccgctacctcttgagtcggcgacgccgggcacggcggagtgctgactgcagtgtgcagacggacgacgaagacagtgctgagtgggagcagccagtgcgccgccgcaggtctcgtcttccccgccactcagactcaggctctgacagcaagcacgatgccactgcctcatcatccagtgctgctgccactgtgagggccatgagcagcgtgggcatccagaccatcagtgactgctccgtgcagacggagcctgaccagctgcccagggtctctccagccatccacatcacagctgccaccgatcccaaggtggagatcgtcaggtacatatcggcgccagagaagactgggcgtggggagagcctggcctgccagacggagccagatgggcaggcccagggtgtagccgggccgcagcttgtagggccaactgccatcagcccctacctgcctggcatccagatcgtcaccccagggcctctgggcagatttgaaaaaaagaagccagatcccctggagattgggtaccaggcccacctgcctccggagtctctctcacagcttgtgagccgccagcctcccaagtcccctcaggtcctctactcaccagtctcacccctgtcccctcaccggctcctggacacctcctttgcttccagtgagaggctgaacaaagctcacgtgagtccccagaagcacttcacggctgacagcgctctccgccagcagacgctgcctcgccccatgaagaccctgcagcggtccctgtctgaccctaagcccctcagccccaccgccgaagagtctgccaaagagagattctccctctaccagcaccaggggggactgggtagccaggtatgggaacaggggctgttccagggtgggacaggggtctctgcctagcccgaggggcccccacagggaggggcttcttctggggtgggagtagaggcatctctggccccagaggcccaggggaaagagtcaatgagcagatgctccctggtgcacatctgaaagagcctgcagcccggcagacagcctggcagatacagacacacacatgggcccccacagccttccagccacataccctactagaagcttcagcctcctcccagcactgtcccttcaccacccacacctggtccagcccctgctacctccccctttaggcctcttcagctctcacttctagtctggaccccttccactccaaacttaatctatgggtgtttcctaagaaaatcagtcatatgaacctggcgcggctgctctcgtcctctcagtcctggcctggtttccattgccacacaggaagcccacacccctatggcctagcactagaggcccatcccagcgggctgcagtgtgctctctgccccagggtgttctctgcccctacctggccctcggtaaatctgtttacacatctgtctgctcccctagataggggattcagaagcataagcttacccttggttgtggctttatttgccagtgatggatggggactgtgagaagtggcttggctgtgggctgcagccaaagtgagaatagagggttgtgagggcctaatgccaacaactgagtgccaggctgaggaggatgggcttttcctaaagaccctggaagcctctggaggttttaggcatgtgagatgggacaaagcagatgttttggaaagtttcctgggcagaatgtgggagggtgggctgaaggaagagacctggcagaggaggcaggagccagaggcatcgtaaggtagatttgcccattttcagggtgtgacacagagacgagaaaagtggagccttagaatggggtttgtggaggtgataatcttgggtagtgaagtsttggtgtatgcaggccatataggggtgtgggtgggatcaggactctaggctggcagggagggcaggtcagagaggcagggtggtcctggctgcaggcacagaggtcccatgggctggccatgtgagaccaggccatgataggcactcatgatgcgtggccaaartaagaaaagagacaacagagtgaggggttcaaaaggctaaatttattccataaaaggcccaccctgaaattttgagggcacactataatttttattatgacatatggtggatgtaggtgggaggtttttaggtagttacttggcaaggtaaaaagtaagaatcctataggagtcacttcccagtatatattggaatttgggtggtccatgaaacccaagggcatggggcattctgggaaggctaggagcgagagaaaaagggagaagacagagtgaactaccaggcaatgtggaccttcaggcaatgcagagtgtctagggtaggcaaggaggaccccatggtaggcactgttagggaaccttgaccaggaagccatgctgctggaggtagggctggataggacttacgggtgcactggtggctccagagaacagcaggttgaccgagggacatggagggagctggggaccaggccaagagcacagcccagagggtttggcagagggcagtgcagggcactagaggaagagggtgggcaggcagctgaggagccttccactttagagaggactagggcaggatgcagaatgactcagagcctgccacgattggcatacaatctacatgtgtcccttcccatgatcctctagggagcctggcgggcccaggaccctctccactccatgcctcctgttcatactccactgatctcaacccctgtcagctgctaggccccaaacccagagccacagctgtactcttcttacctcaatgtgaggcagagggtggcaggcccattggagatgtgcaggggttctcaaagccatgtgctgggccagtacaggacattggcatgaagggaatctgcccgtaccctcctgcttcccaaagctctgggaaagagaagggctgtaaaataatcacagatcttccctctatggcaaagaaaccaaggcctatgggtgggcagggtaggcctccaggctgcctggtaaatcagggcaccagcaagatggaacccagctccttccccagcccaggcctgggttctgccaccccacaccccatcaagtcaccacaccttgggtctcagtgctgcccacccttccctctgtctcaggtgtcggcgttgccacccaacagcctggtccgcaaggtgaagcggacactgcccagcccccctccagaggaggctcaccttcccctggctggccaggcctccccacagctgtatgcagccagcctgctgcagcgagggctgacggggcccaccactgtccctgctaccaaggccagcctgctccgggagctggaccgggacctgcggctggtggagcatgagtccaccaaactgcgcaagaagcaggcagagctggatgaggaggagaaggagattgacgccaagctcaagtacctggagttgggtatcacacaacgcaaagagtctttggccaaagaccggggtggccgtgactacccacccttgcgtggtcttggcgagcatcgtgactacctatcggacagtgagctcaaccagctgcggctccagggctgcaccactcccgctggccagtttgtggacttccctgccactgccgctgctcctgccaccccctctggtcccactgccttccagcagccccgcttccagcctccagccccacagtattctgcaggcagtggtgggccaactcagaacggattcccagcccaccaggcccccacctaccctggccccagcacgtacccagctcctgcctttcctcctggtgccagttacccagctgagcctggcctgccaaaccagcaggctttccgccccacaggccactatgcaggccaaacacccatgccaaccacacagagcaccctttttccagtccccgctgatagccgtgccccactgcagaagccacgccagacatcgctagccgacttggagcagaaggtgcccaccaactatgaggtgatcgccagccccgttgtgcccatgtcttcagccccatctgaaaccagctacagtggcccagcagtgagcagcggctatgagcagggcaaggtccctgaggtgccccgggctggtgaccgtggcagtgtgagccagagcccagcccccacctacccctctgactcacactataccagtctggagcagaacgttcctcgaaactacgtaatgattgatgacatcagtgaactgaccaaggacagcacctctactgctcctgatagccaacggctggagcccctggggccaggcagcagtgggcgtccagggaaggagcctggagaaccaggtgtccttgacgggcccacactgccctgctgctatgccagaggagaagaggaatctgaggaggactcatacgatccccgcgggaagggtggccacctccggagcatggagagcaatggtcgaccagccagtacccactactatggtgacagtgactacaggcatggggctcgagtagagaagtatggtccagggcccatggggcccaagcatccctccaagagcctggctccagctgccatctcctcaaagcgcagcaagcaccggaagcagggcatggagcaaaagatatccaagttctcgcctattgaagaggccaaagacgtagagtcagacctggcgtcctaccccccacctgcagtcagcagcagcctggtctctcggggcaggaagttccaggatgaaatcacctatgggctcaagaagaaygtgtatgagcagcaaaaatactatgggatgtccagccgggacgcagtggaggacgaccgcatttatggcgggagcagccggtcccgggcaccttctgcatacagtggggagaagctgtccagccacgacttcagtggctggggcaaggggtacgaaagggaacgggaggctgtggagcgacttcaaaaagcgggccccaagccctcatccctaagtatggcccacagccgggtacgaccccccatgcggagccaggcctctgaagaggagagccccgtcagtcctttggggaggccccgccctgccggagggcccctccctcccggcggggatacctgcccacagttctgctccagccactccatgcctgatgtccaggaacatgtcaaggacggacctcrggcccacgcatataagcgtgaggagggctacatcctggatgattcccattgcgtggtttccgacagcgaaggtaatggcagccaggggtgatttctgcggatactcagcagctggggggcctgcctacctgtggggccctgggccctaagatgtcccagcagggtctggtctggcgcctcatctggtgggccctgctgcaggcaggctgcccttgcctgctccatctgtgccctggtccgtggttgcgggagggtgggctgggggcctgctgatctgcttgtggctgtggcacccactctcttggtttctttgcatggcttcagctaggcctccccctgcggctagcccgggggttgatggtattctgtttttggtctctgaagcgtatcacctgggccaggaggagacggactggtttgataagccccgggatgcccgctctgaccggttcaggcaccacgggggccatgcagtttcctcctcctcccagaagcgaggccctgccaggcacagctaccatgactacgatgaaccccctgaggagggcctgtggcctcatgatgagggtggcccaggccgccatgcctcagccaaggaacaccggcacggtgaccacgggcggcactcaggccgccacactggtgaggagccgggacggcgtgctgccaaaccacacgctcgggacctgggtcgccatgaggcccggccccactctcagcccagctctgctccagctatgccgaagaagggtcagcctgggtatcccagctctgctgagtactcacagccatcccgtgcttcatccgcataccatcatgcctctgacagcaagaagggctcccggcaagcccactccgggcccgctgcactgcagtcaaaggcagaaccccaggcgcagccgcagctgcaaggtcggcaggcagctccaggaccacagcagtcacagtcaccatcatccaggcaaataccctctggggcagcatcacgccagccacasacacagcagcagcagcaaggtcttgggctgcagcccccacagcaggctctgacacaggctcggctgcagcaacagagccagccaaccacccggggctcagcccctgctgccagccagcctgcagggaagcctcagccaggccccagcacagccacaggtcctcaaccagcaggaccggtaagcagagctcccatgcatgggttgtaaccagggaagatgctatgaatgaagcttggacatccccttggttccaggctgggcatgggcagaatcttagctataggttctgtgttgcagccacgggcagaacagacaaatggctctaaagggacagccaaagcaccgcaacaggggagggctcctcaggcccagccarcaccaggacctggacctgcaggtgagcctatcctttgacacccttggctgtggcccagagcacccaggctgttctctctctataccacctgtgccctgagctcccccacactgcatgccctcactaatccctgagaaggtgccccaggggctgtagacctccccagcagaaaacaagcctggggttagaataagccaatgaggtcaccagcacaggggctttagggcccaagcagctttgggcagagaagcaggaaggcactggtgagcacagggtggggaccatggcttcttgctccctccttccttcccctttcctgctcttctctgcctttttttccctttcttcttctttccctycctcaacctccttttttctgccttctcccaccccttgtcttcctgttcttaccttcttctctttatttccctagcctccttctcaccttcccaccttatagggtacctgtgttcagattctctcgtgggtacttgccctcttagaccctaaagagccaggccgtgcatagctcattatggcgatttctttcctcctaggtgtgaaggctggagccaggcctggaggaaccccaggggctcccgccggccagccaggtgccgatggggagagcgtgttctccaagatcctccctggcggggcagccgagcaagctggcaaactgacrgaaggtatgcactgcctgcaactggtctgtggtgggtggctactctggtacaggctgggtctgtgagatgattccagactcagtcacccaggcagaggccagccagagagcccacctgctgatgcccagttgttctccgggcaatctctgccccttgggctgagcttgccttcactatgccaagtggccctgactgggaggggtctggcccaatttcctgatggctctctcctctttctttgtcacagctgtctctgcttttggcaaaaaattttcctcattctggtgaccatgcccagcatggtgagtacaagcagcctgtaccttgcctcttctgggaaaggcccgaggcactgggggtgggggtggggctctaagtccgaaggggtcctctgggaggagtccagtcttcggctggttcagtacccagagctgcaatgttcccttctctgaatgtgggaggagaaaaaggagggacactgtgcacagagcccctaccayggggccaacacagtaggggtccccagcaaaggaggggccaaagccagggccagtgccctggctttcaaaccatctgccatcccctgcagggctctcacagcactgggctggcactgggttgtaggtaggcctccagggatgcaactcctctccagccctcctctaaatgctccacaggctcttgaagaaatgaagagaggtatcattgctgtggaaaaatctctggagtcagaggcctgggcgcagctctggactctgcgtataacagtgagtgtcaggatcagggtgagatgggccggaggaggggtgaagggccaaggcctggctgatgacagctagccagttctgacaagtgtgaactgggaagggcctgttgggtttccttcagctgcgatgggcccagcagccctctaccccgcagaggcaggggccacagagctgcctgagatggtgccagacaagtcaggtggcacccttggagaagagcccagcacggctaactgcacctcacaacttgaagtctatgtgctgggcactgagttcaaagtcatcctgaaggacctggtagtctgtggcacctgtaggggaacatgcttcttccctgatgtctgctgctggtgcctttgctccagccacttggaagagattagagtccccaaaccccacagagtcacatctgcagctctgggaatgaagtcaaaacactcctggcttcacaggctgagcttgtggcccacaggatagaagagtggaaggagtagagaggcagacaggaagggacatagaggaaagggagtctcagccccagactaagtcagctcagggagagggcagaagggcctcaggatgggagccctcaccctgtctgggctgcagtggccaaggcaggttgggacaccacttcctggagcctgtcctggccctggccctggccctggccttggccctgcctctgtgggaggaggaggaagtgcatcatcctgggtgggaggagaatcacctggctgttggtacagctctgtgcacagccaggaccactgaccatcatcccatagccctcggaccctcctcttctccctccttgccccttcagggtgcttctcacggtgcacaagcatgtatgtgttatccatggcggggcctggckgtcagtgagcaggtcacttcaagggagccctggggctggcagatgctgggcccgggccagcactggttgtgggagggaaggagctaggtgtgatacctcacaggctacctttctctggaaaagcagtggggccctggaaaggcccaggcttccgtccatttattcaacaaatgtttgtcaagccccaggtatgtgccaggcactcttccaggatctggggatatggcagagaacaaaaccaagtccctgccctctgaagctgacaatccattaaaggagatagagaataaataagtttaaaaataaaattcaattaaaaaggtactttctgaaagtgatgagtgttataaagccagagaagcagagctatggaagcagtggggtctgctctagacaaagtgctcagagcagaagatatgtgagggaagcttgagggaggaggacgrctgcggtgggatgaaaaaaggggagggaacagcactgacggatgatcggatgctgggatgggaccagggacagggcaaaggccagtatagccagggccacagtggaggggagaggtggtcaggggtaaagtccaagggggtgggagccagctggggtgggttgtgcaggccaagtaaggagcctggaatttattctaattacagtagccatagtgcagcccttagcgttcttcctgccttcaccctcccacagcgggcttcctgcggcttcccgctcagctgatgtttccttggagttgccctggaacagatgtgaaatcacaagtggtgctgaaagtgggggaaggagggacagcccatggcctggattcatgacagtacctaccttgggtttggggccagggtatggctcctgagcagggaaaggaagcacagacacagctttgttctgcgtcctgccacatggtgtggttgggccactgagaccactgactttatagttaaagaaatctcccttgagttctagcattcggctaatgattgggtcaagtggacagtgctgccgtgagtatccctctcctgaaattctttacggcaatttcagagatgggcttggagaggtttgccatttcaaaccaaatcccttctccawcactcttaagccaaaaaaaaaaaaaaaaaaggaacttttgttacattaaaagaagtgtcccttcctggctgacctgattcttctttcttgctgtcctctctgtgacctccaacctgcccaagcacccatctccccaagcctgagtggcatggcaccccgtgggtgaggaggtggccgctagcacaggcagatggctgagaggaatgtgagggtgagaagcagctatctacaattcttgacagaatcctttcttttctyctttccttcctccctccctccttttctctttcaagcatctacaatctggcaaacccttggcccaaagactcaccaggtgggacgtggcaggcaggcctcagttgaggacgtgatgttttctcacagcagctgcctgggtgaagcatctgctggacaagtcggaccactggccaggggacctttgattgtctttccagagatgctgctctctgcagggcaccaccttcaaggcacagcccttgttgggagggagaaccctctccagaaaccctgccaccatggtgtcttgccgtacttcccacagccgcctttttgcggcctggccggccaggcttcccgtgcgttatacacagagtttgggcacacactgccctccctccgagatgccagaagtttttccacagccttggagaggggctttgactgagggctgggggccctgggctccgtttccttcacattccagctggcccggatccctctgtggcacagggccctgcccgtcacatgccctctgggtgacawcggagcagacctccatgtggccaggggttgggagaactttacaaacattaggacctaacactgtctcatcgctgaaataagaggccatagcaccgaaaagcagcgtgggcgccggctgaggcttctcccagcccgtgggtggcagcgtgctagcacactgccaccatctcaaagccatccccctagccatcgtgagcatcccagcggcaccgccattgtctcaaccagccggctcctcgtctgtacacctggggatttcttttgatttcaagaacagccttaatcattccagtttgatttacgtgtatacctcataaacatttttcttttgtttctctctccccctttctctcttctcttggctcactcccttgcctctccccctccaccaccaccttgtgactgatggtttggtttcctctctgctctgcccctgctcagcacagggagaatgttgacttagaagcaatagsgggcagcaggccaccaagagcacaaccccagggcgaggtctggggaggcctcccagcccgcctctgtttactgtgcaattccagtcgttcttaagccatcaccagtgggtgtactcagagcagaggggccaggacttctgccagccaagggaaaggcccagagccctgtgcgggggaatgtggcactgtctatccatccggtggactgggcagcattcctccccagggctcttcccttgggggcctcctttcatctggggcacagccacaagtctcatctctaacgttctatgcaatgaaatataaaccctcaatgacaactgttaatatttaataaattccatgttatgtataaggagttaattgcaaacatgcaattgagaaactggatagatacactcataaaacccccacccctccccaccccacccctgctcccattgtgtgtgtgaaattctcagtctgtggcatgtttgacctgtggcaggactcgctgctgccaggtgagtcaccgcctgtcctgcagtggagcatgcacagctcgcagcctctttgcacgatttcatccattttaaatgcttgaccctcttgcttggagttctttttgcctcagaacctctccttcaggagcacttctagctgacttctgcacaagctagtgaggacctgccagaattgttgcctgagcgtgccaggctgcagggcaggcagtaraaggcccccacataccctgcagttttctctgtccaggayagcaggtaaaaaggaatccccagagcagacgcaatggtaggagcctgcacaggatgtgtgtgtatggacattctgaaggtttgctgtaggatatctgtctgtctgtcattttcccttcctaccccaaccctgagccagaggcatctgacagccctttcccagagggcaccacgcaagggcagagctgggcggcatccacagccagagaggcagaggcaagagcagagccaggctgtgcccgagggaccccagctcttgactgcacctgtttcatgcctctcctctgtggctaggaggctcaaaggactgtgagccaggagatctgggctggagctagggggtcaatggatgctcaggaagagctgggcctttggcacttgtggtgagaacagttgacagtggtcatctggaactgttcatataaacagtggcttcaagctaagtttcttgtgaagtttctcaatagcaaatcttacagaaggtcctgtgtgaccctctctgcatctgtccccaggacctatgctccctgctcacccccttctccaaagcccaagcgtcccgctgctcatcagcttttttaccattgagccaggagtgcggcaggcagtacctgcctgacccttcaaggcctgaccttcgtccagagtgctctggtttgcaccatgcatttctcaggggtccgcatttctcatgcttttctataagatctacacaccccttcagagagggctcctcgctcacctctggtagctatggatgggacaggaagctgccaacctttgtgttggacttaacacccttgcctttctgggacttggcctcaccccacccatggaatacctgcctcatcccaaagatcaggtatgggctgaatgcagccatctgagcaagggctgagggaagccatcatctaacacctctggccacccaggaccaggtctgtgtggggatgtgccttggagaccaaggcaatagtcctttccactacaggccaggggatgggacaagaagtagggaacaggcagggaaatgttaggaggtcagcctccagcaggcctagtctcaggctctaaagtactgacttttcagcaaatttcctttctggccaagccctctgagtttgaaattctgacatctgccactcctcatcccccactgtacccacaggatacatcatcgcccctctgtgaaggtggctggagcaggcctctggtccatggactgtccttcctggcccttgcatggatgcagttgtgactctggggacaatgcagccagaagctgagggaccagcacttggtgccttggaaagtagagagcaacagacacatctccaaatgggcaaggagtctctagcatgcagcccaggccttctccatacccctctccccagcatcatgagcaagggcattgcctcctctctctgctcacttcagggcccagtgcactcacttcacagtgacagccctcccctacaatccttgggcagagcatgtggtctgagggcccacagtgaaagaacagcagtggtggcaactatgccttgccttctggagcctgtagggagttttccaggcaggtcctttgccaggacagcatggtcctgccctgttgtcccgtctgctctcctcttacccacccccatgctgtaaatacttgtcatcatggactccaacagggttagagggacaggcctaatcaactgaaactcctcggagatgccatctctgtctccctgggtgccagcagccctgctgccatgtkcactggggtggcactggagagccatggcagtcgtgagatattgtatgtgtatgcacatgatcatgtgtgtatgtgcgtgcgtgcgtgtgtgtgtgtgtgtgtgtgtttctgcctcattcagtttctggggtcaaatcagctccttctctccaagtgcactaccctggagagtggtggccactcaataccttttcctctagctttcatgtcttgtttttgctttccccttcctcctccctctctccctttctttccttctctcctyctttatttgaggggggaagagtgctgtacaaagtcaaacaaacaagtttacagttgtaagtgcaatgacccgagtcctccacatgaccttgtgaattgtgtgctgtccttctgtgctctgtgagaactcgtggtacttcagtgtccctccccctgtattgtgacaaggtaattctgtggtatcagaataaaaggacttgatataaacaacctacagactgtttctgggatggtttctcaagtgggaaggcttagctgaaggagcaaatccccaaatttgcgacaatcctgtccatggttaaagggaaaaggatggacaaagttgcagaagtgctggcacagcacggggctgagtccacaccaagccatccaaagacaatgggccctccacaaaggtgcccaaggggaggtcccaagcttggacctggagcaggcagtcagtgcgcaggctgttgagggacagcacctccatggccttcaggtgtgttggctgcatacacagctttctgggacctggttccagggaggcagtgaacaagtgctgccccctggtgctgccaacaagccctacacctctctgccttgctccgaattttccaacccccaaactctcaccggctgccagaccttaggccttcctcagatggtcaggagtacctccttaccgaagtcacccagagttgctagaccttttttttttttttttttttttttaacacagataaacaggaatcccagcttcacctctggccctctccccagaattaacattttgatgcgtgtccttctttcctgtttgttgttccagtcttcattttaaacagaagccagaaggtgcaatatatcctgttttctagctttctgtttatttccacgtttatttcaggtacttaaatgttcgtcttccagtgctcaacctccagagagatacaccattagttcatagccagtctaccacacacaatctaaggaacaggcactatgttcccagtgttcctattataaacaatgcttgatgaacatcctattttccaatctttccacccaaattggtggctggggccactcattctactcctgtttctggccttgatacagtcctgtacatactgacaaatgcagtggcgtcagaaagttgggactctttttttttttttttcttgagacggagtttcactcttgttgcccaggctggagtgcagtggcatgatctcggctcactgcaacctccacttcccaggttcaagcgattctcctgcctcagcctcccgagtagctgggattacaggcgcgtgccacccagcccggctaatttttgtatttttagtagagacagggtttctccatgttggccaagctgatcccgaactcctggcctcaggtgatccacccgcctcagcctcccaaagtgctaggattataggcgtgagccaccgcgcctggcacttttttttttttttttttaagatggactctggctgtcgcccaggatggagtgcagtggcgcgatctcggctcactgcaagctccgcctcccgggttcacaccattctcctgcctcagcctcccgagtaactgggactacaggcgcctgccaccatgcccagctaattttttgtatttttagtagagacagggtttcaccgtgttagccaggatggtctcgatctcctgagctcgtgatccgcccgcctcggccttccaaagtgctgggattacaggcgtgagccaccgcgcccggccggcactttttttttttttttttttttttttttacttaactagttatcttgagtaagtaatgatgcggctgatgggaaaggggaagctacaggccagacaagtggactctcaatcacaagcacgccatggagcagggagccagggccctgaatgtggaagaccagccagactcaggtatatggagggaacatccttactgtccagcctctcctgatctctgttggcaccttagcccagccaatcctgtaccacgtgcacagggaacctgcctgcctaggttttttccacaggaagctccctggtcctgggtggagtctgagcccaccaggcctttcacacccaagagctcagggtgaggcctggggaggaaggcagggacccaccagctcacggtccccaacaaggtgccactgagaaggctgggtaaaggctgcggggatagatagctcttgcggcaggcctggcgactgataagtccgggcagcaccctaagagttggcacccgcccctctgccccgcaccccagggctttgcttcgcgccctccgcccggaccctggcccttctcttcttcgtctgcgtggaactccctccagggcagggcctggcactgtgtagtgaatgtcggcctcgtggtggacccgaaggaaccctacagtcagccccagagccgcgggagatccacgctgcggccggctccgccccgcccaaccctcaccctcacgctcacgctcacgctcacgctcacgctcacgctcacaggctcccggctccacattcctcgcagggctccaatccggacccgcccgccttgcccttcatcctcaaagactcattggtcccattcccctcgggccccgcccttcgcgtgcttgggccatgcccgtccgaccgcgctgcttccgccttgcagcaccccctcaaccccttctctcgtaggcccttctaccctccccgaagccgggctcccgggttccgcttccacagggccgccccctctcctccgagatccaacgcctcgcccctcggtaagaggcccaggactcagcccacggccccgccccccacttggctagtccgcccctggcgagacccctgctctcacccacccaggacttctcgctcccaggccgggtcctctcaccgtcaaggcccgccccctgccaacggtcctcacccattagccgaaggccccgcccctcacagattgccgcagggcaggggcggagacagcccgggccgtcccaggctccgcccccggaagcctcacttccgggcgcgagcacgccccgcctcgccccggcggcagagaggagactatggaacgtcaggtgagggctcggcccgcggtccccgtggtccctgcagcccgggccgggcctgaccctggtgtgtcccctgcgcaggtgctgctgagcgagcccgaggaggcggcggctctgtatcggggccttagccgccagcccgcgctgagcgccgcctgcctgggcccggaggtcaccacgcagtacggcggccaataccggacggtgcacactggtgtgtgtgcgaaggggaactggctggcgacggggtcgcgcactggggtgggaaggaagggggtgtggagggctcgctgcttgacagtgcgtaagggtatatagggagccggcctggacttggaggttacactcccacaggtccctgcacacaggtgtgtggagggggggagggggcgtgcggggcgttatcgaatggcggccatgagtgcacgagatgacggcgtaggggtagaagtcaaacctgggctcagggcgtggaccttgtagggctctccaccaacacgccatcccatacacatgccaggctgccctcaagattccagggtggatgctggggttactagggggttctctcaaagaggctgtcagctcaggctctggaggcctggactagggttgtggccaagtgttgtccagcctgcagccagggtgtcagtgtctggagacagattgagagattggggaagatagatctaggccttcctgggtcaggtggggctgggggcagtagccaggagtagccaagacaaggtgagcagtctcatgcctcccctcacagagtggacccagagggacctggaacgcatggagaacattcgattctgccgccaatacctggtgttccatgacggggactcagtggtgtttgcaggacctgcaggcaacagtgtggagacccggggggagtaagtttgagggaggaagcttgtgggcaaggccacagccgtccgcaatgcaagccttttatgaatgctcaccatgtgcctagaagggaggccagcagccaggttcttgcccccttgggagctcattcagtttctggtgacatggcctgataagcactggaagcttgctccaaactcagcctggactagagcccatggtggcctggggagttgcagagagtagagtctctgcctcagggaggaaaggcaaggtggggctagaggtgctccagaagctggtgtggggccagagcctcaagaatctctcctaagaggtgtgcccagtagggagcaggaaggggttattgcaagataatcctgacctgtgctaccccatgtccacagactgctgagcagagagtctccttcaggcaccatgaaagctgtgctgcgcaaggctggaggcacgggccctggggaagagaagcagttcctggaggtgagtctgcatgggaccaggtagtgggtgacaagagagaggctctgccccacagataaggctctgttagcgggcaaacagcctaatgcccagatgtcctcaggtctgggagaagaaccggaagctcaagagcttcaacctgtcagcgctggagaaacatgggcctgtttatgaggatggtgaggcatctggctggtgagcaggcagggtggacaggaggggtagccgtagccctgggccccccctgattggccctccctgcacccagactgctttggctgcctgtcctggtcgcactcggagacacacttgttgtatgtggcagagaagaagcgccccaaggccgagtccttctttcagaccaaagccttggacgtcagtgccagcgatgatgagatagccaggctgaagaagccagaccaagccatcaaggtgctcgtggtcaatccacgaaggcccggcagggcagccctggggctcagtgtgctcccttcccatactgtgcctgtcagacctggggaggcactagcttctaggaagcagagcaggtcctatagacaggctgggcattgagtatcttgtgttctcagggggatcagtttgtgttttatgaagactggggagaaaacatggtttccaaaagcatccctgtgctctgcgtgctggatgtcgagagtggcaacatctctgtgcttgagggggtccctgagaatgtgtcccctggacaggtcagcagcaacagcctgtgtcccccctggagtctgggacccttcttgagctaccaccccttgctcactcctgccctttgatcctgtttacaggcattttgggcccctggagatgctggtgtggtgtttgtgggctggtggcatgagcccttccggttgggcatccgcttttgcaccaatcgcaggtgagggagtggggcaaggcaaggggccttgcagcccagctggccttgagactgagtgtctgtctcgtggttccaggtcagccctgtattatgtggacctcatcggggggaagtgtggtaagtggctgatgcccacctgtgctttgctgacacatgttggccctgccagcctgcgtgatgctcatgtttccatctggcccagagctcctctcggatgactccctggctgtctcttctccccggctgagcccagaccaatgtcgcattgtctacctgcagtacccatctctgatcccccatcaccaatgcagccagctgtgcctggtgagctggaggtggcagggatgggagggtggtcagcaagaagatgggatggtggatgagagctgaagggccagtatcatctccccataggccctcagtaggtgcccttctgtcctcaatgcagcagcggtgtgagttctgcctgtcctctcaaggagggcctagaggttgagagtgctgccatggagagctttgcactgttggggcattccaccttgagagaatgctcgtctgcaagaatgctcctccccttggctctcaactgcatgtagccaggctctgcaaggggctgggatatagtggggagttacacaatcccagaccctccccaggaagagctctgggcccctggtaaaagtcagagggacatgcctatctgaggccccttgggcatctggtccaggtcaccagaaaagagatacatcaggcttattccagttcccccatctcctggggctacctgaggcaaaaggggataggcacagggcactgtgccctaagggaactgcctgtcccctactggacct

SEQ ID NO: 97146 - DNA, 15346 bp, Homo sapiens
gaatgcaaatttaagaaaatactcaccacatcctttaggagacttagaaaggcctactaaggcctttcttacaggtatccttaacatattgctaaaaataaaacaaagaattatattattgtagggaaaaaaacaatcaccaactgtttggtaatgttttatggctttaaattatttcacatacattatgtcattgaacactcataggttctgatattttcacttagtctgtagatgagaattctcagtctcagagatactgacttgtacaatgtcaaagagctaagcagcagcagctattgtatacatttggactttctaattctatgcagagagcagttttgccatttaaaaaaaaatgacatagaaaggatcaaacttaaagcactaccacacagtaaaataaactgcaagactaacagtgagcttatcattaatggttatgtaaaataaagttgtcttttctgcttttatttcctaccaatacccattctatcatttcatgttctaagcatagctgtctactaaatgttcctgagatattctgagatagctcaccagcccaagcctttgaggtgtcttgattgctattttctggtacacttatcttacagatttccaattatgtgtttataagcccgttctgccctcactgcattaattccttgaatttttctatcttcagtacctatccaccaggctggcacagagtaagctcttaaacaatggctctcaactgaggacaattttgctccccagggaatatttagcaatgtctgaacacactgttgtcacaaacaaggggaagttactgacatctagtgggtagaggacaaggtgctggctattctacaatgtacaggacagtcccccacaataaagataattatccaaagtgtcaacagtgctgaagttgagacactgctctaaaaggcttgctgaattactgaaataaatgggtgtcgattatataaacaccacgacttaaagacacacaaaacagaaaagttaccaaaacttctttttatttgtttttgtttgtttgtttctgagatggagtctcgccctatcacccagactggagtgcactggtgcaatctcggctcactgcaacctccaccgcccggattaaagcaattctcctgcctcagcctcctgaagagctgggattacaggcacccgccaccacacccgactaattttttgtatctttagtagagacagggtttcaccatgttggccaggctggtctcgaactcctgacttcatgatccgcccaccttgacctcccaaagtgttggggttaaggcgtgagccaccgtgcccggccctttttttttttttttttttttgagatagagtcttactctgttgcccaggctggagtgagtgcagtggcacgatctcagctcattgtaacctctgcctcctgggttcaagcgattctcctgcctcagcctccagagtagctgagactacaggcatgcacaaccatgccaggctaatttttgtatttttattatttatttattttatttatttattgagacggagtcccgctctgttgcccaggctggagtgctgtggcgcgatctcagctcactgcaacctccgcctcccaggttcaagcgattctcctgccttggcttcctgagtaaccgggacaggtgtgtaccaccatgccaggctaattttttgtatttttagtagagacggggtttcatcgtgttagccatgatggtctccatctcctgacctcatgatccagtcagctcagcctcccaaagtgctgggattacaggagtgagccactgtgcccagcctatttatttatttttgaggcaggggtcttgctgtcacccagtctcactctgtcacccaggagtgcagtggcaagatctcggctcactgcaacctccacctcccaggttcaagcaattctcagcctcccgagtagttgggattacaggcgcccatcaacatgcccggcaaatttttgtatttttagtagagacagggtttcgccacgttggccaagctggtcctgaagtcctgatctcaggtgatccacctgccttggcctcccaaagtgctgggattacaggtgtgagccaatacgcctggccaatttttttattttttagtagagatggggtttcgccatgttggccaggctggtctcaaactccggacctcaggtgatccacctgccttggcctcccaaagtgctaggattacaggcgtgagccaccacgcccggccaagtcaccaaaacttctaaactttttgagttttttttttttcctactcacttgatcatataggctaagcactgaactttccttctattcacttgatcatataggttgagcatccaaaatcatttggaacttttaaaggtattaaaaatgcctgtaatcccagcactttgggaggctgaggcaggtggatcacgaggtcaagagatcgaaaccatcctggccaacatggtgaaaccccttctctactaaaaatacaaaaaaatagccgggcgtggtggcaggcgcctgtagtcccagctactggggaggctgaggcaggagaatggcgtgaacccgggaggcggagcttgcagtgagccaagatcacgccactgcactccagcctgggcgacagagcaacactctgtctcaaaaaaaaaaaaaaaaaaaatgcaaattggacaggagaggtggctcacgcctgtagtctcaacactttgggaggccatcacaggaagatggcttgggtctaacagttagaggccagcctgggcaacacagcatgatcccatctctaccaaaaaaaaaaaaaaattagctgggtgtggtggcatgcgcctgtggtcccagcttcacaggaggctgacctgggagcatggcttgagcccaggtgttcaaggttacagtgagctacaatcatgccactgcactccagcctgggtgacagaataagaccctgtctcaaaaaaaaaagaaaaaaggcaaattatgtgattagaacgtattaaaaaatttcaacattaaagtttcaatagttgcaatagtattattgaataatagtacatatacataggttttaagcacaaaattctgcatacttatcatagatgatgtacaacaggaaatttcattcataaatttcattaattaagaatatgtgatactgaaattgcaaatatccaatctgtttcctgctagtgagtaatgttgggtaaatgagtttctggttctttacttatagagcaggaggaaaacaatacttcctagacaatgagctattagtaggggctcaacaaatgccagttaaagctgaattcaacttaggcaatactggccactgacaatcagtatgtgtgtgtgttttgagacagagtctcactctgtcacccaggttgtagtgcaatggtgtgatcttgactcactgcaacctccgcctcccaagttcaagcaattctcttgcctcccaagtagctgggattacaggcacctgccatcacgcccggctaatttttgtattttcagtagagaaggggtttcgccatgttggccaggctggtctcaaactcctgacctcagtgatccacccgcgtcgacctcccaacgtgttgggattacagacgtgagtcaccgcgcctggcagacaaccaattttaaagcactctttctttgagctctttttctttagtaccagtacacactgtgtagatatttttgttttacttactaaactgtaggttagtaatcaattttagtacctaccagactgtaagctccttgaggacaaggaatttggacatttcccttttttgaagacctagcacaggacccttatgaaaataaccaccaaacagtcttatcaccaagttctagaactagagtagcatctgtcctattaaaaactactgatggcataaatataaacctaaacttactccattagagcactgacagatttgaaatcaacaatcagtatttcatacaattttaaaactttaatacttttttatctccaatgcaatataaaaatagtactcactttggataggaaatcaactagaactagactgttgacatccagcaacaaagcatagcccaacataagaaatacagatttgcaacacttcgatatgtgctttgaacattgatatgccaagtagcaatagaaataattatctctttggatggaaaatgttaatgactaatcatttcttaaactagactggatacttttccatatagggactatgctattccacgttctccaacatggatccatccatttacttcttgccttccaaggtaccaccctatcccaatccaccatcactccttgcctggagtatttcaatagcttcttttttttttttttttttttgagacagagtctcgctctgtcgcccaggctggagtgcagcggagcgatctcggctcactgcaagccccgccacccgggttcacgccagcctcctgcctcagcctcccaagtagctggactacaggcgcccgccaccacgcccagctaattttttgtatttttagtagagacagggtttcaccgtgttagccaggatggtctcgatctcctggcctcgtgatccgcccgcctcggcctcccaaagtggtgggattacaggagtgagccaccgcctccggccttcaatagcttaacaggtcaccaagcttccacactattcccacacagcctctcccctcttgccaccggctgtgacctcagactgaaatgctcttccctggcccctccttatccttcaaatcttggcttaaaagccttttctcagtttcattgaccaggctatctaacatttacgattcccccagcatatcatccattttattcttctttacggactcatttctggctcgtagtaaatgttcaataacggttaagtgaactgaatctctaatttctggtcgttaatttgtagagaccactttcccggatttaaaaagtgcaggtgctctggcagccttaagtcggtgaaaacaagaatattccgcaaaacaaaaataacttgtttattcatcaaaaacagttaacgttacacttctataccgtcaattcgtgtgtgaacagagttgtgtctgatccaagaccttacagttcaagcactggatcccaataacctgtaaacaacgttttgttatttgcaatgcaatcctgggctaacttttcaaaagtcgtttttctcaatttcccgttagttaaaggaataaaaaaatgctgtccaacgtggtcaatggaccaaacaaacaaggacaacaaacagaagcgtgagccattgctaacacaacagcgaccaaacaatcatgcactgtatcaggcgtgtaaaaatctggggggaaaggcttagtcttaaggcctaagtcatcggacactggtcctctcccggggaataaaacggcctcctcctctgagagggaaatgtcctgaattttccctgcagagggaaggtcacctgcaagcctacattcgtgacagcgttcccgaggaccccctgatcctcatcttcttttctgcttcatcagaccagagaccgtggctaaaagccccccatctgccggctctcaggggcttccgaggcggcggggcgggaggcggcgcccagtcaaggacaacagaagactacgtcgcgtgggccaaaggaaacagtcccgtcaataaataagcctctggccgacgcacctcacccttcccatccatacaagacctcaccttctccccggagccgcggaggctgttctgctaaactgtctggaccacgacgaccccctaggaggccgggtcgcttattcaatatggcggcctcggctaactctgtcagccgggcctggagaacggaaagcccggagggactagaatccttgcattcgacaagtttgtcggcaatttccgtcagccgaccagagggcggagctgaggtcggcccagcccggaggcgggaaggacaacttggacccgcagttccgccggaagtggccccagcctcgaggccgggcgtcttcggtcatctccggcgcttctagggctggttcccgtcatcttcgggagccgtggaggtacgaacttaagacatgcctattttattaatttacttccaaacgcaacgaaaggtccatggacaatttgtgggccatttaattcagggcccccaattcgtacgtggagaagtgggaatgcaaaagtactttgacctttaaccttcggtccggcgcggtggagggaaacgcctccgtctctatataaggaattttccggtctcttcgggtcctttttcctctcttcagcgtggggcgcccacaatttgcgcgctctctttctgctgctccccagctctcggatacagccgacaccatgggtttcggagacctgaaaagccctgccggcctccaggtgctcaacgattacctggcggacaagagctacatcgaggggtgagcggacgggctgagtcggggtggcggggaggtttctccgcccggggccggggccacgtggcgcagcgtgtcggctgccgcgggagggagggaggccgggccccggggccctttcgagagggaggggaaagcgccccgttgccgtctcccaaggccctcgtgtggggcgagcccggcctccggggagcggttcacgagcaaggaaaggttaaaatgtgctttatttacacttaattcagccaggtgtttccgcatcgctgcccagttaatacatgttaagctgtagatagagcaacgccagacattgcagtatttgaggtctacttagtggcagacatttctcaggatagcgcggtgacccaaacatatggtttgatttgaaggagctaataagaaaagaaaagcattaaagcaaccctgctggggttagtgcccactaattaatgtgatgcatacggtatttattatttattcgctggcgtttgtttttcaaaggtgtgtgtgaatgtttctgtgtccttggcaggtatgtgccatcacaagcagatgtggcagtatttgaagccgtgtccagcccaccgcctgccgacttgtgtcatgccctacgttggtataatcacatcaagtcttacgaaaaggaaaaggccaggtaaaatcayctttgtatagagctgaagaataagactgctctcgaagtttatcaggatgttcacatgacaaaactggacccaggctactttagttttgttgggatattgtaagctaaatttttctgtaaccttagaaggccaagagactgaagccctccattttttcacagaacaggtagaacatggacagcagcaattcaacttttccccacactgccctgccaatgtgcctcgaccttgacctggggggcccacctctggggtgagagggtggctcattcattcagtccttggccattcttctgaaactgccaacaagggtggaagtttggggaagtggactccagttcactaagaatggaactgagcatacttaatgaaatctcaaacagaaatgttcatactgaaagagtaaatcatagtgagtattgaaaataatgtctcacatggtactaatgcttgtcgggtgaggagttgaacatatgacagtgtttacctgggcgcatgtgaaagggtaaattatgattgcaaaagggatctagtgataagtagtgattaaaacaagttattttgtattttctggaaaaggatgttatactagctcaatagtggttgaatttaaatgtttttcaagcctgccaggagtgaagaaagctttgggcaaatatggtcctgccgatgtggaagacactacargaagtggagctacagatagtaaagatgatgatgacattgacctctttggatctgatgatgaggaggtatggcgtcttctataaagaacatatcggccaggcgcagtggctcatgcctgtaatcccagcatgttgggaggctgaggcgggtggatcacgaggtcaggagttgaagaccagcctggccaagatggtgaaaccctgtctgtactaaaaatacaaaaaaatgtggcaggcatctgtaatcccagctactcaggcggctaaggcagagaattgcttgaacctaggaagcrgaggttgcagtgagccaagatcgtgccactgcatccagcctgggygacagagcgagactccgtcycaaaaaaaaaaaaaaagaatacatcgatcagcaattgtatcaatgtggttaagccaaattgcctggatttgaatcctggctttaatttatatgcctttttcaaattctgactggttgcatgatgaataaaatcaaatcaccatctttcggctgagttcgtgatggatttgcttttttctgattaagccagtcttttttgtgatgaccccactagctttaagcagaggaacaaccagctttctgaagtggattaattttttttctttacaggaaagtgaagaagcaaagaggctaagggaagaacgtcttgcacaatatgaatcaaagaaagccaaaagtaggtcatttgtttttaacttcatttcatgttaatgtaagtaatctttttcaaagcttgaccttgaagtaatttcctccacattccttgaataggtcaatattttaaaacctgtacaggttcttccacagctactggtctgcagctgttcttatggtagcagttgtggcattcctctgtgggaaagaaactgttaacacaaacacctctttcttagcaaaacagaaagtgggtatatatgtgtgacagacacaagatgtatctgtagttttgtttggctaaggagatagtctcaaaacaaattgagatggatttgtttgtgtcttggagtagggtgaaaaaaatacaattcattatttgaataatgctgtttattgtttttagaacctgcacttgttgccaagtcttccatcttactagatgtgaaaccttgggatgatgagacagatatggcgaaattagaggagtgygtcagaagcattcaagcagacggcttagtctggggctcatgtgagtttaggctttgcctttttttttttgaaactaacatctggaatttgcctacagtttcaacctttcctacaagacttttctaactaggatttttcttaatgctctttttagctaaactagttccagtgggatacggaattaagaaacttcaaatacagtgtgtagttgaagatgataaagttggaacagatatgctggaggagcagatcactgcttttgaggactatgtgcagtccatggatgtggctgctttcaacaagatctaaaatccatcctggatcatggcatttaaataaaagattgaaagattacctttggctcttgagtatgttacataggagggtggtgtatatattcctttcattttgggggaaggaattaaatgaatatgtgattcctaaataccccaaatttggtttggcattgttgttagaaaattgcagtgcaggccaggtgtggtggttcatgcctgtaatcccagcagtttgggaggctgaagtggctggatcgagaccaggaggctgataccagcctgggcaatggggagagatcctgtctctacaaaaaatataaaaattagctggacatggtagtgcacccctgtattcccagctatttgggagactgaggtgggaggatttcttgaacccaggaggttgaaactgcagtgagccaaggttgtgcgactgcactccagcctgggtgccagagcaaggtcctgtcaaaagaaaaaaaattgtagtgcaactttacccacttgtgatgtccttagcagtgcctgatgatgtgatttgttgtaacctagcatctttgcactgggaacttgatgtgagatgtgtgacactgctagaagacacctaacccagaggagggagggcttcccagaatttggcatgacttacaactacttaacaggttacaaatttaaaataatgactcatgatgtaaagaaaccatcttttaagtgttgggaatgtgatttggagtagcactgtgtcctgggagggggattatataggtaactggttcccaggcttcccagaaaaacttgactttgctgtgaagattcataggtgctgggttgtagaggcggaatattttacttggatttggaaatctgattggttctcatgctgcaggtaaatactgggatgagggtagtatgttgagtgaagagatggtcaagtattggaaaccgtttaatcttaacagggaatttggggtctggctaacatttgatacatttttttaaatagtagttttacaaaagcagtgcttgggaattgctgatctcaaatgatcaaaaaattttaggtcaattttttttttttttttttttttgagatggagtctcactctgttgcctgggctagagtgcagtggtgtgatctcagctcactgcaacctcggcctcccaggttcaagcaattctcctgcctcagccccctgagtagctgggattacaggcatgcgccaccatgcctggctaatttttctatttttagtacatacggggcttcaccattttggtcaggctggtctcgagctcctgacctcaggtgatccacccaccttggcctcccaaagtgctgggattataggcataagccacaatgcccagcccctaggtcaattttttaatagaactatacagtgctatttcttctccatctgattttatgttgtgactgccttgactgtgggaaactatattataaggaagatttatttaacagatagatacattgaataatatctctaagcaatgtttataatccaacagcctaaaagtcatgggagacattttcaggttgtcattatcataagagccagcagagggcagcactacattttctggaaaaccagagagtttgggaataatgaaaatgccaaaagaaacacaaaaaacaaaaaaccaaaaccatgaataaacttcggtgaatggtaataaaaattcgcaattattgacatggtgaaggggttgagttccaaatagcttggccaaaatgttaactatcagcagaagtttatgatgagaaaactaatgattaataattagtttaaaggtggtcaaaaatttagaatggtcaattcaaaccacagatgtcttcagaatcctacagtgatgaatgatgaggcataccattttgaaatcttgattctacacccttgaataaaaaatattttgatggtatcttttaacttcatattttaaaaaacacatggccggatgtggtgtctcacacctgtattcccagcactttgggaggccgaggcagctggatcatgaggtcaggcgatctagaccatcctggctaacacagtgaaaccctgtctctactaaaaatacaaaaaattagccaggtgtggtggcatgcgcctgtagtcccagctacttgggaggctgaggcaggagaattgcttgaacccgggaggcagaggttgcagtgagctgagatcacgccactgcactccagcctgggcgacaaaagtgagactccatctcaaaagaaaaaaaaaaagataatataccaacagttcaaaactcaagagtatgtacaatgaagtctctcctgtcccctaggcctccagttccgctccatcaaagcagtgttaacaggttcttaggtctttgcagagccactgtaagcttatgcatagactaattgtaacacaccacatagacttttgcaccttgcattttccttttgaaaatgaacaccttggggccgggtgtggtggctcacgcctgtaatcccaacactttgggaggcctaggtgggcagatcacaaggtcaagagatccagacaatcctggccaacatggtgaaaccctgtgtctattaaaaatacaaaaattagctggccgtggtggcgcacgactgtagtcccagccacttgggaggctgaggcaggagaatcgcctgaacccgggaggcggagattgcagtgagctgagattgtaccactgcattctgtctcaaaaaaaaaaaaaaaaagagccaggcgcggtggctcatacctgtaatcccagaggtgggggatcacgaggtcaggagtttgagaccagcctggccaacatggtgaaaccctgtctctactaaaaatacaaaaaaaaaaaaaaaaaatgaacaccttggagattatgccttggatatcccattattagtacatccttatttaatagatgcataattcatgttctcatttcataattcattttctcatagttcatttagacagtctcctgttgactggattcttaggttgcttttaatgttttgttattatgggcagtgctgcagtagaaaaccctggtactcattttcttgagagccaatatattgaatgaactggtttgttttgttttgttttgtttttttgaggtggagtctcactctgttgcctgggctggagtgcagtggtgcgatctcagctccctgcaacctctgcctcccgggttcaagcgattctcctgcctcagcctcccaagtagctgggattacaggtgcctgccgctatgcccagctaattttttgtatttttagtttgatggggtttcaccatgttggccaggctggtctcaaactcctgaccttgtgataccccctcctcagcctcccaaagtgctgggattacaggcgtgagctgctgcgcctggctcatgaacttgttttaaacaaatagtctcagaaggcactggtttccaaagagatttttttttttcctgtttctggctttagagtagaaggaagcaaagataaaaaagagcccactttttttttttttgcatgccccataaatgattataatgactatgaaagtttttcttttctttttttttttttttttgagacagggtctcaatctatcatccaggctggagtgcagtggcatgatcacggctcactgcagccttgaactcctaggcttaagcaattctacctcagcctactgagtagctgggactacaggcatgtgccaccatacccagctaatttaaaaaaatttttttagagatggggtcttgctatgatgcccaggctttgaactcctggactcaagtgatccttccaccttggccttccaaggtactgggattacaggtatgagccaacgtgtccagcctgaaacaatatttttcatgttcggcatccctagcagagggctgggcagtgtgggaactcaaaactgattccttccgtatcactttgttagatgaaacaaaaaaacacagaagaagagaaaattagtatagggaggcaattcaaacataaaattgttaaaaataaaagtcattggtttggggattaagcaaataatctaaaagttcagaaggtcagagacggctagaattgatgacaagttttttggaagaatcagatataaagatttgggaagcaattagacaaattcgtgagattttgcagtgtgtgtttggaatcttagataggatggggccagcctgtagacatatttgaattacaggctggcacattatatgaggtttccaaaccagagaatattaatgttaagacagctttgatctggaggtgatacgaatgaaagcaaggagatcagatgacttataatcctcacagatggaaatgtctaaattatggcatatgtattcaatgaaatgttttataaactttatttatttttttgagatggagtctcgctctattgcccaggctggcgtgccgtggtgcgatgttggctcattgcaacctccacctcccaggttcaagcgattcccctgcctcagcctcccaagtagctgggattacttgtgtgcgccacaatgcccggctaatttttgtatttttagtagagatgaagttttgccatgttggccaggctggtcttgaactcctaacctcaagtgatctgcccatctcggcctcccaaagtgctgggattacaggcgtgagccaccacgcccagcctaaactttgtttttaaaagtaagtctatagcaacattgagaaatgcttgatatttcatggactattactatgaaaagatatgcttatttgtccatgattattcagtaaatatactaagtcactagtaagtgacagaggaggaacacaagccagggtcttcataggccagttgatgtgttggtaacagaatacggaaggttcttcatccctgcttttagacagtttaatcctatttcatcagtgtaatccttgcttcatattctcatgaatatgatgaggtgaggtgaggtgataagaaaatatggtgagggataagaaaatatcacataagggtaaattttaccttgtgtaaattgagacttaaacactaaaacactgttctaggcagaggttctcaaacctcaattcttgatgtctgtccactcacaggctcaacactacatggaagctgccaaggcttgaggcttgaaccctctgaagccatggcccaagctctacgctggaccctttcaaccatggctggagtggctgggatgcagtgcaccaagtccctaggttgcacacagcacggggaccctgggcccggcccatgaaaccactttttcctcccaggcctttgggcctgtgataggaggggctgctgcaaaggtttttttgacatgtcctagagacatttttcaccattgtcttggtgattaatatttggttcctcattacttatgcaaatttctgcagccagcttggatttctcctcagaaaatgagattttcttttctattgcattgtcaggctgcaaattttccaaactgttatgcgctgcgtccttataaaactgaatgccattaacagcacccaagtcaccccttgcatgctttgctgcttagaaatttcttctgccatgatatggtttggctgtgtccccacccaaatctcatcttgaatttccacgtgttgtggggagggacctggcaggaggcaatagaatcatgggggcaggtctttcttgtgctgttctcgtgatacccagtcatggatatgttttacccatgatttagggtatctggtgggataaatttctaagcagcaaagcattcaagaggtgacttgggtgctgttaaaggcgttcagttttataagggaagcagagcataaaagtttggaaaatttgcagcctgacaatgcaataaaaaagaaaatctcattttctgaggagaaagtcaagtcagctgtagaaatttgcataagtaacagggagccaaatgttaatcaccaagacaaggggaaaatgtctccagggtacatcagaggtcttcatggcagcccttcccatcacaagcctggaggcctagaaagaaaaagtggttt

SEQ ID NO: 97147 - DNA, 13537 bp, Homo sapiens
gggttatcatctggctggtatgttcccagagtgaaactcagcagccccttgagggaggggatggtggccatcaggccagagtattgcaagttagtttggatcatttgctaagcagcttgtggtgccttcagaaaggaacagtttcaaagaactttcacatctgttggctcatttcgccctaatgacagtcttctctttgatatttgcatggcattaaattttgcctttcttgttttctccagaaaacgcccactcctggatcttcacattgaactcaatggctacatgtatgattggaacagcagagtttctgccaaggagaaatattatgtytggctgcagcacactctgagaaagaaacttatcctctcctacacataagaaaccaaaaggctgggcgtagtggctcacacctgtaatcccagcactttgggaggccaaggagggcagatcacttcaggtcaggagttcgagaccagcctggccaacatggtaaacgctgtccctagtaaaaatacaaaaattagctgggtgtgggtgtgggtacctgtattcccagttacttgggaggctgaggtgggaggatcttttgaacccaggagttcagggtcatagcatgctgtgattgtgcctacgaatagccactgcataccaacctgggcaatatagcaagatcccatctctttaaaaaaaaaaaaaaaaggacaggaactatcttactcaatgtattagtcatgtttctctagagggacagaactaataggatacatgtatataaaaaggggagtttattaaggagtattgactcacatgatcacagggttaggtcccacaataggtcatctgcaagcaaggaagccaattcaagtcccaaagctgaagaacttggagtccaatgtttgagggcaggaagcattcagcatgagagaaagatggaggccagaagactacaccagtctagtctttccatgttttgcctgcttttattctggcagtgctggcagctgattagatggtgcccacccagattgaggatggtctgcctttcccagtccactgactcaaatgttaaatctcctttggcagcaccctcacagatgtacccgggaacactttgcatccttctattcaatcaagttgatactcagtattaaccatcacagtccatttgggcaactataccaaattaccatagaccaggtgacttaaacagcagttatttctcacagttccggaggctgggaaatccaacatctaagtggtagcatatctggtgtctggtaaggcatgcttccagatcttaccagatgtcagtcttttgatgttctcacatggcagaaaaagaggatgcaaactctcaagtatatctttaagggcacaaattccattcatgagggctctaccctcatcacctaattacctcccaaaggccccaccttctgatactgtcactttggggatactgtctcccctttgaattctgggggggatacaaacattcagtttgtaacaatagccttatgatttagaggttacttgttcattcacctagacctcaaattgcattttacagctagtcaagtatatctttctctgatttgatagtgtgacctaaaaggggaccattgtttgaaatatcattagagttgcttattattattattattattattattattattgagacagagtttcattctgctgcccaggctggagtgcagtggcatcatcttggctcattgcaacctctgccttctgggttcaagcgattctcctgcctcagcctcccgagtagctgggattacaggctcctgccaccacacccggctaatttttgtatttttagtggagacagggtttccaccatgttggccagcgtggtcttgaactcctgacctcaggtgattcaccagcctcggcctcccaaagtgctgggattacaggtgtgagccactgcacctggcctattattatttttaaatttttttttttaattgatcattcttgggtgtttctcacagagggtgatttggcagggtcacaggacaatagtggagggaaggtcagcagataaacaagtgaacaaaggtctctggttttcctaggcagaggaccctgcggccttccgcagtgtttgtgtccctgggtacttgagattagggagtggtgatgactcttaaggagcatgctgccttcaagcatctgtttaacaaagcacatcttgcactgcccttaatccatttaaccctgagtggacacagcacatgtttcagagagcacagggttgggggtaaggtcatagatcaacagcatcctaaggcagaagaatttttcttagtacagaacaaaatgaagtctcccatgtctacttctttctacacagacacagcaacaatctgatttctctatcttttccccacctttcccccttttctattccacaaaaccgccatcgtcatcatggcctgttctcaatgagctgttgggtacacctcccagacggggtggcggctgggcagaggggctcctcacttcccagatggggcggccaggcggacgcgccccccacctccctcccggacgggatagctggccgggcgggggctgaccccccacctccctccccgacggggcggctggccgggcgggggctgacccccacgcctccctcccgacggggcggctgccaggcggaggggctcctcacttctcagacggggtggctgctgggcggagacgctcctcacttcccagacagggtggctgtcgggcggaggggctcctcacttctcagacggggcagctgccgggcggaggggctcctcacttctcagacggggtggccgggcagagaagctcctcacatcccagacaggggggcggggcagaggcgctccccacatctcagacgatgggcggccgggcagagacgctcctcacttcatcccagacggggtggcggccgggcagaagctgtaatctcggcaccctggggggccaaggcaggcggctgggaggcggaggccgtagccagctgagatcacaccactgcactccagcctgggcaacattgagcactgagtggacgagactctgcccgcaatcccggcacctcgggaggccgaggctggcagatcactcgcagtcaggagctggagaccagcccggccaacacagtgaaaccctgtctccaccaaaaaaatacgaaaaccagtcaggcgtggcggcgcccgcaatggcaggcacgcggcaggccgaggcgggagaatcaggcagggaggctgcagtgagccgagatggcagcagtacagtccagcttcggctcggcatcagagggagaccgtggggagagggagaagagagggagggggagagggctatttttaaaattttttaaaattgctgaacaggggtacctctgggcagtgtgtcagaataccactttttaaatattttatgatttatttatttttctatttgaggttttaactgatgtgtatctgtatgtctatttgtgtatattttgtcatgatcatgtaacagagtctgaaaagtgtcgaagagacagttttcaggaacaacaagcaattattcctactttccaagttattttgatgccatggtggctcatacctataatctgagtactttgggaggctgaggtggactgatcacttgagcccaggagtttgagaccagcctgggcaacatagcaagactccatctctacaaaaaaagacaaaatttagctgagcgtggtggcgtgttcctgtagtcccagctacttgggaggctgaagtgagtggatcccctgagcccagagaggtcaaggttgtggtgagctgtgatcgcaccactgcacttcagcatgggagacagagtgagaccctgtttcagaaaaaataaataaataaaaccaccagcaccacaaacaacaacaaaaagttattttgtacttgttttgagcacaggactcctgagggtatctttgcatttaatattacataggggtgccagtgggaagtaatgtgtatgcttggcctcatgagctaaaaccctgtgttaattatgacagaaggaaagtgtgtgagagggatcttaactacctagcagctctagctgccatcttgaaccatgaagatacgggccacacgtaggggtagctgggtagtgagcagcaagaagccttgttggatgagggcacgaaggagcagaatcactggaatcactgtgtcagccctaattacctacctctggacttttatgtgaggggaaaaaaaattgacagtttatatttatctcaacctagttaacccaagtgatgcattgttatgagattaaaatgtttggaggccgggtgcggtggctcacgcctataatcccagccctttgggaggccaaggcgggcggatcacgaggtcaggagatcaagaccatcctggctaacatgtaaaaccccgtctctactaaaaatacaaaaaattagccaggcgttgtggcggtcgcctgtagtccctgctatttgggaggccgaggcaagagaacggcatgaacctgggaggtggagcttgcagcgagctgagatcttgccactgcactccagcctgggcgacagtgcgagactctgtctcaaaaataaataaataaataaataataaataaaatgtttggaatgttggcttcatccctgggatgcaaggctggttcaacatacgcaaatcaagaaacataattcatcacataaacagaactaaagacaaaaaccacatgattatctcaatagatacagaaaaggccttcaataaaattcaacgttgcttcatgttaaaaactctcaataaactaggtattgatggaaaatatctcaaaataataaccatttatgacaaacccacagccattatcatactgaatgggcaaaagctggaagcattccccttgaaaactggcacaagacagggatgccgtctcaccactcctatttaacacagtattggaagttctggccaagaaaatcaggcaagagaaacaaataaggggtattcaaataggaaaagaggaagtaaaactgtctgtttgcagatgacatgatactatatctagaaaaccccattatctccacccaaaagttccttaagctgataagcaacttcagcaaagtctcaggatacaaaatcaatgtgcagaaatcacaagcattctatacaccaacaatacacaagcagagagccaaatcatgaatgaactcccattcacagttgctagaaagagaataaaatacctaggaatacagctaataagatgtgaaggatctcttcaaggagaactacaaaccactgctcaaggaaataagagaggacacaaatgaaaaaacattccattctcgtggataggaagaatcaatatcatgaaaatggccatactacccaaagtaatttataggttcattgctattcccattaaactactattgacattcttcacagaattagaaaaaaactactttaaaattcaaatggaaccaaaaaagagcccgtataaccaagacaacaataagcaaaaagaacaaagctggaagcatcacactacccaacttcaaagtatactgcaaggctacagtagccaaaatggcatggtactggtacaaaaacagacacatagaccaatggaacagaatagagaccagagaaagaagaccacacatctacagccatctgatcatcgacaaacctgacaaaaacaagcaatggggaaaagattccctatttaataaatggtgctgggaaaactggctagccatatgcagaaaattgaaactgaccccttccttacaccttatacaaaaattaactcaagattaaagacttaatgtaaaacctaaaactataaaaaccctagaagaaaatctatttaataccattcaagacataggcacaagcaaaggtttcatgacaaaaacatcaaaagcaattgcaacaaaagcaaaaattacaaatgggatctaattaaactaaagagctcctgcacagcaaaagaaactatcattagagtgaacaggcaacctacagaatgggagaacatttttgcaatctatccatctgacaaaggtctaatatccagaacctacaaggaacttaaaacaaatttacaaggaaaaaaacaaccccatcaaaaagtggacaaaggacatgaacagacacttctcaaaagaagacatttatgtggccaacaaacatataaaaaaaagctcaaccttactgatcattagagaaatgcaaaggagaaccacaatgagataccatctcatgccggtcagaatggtgattattaaaaagtcaaaaaacaacagatgctggcgaggctgtggagaagtaggaacacttttacattgttggtgggaatgtaaattagttcaaccgttgtggaagtgtgtgtggctattcctcaaagatctagaactagaaatactatttgtcccagcaatcccattactgggtatatacccaaaggaatataaaccattttattataaagatacatgcacatttttgttcattgcagcactcttcacaatagcaaagacacaatagcaaatgcccatcaaagatagactggataaagaaaatgtggtacatatacaccatggaatactgtgcagtgcagccattacagcttttggtgatacagtgaatcagatttttcattaattcttttaattggttattactgaacgtgaaaaagtaatgtttgtattgaaatcttgagtctggccatgtttctattttaaattcataaagaattctaacaagaggaattccaagaatgtcataaatggatgtttctccatggatgaaggaactgttttattcacttgctgataattcagcctaatccagtttgacatcatatagataagtagttgaattatggatttaaaatacatatcattttctaactccaaaggtaatacttatttaaatggttttgaaaatatagaaaggcacaatttctttttaaatctgttattctccaccaccactcaatctgtctatcatctatctctccattcattcttccatttgtttatatctgttaatctttgtatgtgttcatgtatagcttttacatgattggaatcataatgcatattccattttgaagtctgcttttttttacacaaaaatatgttgtgaatattttcctatattatgaaatatcattagctgagcttttagaattgactgcatgttttggtaccatttagatatagtttaagatacttagaagttatgtggctttgccactatggatgaatcttatttactcaatattaattacttacaaataacctcacctaaacactactcagccataaaaaggaatgaattaatgacattcacagcaacctggagactattactctaaaggaagtaactgaggaatggaaaaccaaacattgtatgttctcactcataagtgggagataagctatgaggatgcaaaggcataagaaggatacaatggactttggggacttaggggaaagggtgggaggggggtgaaggataaaagaatacaaattgggttcagtgtatactgctcaggtgatgggtgcaccagaatctcacaagtaaccacttaattacttacgcatgtaaccagataccacctgttccccaaacacctatggaaataattttgtttttttttttaaaaaaggaatgagatcatgtcctttgcagggacatggatgaagctggaagccattatcctcagcaaactaacagaggagcaggaaaccaaacaccacatgttctcacttgtaagcggaagctgaacaatgagaacacacggacacagggatgagatcaacacacactggggcctgatgcaggggccgtagcggggagagcatcaggataactagctaatgcatgtggggcttaatacctaggtgatasgttgataggtgcagcaaaccaccatgggacacgtttacctatgtaacaaacccgcacatcctgcacttgtatccagaacttaaaatattttaaaaatctttagagaatacaaaaaaaaaaagattcttcaatgcatacacaataaaattgcagttcagtcaaacattggaagtctttctctaactgtctagttggtatcttcattttcagcttcttcaagatcccactccaaacactgttagctcagccaaattgaacagctcatatctcctacctctggatctttggttctggtgattgtatatttctggaccatctggaaccccagcatatcaccctaccccacatctccacatccccaaaatataaccatacttcaagggcagttcaaataccatctccttctatcctccatgaagtcagttatctcttccattggaattatcgccccctctcctgaacagtactatttcgtgtgaatctcctccaagccttcttttcattttatatctcatgctgtaattcttggaaagtatgctgtagctcaagtgcagaattctcatcagttttatctttatatctctcctaaacactttacctgatgaagagcctggcatacacataaatatatattgaatgaatcagtgatggattgaaaagagaaatgatggatctcctaaattttaacttttataaaatattttgatacattcatgaccttactttagcaagcaatgaacgtgatgtaaactattgttgatatagtttttatattggaagtgtaagtagtttgtggcatgggattgtgacatatcctaggtttcctcatcttctttttattgaaatgtaattcacaagccataaaatttgcccctttaaagtaaatgatgcagtggattttagtatatttacagagttgtgcaatcatcaccactatctaattccagaacatttccatctacctagaaactccataccagtgagctgccactctaatcctcctcttcccccagcctctagaaacaataatccattttctgtctctatgatttgcctgttctagatattttataaaaataaacatgtggcctttcgtgtctgacttccttcacttagcatgtttcaaggttcatctatgctatagagtgtaccagtgcttcattacattttatggctgaataataccctattgtgtggatataccgcatttagtttattcatcagttgatcgaaatttagactgtttccacttttttgctattatggatgatgctgctatgaatattcgtatatgaatttttatatggatatatgttttcagttcttctgggcatataccttagaagtgagagtgctcatcatatagtaactctatgtttagccttttgaggaactgccaaactgcttttcaaagtagtagcatcattttatattcccaccagcagtgtatgaggttttttttatttttttgtttttgagacggagtctcactctgtcgcccagggtggagtgcagtggcgttatcttgattcactgtaacctctgccttctgggttcaagccattctcctgcctcagcctccctagtagttgggagtagctgggtttacaggagctcgccaccatgcccaactaatttttgtattgttttttgagacggagtctcgctctgtggcccaggctggagtgcagtggtgcaatctcagctcactgcaagctccgcctcctgggttcatgccattctcctgcctcagcctcccaagtatctgggactacagccgccctccaccacgcccggctaattttttgtatttttagtagagacagggtttcaccgtgttagccaggatggtctctatctcctgacctcgtgatccgcctgccttggcctcccaaagtgctgggattacaggcgtgagccaccgcgcccagccaatttttgtatttttagtaaagacagggtttcaccatgttggccaggctggtctcgaactcctggcctcaggtgatctgactgccttggcttcccaaagtgctggcattacagacattagctactgtgcctggcctcaagtcctttctcattttaaaactgcgttattttattttatttttctgagatggaatctcactctgtcgcccaggttggagtgcagtggtgcaatctcggctcactgcaacctccacctcctgagttcaagcgactctcctgcctcggcctccctagtaactgggattacaggcacccaccatcacgcctggctaatttttgtatttttagtagagacagggtttcgccatgttggccaggctggtcttgaactcctgaactcaggtgatctgcctgcctcggcctcccaaaatgctaggattacaggcgtgagccaccacacccggtgggttgtctttttattgttgagttgtaagcattctttttaatattctggatactagtttcttatcaggtacaatctttgtgaatatattctcccattccatggattgtcttctcactttctggatactatacagtacaagttttaaattttgatgaagttcacttgatttctgttttttatgttattgcttatgcttttggtgtcatacctaaaaaaccattgtctaaatcaattgcctatgaggtgttacccctatgttttcttctaaagttttatgattttagctctttgacccattttgagttatttttgtgtatgcagtgcgagataagcatccagcctcattcttttgcacataaatgttcacttgtcttagcattacttattgaaaatactattttttccctatagaattattttatacttatcacaaatcaactaactataagggtttatttctggactcaattctgttgctctatcttatggtagtaccacactgtcttgattattgtaacttcgtagtaagttttggaatccagaaatgtagtcctctaactttgttgttgttgttgttcttcttttttcttttgtagagatgaggccttgctatgttgcccaggctggtctcaaactcctggcctcaaacaatcctcccacctccacctcccaaagtgctgaggggtgagccactgcaactggcctgttctttttcaaaattgttagggctgtattgggtttacctttccctaaattttcatataactgttaggattcacttgcaaatttatgtaaaaagggcctctggaattttgatagtgattacactgaatgagaggagtttggcaggactggtttcccaagaccacaagaccctgtaagaccctgctgataagacaggatgtggtagaaaggccaacccaaaccagccaaaaccatgatggtgacagaagagacctctggttacctttgctgcccattctatggtaattataatacattagcacgctaaaagaaacttctacagcaccatgatagtttacaactgccatagcaactttcagaagttaccctgtatggtctaaaaggtccagacctccccacttctttcctggaaaactcatgaataagccacctcttgtttagcgtatagtcaagaagcaaccataaatatagccagtcagcagcccatcagggctactcttcctatggggtagccattcttttattcctttactttcttaatgaacttgctttcactttattctgtcagcatgctcttgaattctttcctgaacccacttgacctcttgggctgagccttaaccttggggtacttttgcctataacaaacatacaaagataagtttggctgggcgcagtggctcatgcctgtaatcccaggactttgggaggctgaggatggtggatcgcttgagccaaggaatttgaggccaccttgggcaacacggcaaaaccctgtctctactaaaaatacaaaaattagctgggtatggtagcatgcgcctgtagtaccagctactcggaaggctgaggtgggaggatcacttgagcccgggaggtggaggtttcagtgagctgagattgtgccactgtactccagcctggggaacagagtgagaccctgtctcaaaataaaaataaatttgaggtgtattgccatcttaacggaagttgttactggtggacggtatccaagttactggtggtaaatctgcagcaacctcaattctttcctcctcagaagaaagaatttgactgaggggcataaggcagaaggagggaccgaggcaagtttcagagcaacagtgaaagtttattacgctttaggctgggcacagtggctcatgcctgtaatcccagcattttgggaggctgaggcaggtggattacttgaggtcagtagttcgagaccagcctggccatcatgatgatgaaacctcgtctctactaaaaatagaaaaatcagctgggcatggtggtccatgcctctaatcccagctactcgggaggctgaggcaggcgaatcagttgaacctgggaggcggaggttgcagtgagccaagaaagtttattaagctttagaacagtaaggaaaggaaagaaaagaaggaaagtataacttggaagagggccaagcaggtgacctgagaaaccaggtgcagggcttgccctcttgacttggggttttatatgctggcatacttccgggatcttgtgttacttttccccactcctgagatctttttgagaagctgatgatcagtctcaggtgttttctattgcggggggggggggcgggcgggggagctgcctgtccctggcaccacctgtgaccaattattactttacagaaacatttaacaaccgcctgaccatcacctgatggttgcccaacactcttggtgtgtgtcgggggagccctctcctgccttgctcagacctgaatgtacccattgtaacaaaccccttctttgtatactttgatatggtgacatttcttgtcacttgcctcattgtgaatttttatagatgtggctaagtcatatgcttccttctgaaaaattatgtcaaatactagcagtttctcactgttttttgccctagaaacaacaaactaaccttgaagtgaaaggcctttctgcgtttatcttaccttttttgagcagcattaaaactgttttactcagaccaagtgccgtggctcatgcctgtaatcccagcactttgggaggttgacgtgggaggattgcttgagcccaggagctcgagatcaggctgggcaatgaagtgagagccagtttctacaaaaacatttttaaaaatttgctgggcatggtgggacatgcctttagttccggctactctggaggttgaggtgggaggatcacttgagccctggaggttgaggctgcagtgaactatgatcttgccactgcactccagcctgtgtgacagagcaagaccctgtctcaagaaaatccatataaacatatatagtggtttcttatatacaacattttaaatttattgatatataaaatatgtattttaaatttatatactatacaatctgttatataaaattatttttataatatatttatataatatattttaaatttaaatatatttataaatatatataaatatatat

SEQ ID NO: 97148 - DNA, 67997 bp, Homo sapiens
cctggccgtgttctgggtggagtttgtgatgaggcacaagggcgcgccacacctgcgccccgcagcccacgacctcacctggtaccagtaccattccttggacgtgattggtttcctcttggccgtcgtgctgacagtggccttcatcacctttaaatgttgtgcttatggctaccggaaatgcttggggaaaaaagggcgagttaagaaagcccacaaatccaagacccattgagaagtgggtgggaaataaggtaaaattttgaaccattccctagtcatttccaaacttgaaaacagaatcagtgttaaattcattttattcttattaaggaaatactttgcataaattaatcagccccagagtgctttaaaaaattctcttaaataaaaataatagactcgctagtcagtaaagatatttgaatatgtatcgtgccccctccggtgtctttgatcaggatgacatgtgccatttttcagaggacgtgcagacaggctggcattctagattacttttcttactctgaaacatggcctgtttgggagtgcgggattcaaaggtggtcccaccgctgcccctactgcaaatggcagttttaatcttatcttttggcttctgcagatggttgcaattgatccttaaccaataatggtcagtcctcatctctgtcgtgcttcataggtgccaccttgtgtgtttaaagaagggaagctttgtacctttagagtgtaggtgaaatgaatgaatggcttggagtgcactgagaacagcatatgatttcttgctttggggaaaaagaatgatgctatgaaattggtgggtggtgtatttgagaagataatcattgcttatgtcaaatggagctgaatttgataaaaacccaaaatacagctatgaagtgctgggcaagtttactttttttctgatgtttcctacaactaaaaataaattaataaatttatataaattctatttaagtgttttcactggtgtcgcatttatttcttgttaagttgcattttctaattacaaaagtaatgcatgattatgacagaaagtttggaaaatatagaggttcacacacacacgccttcattgcgtgtgcatgcataaatgcatgagaaaagaaaaataaccagtaatcacatcgcccagaaataaccccagttacaattgtggcaaatacacatacttataaatattgcagatatattaagtatacctagtatttgctaacactctttcttctactctgtcatgaagattctcccaaggtgtttttgtataatatttaattcattttcagtggccaagcagtattctacttcatggatataccaggatttatttaaccataacttctggttggattcactcttattattttgtttaattaaaaaaaaaagacctcggctgggcacagtggctcatgcctgtaatcccagcactttgggaggccgaggtgggtggatcacctaagatcgggagtttgagaccagcctggccaacatggcaaaaccccgtctctactaaaaatacagaaaattagccgggtgtggttgccagcacctgtaattccagctaattgggaggctgaggcaggagaattgcttgaaccggggtcagggggttcggaggtcggaggttgcagtgagtccggatcatgccactgcattccagcctgggtgacacagccagactctgtctcaaaaacaacaacaacaacaaaacaacaacaacaacaacaacaaaaatctcactggacatcctagtagctaaggctttccacatattcatgattacttctgttggaaagtgctttacaacaaattgctagttgtctcagtctgggttcccctgagatgaggattcaagggccaggagtttatttaggaagtaaaggaaacactgatagaggagtggcagagtgagaaggggtgatggtcatccacagctggctctcttgtggtcaatcggagcttaatcctgctgggtgactctgggagccagtggagaaaagacaccccagacttatcccaatgaggaacacggctgttgggtgcctgagtacttgcctcgtcagggattgaaacgtactcccaggtagtagtaatttctctgcccttccattaggccacaaagggggctctgacagagagagctgacgagaaaaaacacacgcccttgtcactgaagaggtacacaggggatctgtgtggggcaccacctgcactgctaccctggacaaatagcttaagaaatccccacactgcatccccaaacttactatcagcgtgtgagggagacaggttcccacaccctcattagcacaaagtactatcttgaaaaagaaagcctgtcagtttgataggagaaaagcaggatcttgtttacaatgtgcttttattattgttattattagagattgtatttcttttcaagctgatgagccgtctgtgtttattttttggaggataccctttgcccactttcctattggagtgtattaccctgaggatttggtaagagtgcttattgcattcaccagaatgtcctttttgtcatttactgtattttctctacttttttttttttgccttgttttactttttttgttttgtattacaagcagaagttttaaatttgtaagcttcaaattggagctggggtggtgcagagcgaagatttcagctggttccctgaccccagctccatctccttccctaggcagtggctggaacacattctgtccactatttccctctctacatccttgaggctgtgcagtcacccctcaactacgttcaccctccttcaaagcccttcctggtccacccggggaccatctcccggcctcactgcccctagctccttgacgccccaacctctctcagggaccccaagttgccatgacctctagccagctcatgttcatttgcaccttcgtgtctgcagcactgaggcactcttgtttacaagtgagagaacccaactcgggataccttaagcataaacagtatttttgtaaggagacaggcttctgacgacgcgaggctcatagccaggcctgcgctgggtggagcctccccttctcactcctgtccctgttgggtcagagtgccagctttcctcttccctctcctccgggtcttttcggcccctcagtccccatattcctctgccctagctcccaagatcccacaagagacagactggattctctctggcctggagtgccaccttcctgaaagtcagaatctgattggtccagctggatcaggtgtcctctccctgtccaatcatcaatgccgagagggattacggagagaaaaacatggctcccaccatcccattgctgtggctgcttgggccacgggagagggaaccttgtgagccgggcagaatccaccctgtagagactgcctctgggtgagtcatatggtttggctgtgtccccacccaaatctcatcttgaattgtaattcccattacccccatgtgtcattagagggacctggtgggaagtgatttgaattatgggggcagttatctccatgctatttgtgtgatagtgagttctcacaagatctgatggttttatagggggcttttccccctcttgctcatacttcctcttgcctgccaccatgtaagatgtgcccttgctcctccttcaccttctgccatgattgtgaggcctccccagccatgtggaactgtgagtccatgaaacctctttttctttataaattacccagtcctgggtatttcttcatagcagtatgaaaatggactaatacagtcagcttctgcacaatatttccattttcccacattatgtcttgggccttttgtgtatttaagctcacaggatgctacgaataaagcgttttcttatttcctgggtagttcccatagaagtagtggtgcaacgtgccatagagtgacagcacctaagagaagctgattttgtgagtggattgtgagttcaatattgttgtcataatcagaaaaaaatgtatttactttttttttttttttttttgagacggagtctcactctgttgcccaggctggagtgcagtggtgtgatcttggctcactgcaacctccgcctcctgggttcaagtgattcttcctacctcaccctcctgagtagctgggattacaggcacatgccaccccaccacacccggctaatttttgtattttttagtagagacagcgtttccccatgaaaaaaagtattttcaatttggaaagccaagcagagcccccttcttcctccttggtctcactgtcttcatgtcctctgtagataacatgctcaggggcctcttacttttggccatggcttacacactcgacctgtgtgtaatttaaaaatgacccctttctccactcctcctgattgccatatccttcacaatgtgactttgcaactcttctcatgaaaaggaggaatctatttctccagcctgtgggtcctggctggcctgtgacctgccctggctgacagagtgtggcaggtgatgagcactggtttcaagtctaggcctcaagaagccttcatattcccgctcactgtctcagaaccctgtccagctgctatgagaacagcctgggtgagccctgctgcacaatgtccccatcaccctagtcatttcagccaatagcgagccaatggccagccctctagctgtctgagatacatgggtgagactctagttgtgcttggctggacagagcacagatccacagacccacgcaggtgactcatacacttgtgaactataataatcggttgttttcagtcattaagttttgaggtggtttgttacacagcaattgctgacacattcacttctggctctaaatgtatcacttttcatgtgttgagtctgaagaccttcagaggacagagatgtgttccacctaccctatatccactgcagcatggaaagccatgcttagctgcacacagtaggcgtgcagtctgggcctgtggaatggacttggcaaccacatcacctcagtgatctttcaaacggaaaagaaggctcagtggggagtgggaggaggtagtgcagaggggcagtcctgtgaaagaaggggcatgggatagctgcttgtgtctatttcatgttgatcaatgtatctccaagtgcagaacaaggaataacgcaggaattttatgaggaagaaatgttgggcatgataagaaagctcattttctaaccatctgaattccatgaagtagaaagaggctggtcctgagagtaatgagctccctcgtattggaggtgtccaagcacaggctgaggaactcccatttggctggatgggcaaacttggagtggaaattccacttaagcaaccttggccctagatgtctctgagttttgttcctgttgtcttgcagtgcatagaaagatttcccaaaggccaatatttcattgttgtacctatgatctggatcatctctcctagctataaatgacagggaaatcctttgggctccacttttggtttaggaaatcagggtgcctcctctcctacctgtctttgatgttctttatcttgtaagtattgtgctagtggaaatccaatttcttatcctgcaagtcatccagtccccgggaaggaggagtgctctccccagggcctctcagtctgcccctcctctcctctccaactgtcctgaccacacctccccacccagggctcacatgactgtgttcccctgggacttggttgtaagccatccccacttctaccatctccctttcccaaacaggcccctgtacttcagcacacacatgtgaataacagaaatgttgaatgacaacatgatgtggagttttcaccccagagccctgtgcactcttcaaagacctgggttgatagagactcagggaggcagttggatctcaaagttccgagggtctgggatctaacggtgatagttctagtgaaaccctcccacccttccaggagacccattcctataagaaatatgactgaagagcccagctgtctcactttgataaccaattcttccatttgcatttccattgatgtgtattgggccaagagcagagctttttcttgtggttaatatctgtttaatccagaagaagaccctaaggaaaggtcagtatttaggtcccagagtagctctttaaaatcctttaaaggaaaagagagtatgggatagtaaagggccatgggatggatctttgaggatcaaggaacttgggacaggaggagaaaggatctgagagcctttcttccaccatctcgacatctatgttggtgtttctcaatttttaagaagctgtggatgttgagagaaccccttaaaggagttatgagagatactgatatgaatttctcattagccattaattatcagtgtgtagaagagagggcgagagggctctwttaaactaaggatattatctattgctgtgtaacaaattatcataaactcagtggcttaaaagaacatccattgattatctcacggttccactggccaggagtctaggcatggctttccttggtcctttgtttagggtctcagagactgcagtcctttctggagtycagcttcctcttccaagctcatgtgcttattggagaattcagtttcttatggttgtaggactgaggccctcagttccttgctacgtggccctcaccacaggcagtttgcatcatggctgtttacttttcaaggccagtagaatgtttctgttcaatctgataagagggaatctcatgtggcatagtgtgatcatgggaatgacatcccaccatctttgccatatgatgtaatccactcgagagagggtcacccatcacctttgccatattctgttgattagaaggaagtcacaggttccacccacacaccctcaaggggatggctttatggaagggtgtgggtcgttggggtcatcttaaggtgtgtgtcacaccccgtattttacaaattctgttgatctcaaaagagcttgaggaagagatgactgaagccattacagaagcagcagtagmctcaagtgaggaggtgtcagaggaaagagacgacctggggcctcttgaattacatgacagtggtaagaatgtcatccacatttctgctttcctgccccatctcagacactaactctttgactgcagccccagcctaggtctccctttctccatctgcacagtggacatcataccacacatgaagctggagctgcgcaggtggaggcaaggccagggacacaagggcacctcctgtcatggtcatttccacactgcacctgggtggcgtttgttttcataggtacctttcaacaagtcgtgaaccttctggacatcattgacagcgagtcagcaaagacggacacaacaggggcaggccttgacatgcggaagaccctggcctcggtgataatcatggagaaggccaccactgagccttctgtagtgataaacactctcatccgctgcctgcaggtgccagaggtagggccatcttacccactgggctcagccacctttagctctgtgtgcatccatccaccacccagcacatagttactgactatcagagatgtgatgtgtggtactgggatacagagatgggcaagactgtgaggtgcttactccctgaggaccaattgggacctgagatgttcataatttttaaaagttcccttgtcttctgacacagtgggtttgggagccattgtcctacagcacatgagctgagttgcaaagatgttgagccagtgggcatgggagagtaaagatacaccagacacagtgtgcagggatgtttggctagtggggagatgcctagctgggttaaggggctggggtagaggatgttggagggagtgatacaaagtgcaaccaggggacctggtgggcttgtacagacaaggtttgcatcacgtggtaccagacaaggttttggactagacaagggtttggaacagagctgatccaaaccttgctgggcaccacccccagagtttctgattcagtaagtctggggtggagcctgagaatcagcatttctaacaagttcccaggtgatgccaaggctgatctrgagagcctactttgagaactgttggattttagactacccttttgtcttggagtgggtagcaaaggggtgctatragcagaggagcttatttataaaaakttttattatttttgttggatttggatttgcatttgcgttttcccccttttatttttagttgacacataacaattgtacatatttatagaatacaaagtgatatttcaaaacatatatacaatgtgtaatgaccgaatcagggtaattagtatatccaacactgcaaacatttatcatttctttgtgttgcaagcattcaaaactgtttcttctagttttttgaaaatatacratcaatcattgttgactatattcacaacctacagtgctatagaacacaagagcttattccttctctccagctgtaattttgtatcttttaatcaacttctccctatcctcccctgcccttacctttccyataccctaataccgaaattctactcttgacttctatgagctcaccatttttatagctcccatatatgagtgagaacatgtggtatttatctatctgtgcctgactcatttcacttgacataatgtcctccagttttattcatgttacggtaaatgacagggtttcttttttttatggttgaataatattccgttgtctgtgtataccacattttctttatcccttcatacattgatgggtacttacgttgattccatatcttggctattgtgaatagtactgcaataaacatgaaaatgcagctatctcttagatatattgacttcctttcttttggatacacacccagtagtagaattgctggatcatacggtaaatctagttttactttttttgagaaacctccatagagttttccataatggctgtactaatttatagtcttaccaacaatgtgtgaggtttcccctttctccacatccttgctagcatctgttattttctatattttggataaaagtctttttaactggagtgagatartatctcattgtggttttgatttgcatttctctgatgattagtgaggttgagcatttttttatatccctgttggccacttgtatgccttcttttgagaaatgtctgttcagatcttttgcccatttttaaatttgatttttttgctattgagttgtttgagctccttgtgtattctggttattaatcccttgtaggatggagagatattctcctattctgtgggttgtctcttcgctttgttcactgtttcctttgctgtgcataagttttttgcttgacataatcccatttgtctatttttgcttttgttgcctgtgcttttgaggtctcacacaaaaaatctttgcacaaaccaatttcctggagcatttccccaatgattattttctagtagtttcatagtttcaggtcttggatttaagtctttaatccattttgatttgatttttgcrtatggtgagagataggggtttagtttcatycttctgcatatggttatccagttttcccagcaccatttattgaagagactgtcctttcaccattatatgtgcctagcacctttgtcaaaaatgagttgactgtaaatgcatggattgacatctgggctctctattctgttccattggtctatgtgcatgtttttatgccagtaccatgctattttggttactatggctttaaagtatattttgaagtcaggtagtatgatgcctccagctttactctttttgctcaggattggtttgtctgtttggagtcttatggttccatgtaaaaattgtctgtaaagaatgtcattggtattttgatagagatttcaatgaatctctaaattgcttctggtagtattttgataatattaatttttctatcagtgagcatgaaatagctttccattttttggtgtcttcttcaattcttttcatcagtgttttatagtttcccttgcatagatcttycacttctttggttaaatttattcctaggtattttatatttttgtggctattgtaaatgaaatggatttcttggtttctttttcaaaatgggtgaagtgttctgttgtttgccatttggcatatactaatgttactgatttttgtatgttaattttgtaatctgcaacttaactaaatttatttatcagttctaacagtttttggatggagtctttgtatttttctagtatgagatcgtgtcatctgtgaacaaggataatttgacttcttcctttctattttgtatgccctttgtttctttctcttgcctaactgctctggccaggacttccagtattatgttgargagcagtggtaaaagtgggcatttttrtcttgttccagattttaggaacaaggctttcgatttcttccatctggtacaatgttagctgtgggtttgtcatatatggcttttattatcgtgaggtatgctctttctatgcccagcttgttgagtttttaaaaaatcataaagggctgctgaatttatcaaatactttttttagcatatattgaaatgatcatatgattgttgttcttggctctgttaatgtgatgtatcacatttattgatttgtgtgtattggaccatccttacatccttgggatgaatcccacttgatcacggtgaatgatctttttattgtgttgttgaactcagtttgctaatattttgttgtggatttctgcatctatgttcatcacagatattggcctgtagttttctttttttgttgtgttcttgtctggtttttctatcagggtaatgctggccttgtagtatgagtttggcagtattccctccttatccatctctttttttgaatagtttgggtagaattggtatttgcttttatttaatgtttggtagaattcagcagtgaatccatccggtcctgggcttttctttgataagaaactttttattactgtcaatctcattattcgatactggttcatcggagttttctatttcttcgttgttcaatcttggtagtctgtatatgtccaagaatttatctgtttcctataggttttcaaatttgttggcatgtagttgtttgtaactctaataactctaataattctttgwatttatttatttattttggtgacaagagtctcacactgttgcccaggctggagtgaagtggcacaatcttggctcactgcaacctctgcctcccgggttcaagcgattctcctgcctcagcctcccaagtagctgggattacaggcacgcaccaccatgcccggctaatttttgtatttttggtagagacgggccatgttggccaggctggtctcaaactcctgacctcaagtgatctgcccacttcggccgcccaaagtgctggggttacagacgtgagtgccgggattacagacataagccaatgtgcccagccagttctttgtatttctgccagtctcagttatgtatcctttcatttctgattttatttatttgggtcttcactcttttttttttatttatttactctagctaaatatttatyaattttgtttgttttttcaaaaactcaacttttcttttgttctcctgtattgttttattactcttgattttgtttatgtctgcactgatctcttgcccttctttaaattttgggttgggtatattcttgctttttttagttccttaatgtgtatcattaggttgcttatttgaattctttctacttttttgagataggcttttattgtcgtaaacttccctgttatactgcttttgctgtatccaatagatttttgtatgttatatttctatttccattcatttcagtaaaattttaaatttccttcttaatttmtttattgaaccagtggtcatccagcaatatattacataatttctatgtgtttgtgtattttccaaagtttttttgtggttgatttctagttttattccattgtggtcagaaaaaataatgtgatttatagttttatgaatttgttgagacttgttttgtggcccaaaatatggtatattctggagaatattccatgtgctgatgagaaactaatgacgttgaaatgtgacctcagagttggaggtgaggcctggagggaggtgttcgggtcatgggggaagatccctcatgaatgtcttggtgccctccctgtggtaatgagttcacatgagagctggctgtttaaaggagcctggcgcctcctctgtctcgccttctccctcatcacatgatgcactggctccccttttgccttccaccatgggtaggccttactagaagcagaggccagcagcatacttgctgtgtggtctgcagaaccatgaaccaaaataaaccacttttctttataaattatctagcctcaggtattcctttatagcaatgcaagaacagactaacacgggcttttaaaaaatgtaggccaggcgcagtggctcatgccactttgggagcactttgggagccaaggcgggcggatcacgaggtcaggagttcgagagcagcctgaccaatgtggtaaaaccccatctctgctaaaaatacaaaaattagccaggcgtggtggtgcacgcctgtaatcccagctacccgggaggctgaggcaagagaattgcttgaacccgggaggtggaggttgcagtgagctgagatcgtgccactgcactccagcctgggtgaaagagcgagactccatctcaaaaaaaaaaaaatgtaggctttgtttttattcagctatgatgagaccaacagctcaggagacacttgctcttgaaaggacagtttattggctgggtatggtggctcatgccaggagtgcaagaccagcctgggtaacatagcaagaccacatctctaaaaaaattaattaattgggtatggtggcacctgtctgtagtcccagctacttggcaggccgagatgggagcattgtttgagcccagcatttttgagtcaaggctgcagtgagccattttgcaccactgtactctagcctgggtgacagagcgagactttgtctcaaaaaaaaaaaaaaaaaaaggagaaaagacagtttgttacattcccaagagagggggccaaccaygccatgcagggtcacacaggggaagcactagggtctgtgaggaggcagagggagtcaggggaaattataggcaacaggctttattgtggtttctgtagaaagaaactggtgaggtagggtaagaaggcttagaattagctaatttgaatattctcagtggactctggggcaaagtagctgtccctggctgtttgatacctcccctgtgtgattaggacaggtggatagtggcccagagtgtgagagcccaataaaggaggtgattgggagaggggctctgtgttggttggaatactgtgttcaggatgccctaatggagtactatagtatgggtggcttagaaaacagaaatttattttctcacaattctggaagctggaagtccctgattgaggtgcgatatggtttggctgtgtccccacccaaatctcaccttgaattatagctcccataattcccacatgttgtgggacggaacaattgggagataattgaatcatggggtggtttccctcatactgttctcatagtagtgaataagtctcacgaratctgatggttttataaggggtttcccctttctcttggctctcattctctcttgcttgctgccatgtagaacatgactgtgttccccctttgtctcctaccatgattgtgaagcctcccaaccacgtggaactatgagtccattaaacctctttttctttataaattacccagtctcaggtatgtttgcattagcaatgcgagaacagactaatacaaggtgccagcaaatttggtttctgtaaagccttgcttccttgctggctttcttgtgtgactgccctctcactgtgtcctcacgtggctctcctgtgcatgcgcacagtgggagaaagcactcttgtgtcttctgcttcttttataagggcaccaatcccatgagattagggtcccacccttgtgacttcattcaaccctaattacctttcgaagggctcatctccaaatactatcccactgggggttagggcttcaacataggaatttttagggtacatkattcaatctgtaacagttgttttgtacttaaaaagcatgctgatggacaacttgttactatctctaggaactggctagctctgggaggagtagtctctctagggtcagcaaggacccaggtgccaaagcatcaggaaatgaagaaaataagaaaccatgattaacacacaggtcttaatcagtcatcagtggcaataaacagacaataaacaaataggcacattttaaaattaacatgcatcaaagattttattttctccttaactagttaaggaactagtaagatgttaaaagctgttcaaatgagaattttacctgtgctttaccagacaaaatccatttgcactgccatgaacaggaatcattttcattcctatgtaggaaacacgtgcattgttatcagttttctaggatttaacttttttccctacagagatgtaaagtagccttggcaatcacagatgcacactctacagaatccagtaattccacagcatctgccagacagaaccaagctctgctctggaaggccactcagtgatcgcttttgttatttccaagtctttgacagtttttctcttgtgactataaatattctccgaagattattcttgatcacaaaaaaggctgatcttcttataatttgcctggctatttgtacagggtgcagtaagagtgttaattaagcatattggcctccttgagtttactgtgaaaatctagagcttgcattctcaatggggtgatattgccccccagttaagtaaaactagttcttgggggacaaagaaaattttactttttcattataaagcatggatatgtataacacacacacacacacacacacacatatgtatatacatatacatatatattatatatatatacacatatacatatatattatatatacatatacatatatattatatatacatatatattacatatatcatatatacatatatattatatatacatatatattatatatatcatatatacatatatattatatatatcatatatatcatatatacatatatattatatatattatatatatcatatatacatatatattatatatattatatatacatatatattatatatatcatatatacatatatattatatatatcatatatacatatatattatatatattatatatatcatatatattatatatattatatatattatatattatatatatatatatatatacatatatatatattatatatacatatatattatatatacatatatattatatatacatatatattatatatacatatatattatatatacatatatattatatatacatatattatatatacatatatattatatatacatatattatatatacatatatattatatatacatatattatatatatacatatatattatatatacatatattatatatatacatatatattatatatacatatattatatatatacatatatattatatatacatatattatatatacatatatattatatatacatatatattttatatatatataatatatattttatatatacatatacatatattatatatatacacacacatatacatatatatggcattaaagtctcgttggggtgtgattaggaaaaaagtctaaatgtccttgggagtaataataataataataataataataataataaagattgagaaacactggtcttgagccacacagcactgagcagctactaaggccacatcattaatttctgggagctgtcatagggatttctgattggagttttacaaatccctattatttgctatcccaaaagtaggaaaccaagaccaagactccctgtactggatttcaccagtagaacttacacatttgggtgaattcctctcttcttaaggtccccaaatttgctaaggattctggactgttgggagtgacctccctaccaccagaggaggaaggacattttttcctgagggctttgcaggcagtggctccacctagaaagtaaccctcattccttaagagtggcttgtcagccgggcgtggtggctcacgcctgtaatcccagcactttgggaggccgaggccggcagatcacgaggtcaggagatggagaccatcttggctaacacggtgaaaccccgtctctactaaaaatacaaaaaaaattasccgggcgtggtggcgggcgcctgtagtcccagctactcgggaggctgaggcaggagaatggcgtgaacccgggaggcagagcttgcagtgaggcgaaatcgcgccactgcactccagcccgggcggcagagcgagactccgtctcaaaaaaaaaaaaaaaaaaaaaaaaaaaaaaagagtaacttgtcatgcctgattaaaagtattctcaaatacgaccctccaggtgtgatctgggatgtgcaatctatctgcccaatcccatcctaaaccaggtcattttcagtggtgataagcgctatcatgcaggaattggaagagagtaagaggcaattttcctgggcccacagactccctcaatagggcaaaggcaaggtgagcctgccttctttgggctttcaagatggccaatgccccatgcatagagaaccttgtgtgttgatcacttaacacctgccttgccagatatttactgaaatcgggcaggaatacagatacgcaagtcatattgacagggccagtgggatgagaagggcaggagaagcgaagcaggaggatttagaaatggaggaatggggatctaagatttgtgtgtttggaggctggtggtttgggtgtagggaaggaggacagtgggagagagaggtggacttgtgctgggggcagggtgaggtccattccacccaccatacttgtttcccagatttccacccagcgcaaggtcaacatttacaacatcctccaggacatcatccagcaggagggggagctggaggagcagtgcgtgcagaggctggtggccattgcctccaaggagatgagggagatcccagaggtaggaccccaagctccatcggtgccttccctctgccagcccaggagctgggccacggggggcctggcccaggatgcccacagccctgtgcagttacctctcagagcaggggtaaggctgagcccaagggaaccaggaggggtggagagagcctggggtaggaaggttttcctggaggcccggctggtggtggtgccatatgtccctcttctgtctcctgcagatggagggctatatgaaggcagaggtggccagcgacacactggtggctctgtcccgaaaccacttcagcttggtcatgtacgagctgcagcaccacctcaagcccctcaacctcactgatgaatttgtcatcatcacactggccaagctggccaacggcaatggtaggggcttgagggccctcagccgggcccagtgtgcccttctggtctctgcctctctctgcccctcccatctatccctatgttcacctcttcctcttacctttcatttctctctttttccctctaaaaytgattcattttgtgtctgcagtccttttgtctcttagctgttaagattctgtgtgttctgtctctcatccttcttccccctctctcctgctcccctccacctgcattgttctgtctttccatctctttcttttttaatttccttccttccttcctctttcgtttccttttttattacctgccttacttactccttcctctccctccccctttttctccttcttccctcccttcctcccttcctccatcccacccttccttcctccccttttcttctctccttcctccctccctccccccttccttccttccttccttccttccttccttccttccttccttccttctccatcctccctcccttcctttcatcccagaagcatgcgctgagctcctactccatgcaggccttgtggcaggtacctggccactacaatacataagacacacatggctccggtgctcagaaaggaccaacaggcaaacaaggaaatagacgtttataacaggaggtgacgggtatgaagagagcagccaaatgggcgtttgagatctggctaagggaggggacctcatctctgcagcccttgttgaggtagcgatatttcagctaagacctgaaggcagagaggaggatgtctgtgtgaagcataggaccgggagagcattccacacggagagaacattgcagaggctctggggcagagaagagcttggaatctctgaagagttgagaagtggctgtggctggagttaaggagtgagagagagatgagggggagcgtcaggcagggccttggggacgtcacctcgggcactaggaagctatcgaaggacattaagctgcagggtcgcctggtgaatgcaggttgtgggaaggcctttctgactgctgcctggatggagagtactaggaggtgggtacttgtgatggtggctgggctgggaagcatgtggtgaggggtgacaggtgggaaggggctctgagacgggacctgctgaggacgggggaaggagcagaggtagcaagccactgggagcgtgttggcctcctttcccgagctagaagcactgagagttgggagctcaagtgaagaacttcatgctgtgtgtggagctcatgttgcctgtgggagcccccaggggagaggtgaagggggcagttgatttgtggcgcggagttcagagggcaggtctgggcttggctttggttcttggtgacctcagagtgcaggtgatgttcaaagccattgatatccgggagtgaaagtagagagaggacccagcccggaggggtcctggcattggcaaggctcgggaggagtcgtaagagacagcgtggaatgtgaggcctggcacagggagaacaatctcaaggggtgmaggcccccgtgatgcccatcctgccaaggggtccagtgagataaggctggagaaggcgggaggtggaagagcttcacggcttgctggggataaaggcctggatggagtgggaggggaggaasggaaggcaggcctggaaagaggacaagggacagcagcgagggggattattatgaagtctgaagatgggggtgcactcagggtgggtgaagtggaggggcctgcctcctgttgcagggtggcctgttacggctcccttccttcatccgtctgctctttttctctgctggcctcgtgccttctctcagttccttgctctcacctgctgtctccctgcttctgtgttcgcccaagaacgtttgtgggacccctgaaggaggctggcctgtgtccgggaggatggacgcactctgggggctgcttctttctgcttcttgcccctccttccctggggctcctctgtcctctcttccctccctctctcggacctcctcttccttctcctggtcctctctcttcttccctttcctccccttttgcctggctttcttcctgtgtcacctgcttctagctcactttttttttttttttgagatggagtcatgctctgtcgcccaggctggagtgcagtggcgcgatctcggctcactgcaagctccgcctcccgggttcacgccattctcctgcctctgcctcccgagtggttgagactacaggcgcctgccaacacgcccggccaattttttgtatttttagtagagacggggtttcaaccgtgttagccaggatgacctcgatctcctgacctcgtgatccgcccaccttggcctcccaaagtgctgggattacaggcgtgagacaccgtgcccttctagctcactttttaatgcttttctgactcctggactatttcctgggccccagccaggacagagggctaagccagctctggactgttaggggttggaggtggagggcagcagggttgtcctctctgccttctctctgctcacccccagccccaacttcctgtaatcatccctcacaacctcacagtgtttgagttcatgccatacatgggcatcaccctggctaccatattcaccatgctgagacttgccaatgaagccaagatacgccaggcgatctgcagtggtgagtgtcccacttgagcctgcaggtctggctcgatcagggcgccggagggagactgctgggtaaggagcagatggaggggttgttgaaaaagaggtgcactgttcacttgttctccaaaggagtttgcttaatcttttacttcgtgtggcctctgattggctgcctggggcacaagaggctgagacatggtgggggccttttagaagatcccggcttagagggaagaagctgcaacggtgactccatttagcttgctttgtaattaagcacttcagttcatgagaccacagaacagcaatgagcattcacaggagagggagaccggggaaaacggctccatgtggagcttgacggggactggtcttagatgctatttcaatctgatcaccttgccccagattttgattacttaatgttcttgtgggcttataaaaagccctagtgcctgagaaaaagagggccacatgtgttcactgttcactgccctctgacctggaatccccaggatgtgggcagggtcatactccaggcctcgcccttgaccccgtctctgtccttgaaggagagggacccagacacccccgagtgctcagttctcacacacacaggcacgcagagtaaaaatgaaggtgctgtggggggttggaagggcagggtgcagcctgctcgctacggcaaggcatgagcacttccactcgggaagctgggctgggaaggcttggttctgcttccagcccctctggcgccaagtgcattcccctgttgctgttggtagccatggagaccttctgtgagacggtgcagttttatctgaagcacctggaggagagcgtgtaccccgtgatgactgaggaggagtttgccctgaaggtgttccccatgtatcgctacttcgtgacagtgtggctgaggcacyacaaccccgaggtgagatgcacccctcttaggagggcctggtggtccccaggccacagctccccagcctgtggggccgggaggtgctgagggaccgtcgggtccacacttactcccaggaccctagagggcagtgacctgactcatggcagagccggggaactcatggatgctgaacagctgggacctaggagcctcatccacgaggccaggcttgatgaaggttggtgataatcctgagagcacttgttacatgctgggcactctaccagcgtcttacccatgggagctattttcacacccactctgtgatataggactagttgacaaatgaggaaactcaggcacagaggggttaagtacctgctcaaggtcatgtggctgctaagtgggagggactcaaacccggccgcctgtgcaggaaagaccttgctctgcttctgaggygccttctgtcctgtgtccttggattctgtggctggggctgaggtcactggccttgctggagggtggtgagacaatgcgtcccagagctggtttctggtggcaggtgaagctgggggtgatcaagtccctgaagcccatgctcggcctccttctgcccaacgatgacctgcgggagcaggtctacgactacatccccctgctgctggcggagtaccagggcagtctggaggcgctcttcgtcacgcaggcgagtggccaggcagccacggctctgggcaggaggcttagggaattgggggctcccaagtgtttaaaggggatgagtgggagccggggggatgtcagatattttgacactgtgtcaggaacccgacatctgtgccctgcgagggaggggcgtggagcctggcacccgtgggactcatgggaatgaacactgcccttccgggtggaagggaccaggtgctggtccctcggaggctgcagtgaggctgtggcctttgcattagtttgttagggttgctgtaacaaagaaccacacatgcgtagcttgaagcaacagagatgtattctctgtacgtcctggaggtcaggagtccaaactcagggtgtcggcagggctgtgctccttctgaaggctctaaggaagcaagctctcttgcctcttccagcttctggtggccccacatgttctgtgactgtggcagcatcactccaatttctcccttcctcattgcgtggcctttccctgtgtgtccctcygtgtcctcttcttacaaggacacctacccaaaatccaggatgatctcacttcgaaatcctgaactaattccatcacaaagaccctatttccaaataaggtcacattatcagattctgggcgagcctgaattttggaaggacaccggtcaactcaaggcagccttggtagaggggtgagatgtgtgagatggagccgttgcagtgttccgcgtggagctgtggatggggctggtgcccatgtaaagggatcactcatctataaggagggtgtgggtctcagctcttaaagcaaggagtggaaagggatgtgactgatttaggagccatctgtagatcattctggctaaataatgggattcacttttaagtgaaggaggccttgaatgccacactcakgggcctagcgcagcacttcccaagccttgctgtggttaggaacaacctgggggctgggtgaaatgcaggcttggattcagcaggacyggggtagggcctgagagtctgcatttctaatcagctcccagggaatgctggtgctcagtgggtcagtgggcccctgagtagcgagggtctagagtttgaccttgagttggtagaaggtcacctgccaccatttgccaatccactgcaggtcttgaggcagatcctggractgtcagtcaccaccaacacccctgtcccccaaatgcagctacacaccattttcacagaactgcacgtccaggtgaggccagcaagctcagctggacaagggcattctctgggtggatcagcaggaagctggcggcgggaggtggcctggcccacaactcactcgcgtgcttcctktatcctgatggggtatgaggctgtggtgcccatgcagccccaggtatggtcagctgggctgcccctgcacctgtgtccctgtgatctcctccagcctcactgcacgtccctyaccaggtgtgcaacaaggccccggcccagcatcagtacagcagccagaatctgatggagatggtgcactgcttcgtagccctyggtgaggctctgcggcagggtgctccctgcctgccccgaggcctgcaggaggcctstaggagtcccggcccctctgagcgctgggcctgggactgccttgctgggcctgctctggacccggtgagcatgactaaagctgtccttccaccctgcagctcgctcctaccccaaggagctgatgaagttcttcttcagccagatggagacaaacaaggaggccgtccgcgtggggactctgaatctgattagggctatagtgagcgcagatggtgagcaaggcagggtgggtggggtgggcggggagggtggggtaggcagggtggagaacaagggaggcaagtttcattcatgttcgggcattgccacttcctagacactactgggtgggccaagaaagccaaggttcttggctgctttgcattttctaagctttaacctaatcagcactgtggcttaccctccccacacccaaccctctgagtccgaattgttaacccgaatcctcctgctaacctccaaagctcaatcagaggctggatataaggccaaactacaccacataggcataactctgaagccccgtggactcaatgctcaaccatagtctacacatctgattccaattcctaagcccaaactctaaacctagccctgagatttaaagagaacccctgtccctaaccaaggcactagctcacrctctgcctttgtgtgaatttgaagaaggcccctgttgacagcatgcagccctacaggtacataatggttagaagagcatgggcagctcccgctcagccctaaagttgggtagctttgttcagtgcacaaattgggcaactgtatgtaaagggccttgtgctgccattaaacctttctcttgaagaaatgcacatttaagcaacaatgaaatcctttttacctattcaatgaatagagatgataatggctagagttcacctggtcatttttctgtgaaaggccagagagtaaaaatatttttggctttgcaggccatatagtgtctttgacaattactcagctctaccattgcagaccaaaaacagctgtggactcctgagcatggctggttttgtaaactttatttacagaaacaggctgtgggttatactttgcttattgctagtctagggtgacaagaaaccacctgtgatacttcagtgacagagatgtaaatcaataaatgattttgggtgctcaattggatacggaccaacatttgcactcaacaatccaactttttgtcaaccatccaaaggacataatttcccaaaagtaattggacaaaggtgctcattaaaacattgtattaaaagcaaagcatgagaaacagcctaaatgtttttctgtagggaatttgtggaataaacaatatatctgcataatggaatattatgcagctattaaaaagtgtgtagtcaatccactttttgtggaaaagctgccctctttctattgrgtgtattaagtgtagcaatacaacgtggggcagtatttatagcatgacyttagtgatgtggaagaaatctatgttcatttatgcataaacaggtctgaaggacaaaatctattaaaaagtggttattttttattttaattttgcaatgaacatatgctattttttctttcattcagggaaattagtatttgccctaatgctctccctcccctttcccccaaccctctagcaggcccctgtgtgtgatgttcccctccctatgtccatgtgttctcactgttcaactcccacttatgagtgagaacatgcactgtttggttttctgttcctgggctaatttgctgaagatgatggtttccagcttagactggataaagaaaatgtggcacttatacaccttggaatactrtgcagccatatactatttttataatcagaaacagtttgcatcttcaagatgaaaactctcaattgtctcatgctcacttggtgcctgactgccaccttgtacctgctctcatttcctttttcctactctggggttgacttagtaacacctagccttgagtgcagtatcatcctggatgtctaactctacctccatccacaccagccctctccagaactttctcatggctctttcttgcccctcttaagcttcctgctttagttgggtgtgctgtcatcagttgtacaactagcaaacacttgcccagcccttacggtgtgccagactctgtgttaactctgtgagagaggcactgtcattatccacactttacaggcgaggaaactgaggcgcagaggggctacgtaattcactttacgtcccacagctgggatgtggtggagccaggatttgaacccagggaaggcctggtgtcaggacccatgctcttcacggtggtgctttgcaacctctgtgtgcccactgcatgcccacttcatgcccagtgctctgtgcccagctgcaggacactaaagagctcgtaggcagagatcttgccctcaaggcgagttcacctgggttcaaatgagatacacacaaagcagtggccaagggaacgaggcgtggaaacaacagaggggagggagatggccagggagagcatggccagggaggctcctaagaaagtgcccctgagcttggagaatgtgggaggagacagaacgygaggcmctgatgtgggacgagccacctgacctctccctgagccacagccctccagcccacccagttttcctctttcagagcccaggatgagtatcagggccatctacctggctatccgggtagtcaagaacaccatctctgatacccggtccaaggtaacagggcagagacctggaaatggggggcactcaggggaccctgccagggaggcaaagggaagtctgggctctgggaggcagaggcttttgatggaaaacccggctttccatcgggtctcgactggggctgcagaatggtgaggccagtgaaagctgaggttccactctcgagacctcattctctccatggatctagagtttttgagtggtgtgtctcaggcaccaccttggacccaacagaggccgagtaaatccagctgcagctagagtcacttggctgtcaagggttttgtgaggtctttatcgcatgtgaaaaaagcaactaaggggtactcctctacccatcctcaaaaggctgaaaaccacagtcccaggctccatggcagccacatccaccttggagtggagcttggttctggccrtgggctggggaagggaggtccggcatagtgaggggtctgcacagcagttttgaggaacatcagagagggaatggaggagaatgggggctagagatttaggcagagctgtcttcagtccctggaggctgtggagggaagcgagaagaggctcgttctgcatctccttcacatagtgattctcatcaatggagcaagccccagggggtccaggataacagatgggctccccayggcaagggctgctagaatggagcagccgaggttggaagggagggagggagctttgtgtctctccaaggctcaattaggctcccaggtgggcatgctgcagagtgggacccctggatgaggcagggggaggtggacagagtgggcagtaatcaggtagtccctgaggccccttctagcccagagcacccccaattcctagctctctatgtcacaggattgggtgccttggagcccaccccaacccccagcatgtccacggtcctgtcccctcaggtraggatggctattctccacatcattgggcagttggctctctgtggctaccaggagagaatcaaaggctggggcctgaagtacctgtctgtgcagctgaccttatccacctacaaactggtgagtggccctgatacgcagaccrcagagcagctggacttggaaatggtttccacagtgctgaggggagaatgccactcagcrtacctgtgttcaaacctgcgtatccattcatgacaggagttcatagacacagtgaacctgcaggtgacaatgtgtggggtcctagatatakgcacagctctgagcattctgtagactcagtatctgggcatggagcccctggggagtgaggagaccacacctgagaccacgacaaacctctgctaggccacaggtgggaatcccttggttctttcttccagacaaatcgccgggagaagttttatcagagggacttggaggagaggatggtccacaaagtcaccatggacactgtgaagatcattacctcttctgtcagtgggatgaccaccgtgagtgggccctgccccacccgcacagtgggtcaccacgccaggctgggggtgaaccacacatgcccagaattccacatctttgcttcttccgttcctgctgtctggagtgttgaggggccttcctcttccagttgcctggaattactcaaaacccagttccaaagccaggtccttgatgagaacttactcttcatctctgtacccctagaggctgggcagtgcacgacctcagcatggctggcagtatcagtctgtatcatttgagcaagtacctgaaatgtgtccattactttaaggcccgtgtgtgtgtgtatgtgtgtgtgtgtgtgtgtgtgtgtgtctgtgtgtagaccaatgattttcatggtttaattttgtaaacattcattgagttctaactctgtgaaagacaggacagaggagtgtgcactaggaggactcagtatgacgggaaggagtggaaggagttcacagactatgggagaaacaaatgtgtcaacttttaattgcaacaaaatgtgacgtagcaataagaggaaaaatgtaccatgagaacatcaaggagggaatgattaytcactgaggctgcaggctagatgatccctgtccagcgacagctttttttaattgcagaaataataataatcatcatcatcatcatagctacagtccatgtggcacccacatatagcaggtatactgtactaggtgtgcaacctgtgcaatcttgtttaattatcccagcaactacctgcatagagggtagttattatcctgattttgtagatgaagaaacagacccagagggattcattaatttgctcaaggcctcatatctggtaaacaatagatccaggattgaaattcccttggaattcaccatgctgtctttatggggaagcccaggaactgggagattctagtcctggtggctacaacaggttaagccattgcacttgatggttggtagcacaagagcctcaccttcaactcctaggggtgggggtggggtggagagggattataattagtcgggggtgttgaacggtcacccagggagagaggagatggtggggtgaagttggaaacacagctccaagaatccatatcagtcagggttctccagagaaacagaaccagtagaagacatatatagcctggtttattttaaggaagtgactcatgcagttgtgggggctggcaagtctgacacctgtgtggcaggccagcaggctggagactagcaggggcggatgctgcagccttgtggctgaatatcttcttcctcagagaaatcccagcgtttcactcttaaggcgtttcacccacctatgttattgaggataatctcttttatggattatgcactttcgtcacacctacaagctaccttcacaacaacacctagattggtgtttgactgaatgactaggtacagtcgcctagccaagttgacacacaaaactgaccgtcataccaggcatgcacaactggatcatctgcccggggtgcccctctagaggacttgggatcagagggagggccctggatgagaagggtttgatgagtgtgggtttgtatgaggctggcagtgataggagttgggcaacagggatgctggccccagcagggactagcagactctcttgccacatcagggtgggtgacacttaaatgcccctgacaaagactggatttggcggtggagccagttcagggctgagactgtcaggggacatctctggggaagcagggatgggatggcaccatggcagagcctgactgttctccttagaagcccagggcttgggctaattctgagcccctttctctcccacccctaccccaggagttttgggtgaggctgctgtgctacatcatggagacagactacgtggaagctttgactcctatctgtatcagcctcacaaacctggcagaacaccagctccatggccaggatgtggatgtcagcgtggctggcaagagcaggcaaggtgggcaaagttcctgtccagctgattggattgggcaggtgggctgkctccttgtctgggaatgcccacccctctccacattcctcccaccctcattcccccttctcctggaaacatccaagtccaaattaatactattaatgcctacctggatattaatgcctacctgatcatatctaggtcatgttagaattgtgtaaacytcctttggatagctcactcctcatgtcctgtccccycagcccacagccctggtccagatcccatccttgggagctcctggcccagcctttcccatgcatgaccttactgggcctctgctctgcctggcttctctgagccagctagagtaactataggcatcccatcctctgtagactaccctcactgtggtccactcagagtgggcactgttaacaccaggctctcaaaacaactatgcccacctaccatgcttgctcctgtccccttccctccaactctggccccaagggcatcgctggtgatgtaggtgattgatggggtcctttaggatccagggctagcaaagggcagagcctgctctctgactttgatctaaacaagctggccagtcaatcctctgaggtcttcctcatgcccctctcactcttgactctggttgagtcctctccaggtcccctgcactggcatcttctcagcaggcctggccgtgcccttgtccatttgtttgtgcsctgttggtttgcttttcctgggctcattggctcccaaagcctgtggagagagtcaggagtgggtagaatggcagtgtctaattacttttggctcaacagaggatggggttcacagtaggagacaaaacactgtcatggaaagtcttggtgtccactacaaaatgcgcatggcctgaaaagagcatcttctaaacctcaacccattagcacgattctcccctcttcccaggataagtgaaatgtaatgatgttcttaggaaattccctgtgccaacccattctccattctgggggtttggggaacaagatcatgttggggaggaaccttctagggtaaagttcctagatggggacataggagcatgtcctggtacaagccaggaaggctcagctggggttgcatttccttcaatcagtggacctgcctgcacctcagaagctgctggcccgtctcctggtgagtggctgacctgcaccatgccctggcctggcaaggccatgccctgtggcacctcttctttaaactcctaattcccagagccccaggggtatgaggaagctgaggtgcaatgagggagtttgatgcttggcaggacagatcattccatgtccctgaaattcctctcgagtttggtagaagcagtgcacttgtaataactggggagctgacctggacctgcttttagattcctctgcccaaagcatccccactacactgccaatgcctgcctacccctgggggttggctcagtccaggacccatgagttcttctctttatgttaactgtggacactcatccatgttgcactgaagcctggggtggggagggagcccaggtctagcccccatcccccatccttcctgtagtgtcctctgcaggtgcactctctatttgaaatccctatttgaaaaccaccgatcttgtccagctcctccctttaaaaatgaggacaaagagctccaagacaaggagcaaggtgctcaggtgctacttcactggagccttggtgccctccaggtgctgatgtcatcaccttacaagggggagggtcgtgggatagccatgctcaacctcttgaggaccctgagccagagcatcgcaccctccatggccgacatgtgggagctggagattgcgctactggtccggtacctggaaggtgaggttcctggggagcccatcccaagccaaccctccaatccgtgtatgtgctggggttctaatcacatgacttgaataacgagagctgaggctcacagttgacccacacagccagcccacttttgtcctgagaactggttgagcagcttgggaaggtgaggagtgcaatgcaacgtgtgatgtgttcatccatggagggcctcaaatgccacgctaaggaggcatagagggccttgaataccaggcttaggggagcagtggaagaaagtggcatgtgtgaccatacatgtgttcctgcagaacatactgagttcacttgggatcagaaagcctgggaagacaagctgattcaggtaaacgggtaacaagtttgctgaggcctgggaggaggagaaagatgggagcagatggaaaggcatttggtgggctgggcacatgaggagtttagaagcccctaaaggacatgttctccttctgtcagagaagacttgggagttacaaagtctatagctgtgtccatccccaggggagaactgagagaaccttccatcccgagagccaggtggccaggagggcagcagggagtgacaccccttctgctagccgccagagccacagccattcctcagacccacagatcattattagcactggatcagggatctatggacttagtgatctggagatgtgggcaagggaagcgagagagggcaagtcagtactcaaggtcccgtagcattcccagagcccaggcaagaacaaggatgaaggcctttggcccttctcaccaacgtcttgtgcctccccagtttctgcgaaactccctcaagaagacccgggggtctagctggagcctgcgcttgagyaaagagctgaacaaccagattgcgagctttgacagcccctctctggagaaggtttgtcttcatagggacaggagagtttggacaaggagtagactccaggggtgakggagtggagaggataacaccgtgtgtgtgagatcagctggacctgtggctgtttacagggtcctgggaggagaggagcgtggtctggattggtggttttagttttgttttggtttatttttttgctttgttttgttgatcctccagattctggctagcaatcacatgtgtgtatttctttgtaaacacaaaactataccacattgctacaaaattctaaaacatttttgaaagaaatcagtgagggtctcaataaatagaaagcaccccatgttcatggattgaaagatgctatagttcaaatggtgatactctccaaatttatcttcagttttagcatgacacctatcacaatccaagctagttcttttttttgatcctaaaattgatcctaaaatttatatggaaataccagaggctctgaatagccaacaaaattatgagaagaagaataaagttggaggactcaaacttctcaatttcaacttcttacacaactgcagtaaaactccttacacaattgcagtaaacaagacagtgagatactggcataaggatagattgataaaatagaagtgagagtccagaaataaactctcacatttatgggtaatttattttcaagaagggtgccaagacaattcagtggggaaagaatagtttttttcaacaaatggggctagggtaactagaaatccacatgcaaaagaatgaaattggatatcttcctcacaccacacataaagctgaatcaaaacgaatcacagacctaaataaaagaactaaaattataaaattctagaaaaacacaggataaatcttgtgaccttgggttaggcaaagccttcttagagatgacaccaaaaagcacaagtgacaaaaagaaataaattggacatcatgaaaattaaaacctcttgtgctaaaaataatacaatagagaaagtgaaaaagaagcacattaaggaagaacatgttcttccataacagatcaaagacttaagtgtacaaaataaaatagaaccatggaacaactagaagaatatattgatgaatatttttataatgttaacatggaatagcctttatatgcttgcaaagaaaccaagaaagacgagggaaaagaggtaaattttatagatattaacattttttgtgtgcttctactacttcctgtttgttttctcatctccaraaacaataatatttaccttatggagtcgtggtgaggatttaatgaaatatggatggttgctcttattatgtctccaaatataaaacaaaattcttacaaataacaaagaaaaagcccaccaaaaaatgggaaaaagaatatagccagaaattcaaagaattaaaacggatcatgagaatatgaaaagatgatcagcacaactaaaaatcaaagaaacacatcacagtgagaatgttccacttctcactgatcatgacgtatgttggggagtaggtggagaaattggtgcgcttaggtttgttggagggagtgtaaattggttcaacttacacagaagttgaacaaacttacccctccccctttaacacgtataacatgcctgcccttatgtagtctgacctcccagaataacctgaacacttattttatttatttttttgaaattttttatttccataggtttttggggaactggtggtcttcggttacatgaataaatgggaatttgcaagattttggtgcacccatcgcccaagcagtatacgctgcacccaatttgtagtcttttatcccccacccctttcctaccctttccccctgagtccgcaaagtccattgtatcattcttatgccttagcatcctcatagcttagctcccacttatgagtgagaacatacgacgtttggttttccattcctaagttacttagaataatagtctccaatctcatccaggttactgcaaatgccagtaattcattcttttttgtggctgagtagtattccattatatatatatataatatgaactgatatatgtatatataaactgatatatgtatgtatgtatatatcagtttctttatccactcattgattgatgggcatttgggctgcttccacatttttgcacttgtgaattgtgctgctgtaaacgtgtgtgcaagtatcttctgcacattaaaataaattgaaaaatacgtagaaaactctctacaacagcaccccctgaaggctggctgtagggaggcctgagctccttcctcccttctgcctctccagggctttctgtaccgggccttgggcttcaccttggccacaggcctggaggccagcaaggtggaggtcctgctgttggagctgctgtacaagacggactacagcaatgactttgacagcgaggtgagggtgcctgcagcctcctcctgtccaccagatgcctctggaccctcggggacatgtgtgttcatgtggctgcatgcgttttgtgtgtgtgtgtgtacatgtgtgtgtgccttgcacgtgtgtgtgtgggatcctcctctgcccactggcccctgccctcaccctggctggctgggtctccctgcagggtgtgattatgtgctttggcctgtgtgcccggggccaggtaaaaacggtgctgaatgtgcttcatgacttcgaggagaggatccaggagtcagagcagtcctggcagatcagtgcttggcgggtaagccaccttccctccacaactgggtcttgggatctcttagcacagtgctctgggcactgacacaaagtcctttctagatctcagtaggaaacttgcctcacacggagtctcctgtcatcaaaatggctgagacattgtcttactctgagacctcctggacagagcttttgctattggatcatcttaaaaatgcagggtgggcctttccaggacccagatactgtcacggagtcccagccccttgctactcatggtggggttctcagactggcagtgggggctccctgggtgctgattggaaatgtagagtcccaggccccacacagacccacaggatttgaagaagctgttcaggtagtgctcagtgggtgcttgacactaggagctctgcctcagtggatggacggtgctgggattgaggggctctagccactgttgcagggtgagaacactgaagcttgtccattggcgtgcggctggttccctggtgaagccagtatttggacccagacagcccatggccctatcctctggaggctgcccctccctgccacaggagatggtcccaccagctggctgagctcctagtgggaaaccatctgaaaccatcacccatgcctcaggctttgcccttgacctggaacacttgccctggggtctggttgtttggatgaagaaaatcgagagagtcccaggctttcttccagcttttctgcaaagaggacccgacacctagatttctactcagtctggcagggcactggggcccctgctccccatccacagtgggtttggtggcctccaacatctcctcccactcagagattgttctgagggtgtgagcaccgtgagggcaaagtggaggctgtcggttcctgctggctctccagcctcatgtgtgcctgacccatagccggtgcctggtaggtgaaggtatgaggtgtgcaagcagcctctgtttaggggtgttcacttgagcacctccccccacaggtgatgggtggtctgggcgtctatagccctagtctgtcttgctcattactgcatgcccagtgcctggtgtctagtagatgctcagtaaagatgcactgagtgaatgaatgcatgcatgaaaatacgatgaacatttcaggcacccagaaaacagtcaggtgaagcaccgccggctgactcaatggatcctttggttgtgtggccagagaccatcacctgcatctggagcagcccctgctgcccccagtggttctttttctctttggcctcgtagaaggaccatccctggaggcgggagacagtgaaaagtgccctcatggtgatgtatagctgcgtggcctcctactgccacccccagttgctcctcaacctcgtggacagccccatcaccgctaagatcattcaccattatgtcagcagctgccaggtagccccatctgctgcctggggggatgtcttctggaccaggctggtgggtagtagccttctggcactctctgggctcctgcatccctacccaggggacatccaggcatcttacctgatgcccagcacgtgggaagcccattgcccaaatgtgctgttctctgtgctttggtgtcatgcagaggggctggggggcgggttgaggatagcccctcttccagagtgctgggtggggtctccagaagccacaagatgagccccacctcttcccagccttacccactccctctgcccttgcctctggccctctctgacactgacccagaccctttcataaggaacaagaggtggggttgtcttcatagacatgcaaaggaactggctattttcttggaatggcaaggaggggaaaacacagagaataaagcaaaaactgtttttattttttaaaactatggcaaaatacacctaacataaagtttatcatcataaccatttttaagtatatatatatagttcagtggcatgaggtacattcacgttattgtgcaactgtcactgccatctgtctccagaattcttcattttacaaaaccaaaatcctatatccattcaacaccaactctccattcccttctcctcccagccctggcaaccacctttactcttcctgtctgtgtggctttgactagtccaggtacctcatctaagtgcaatcatatgatagttgtccttgtgtgtctggcttatttcatttatcataatgttctcaaggttcatccatgtaaaagcaatcattttctcaataacctctcctgcctctatggtaacacatagggctcggggcccctggtcactgaaggcggcccctgagctgctttgctgccctcaggaggcttgggaaggtggcatcttccgtggtgtattagttcgtgttaacgctgctgctaaaggcatacctgaaactgggaacaaaaagaggtttacttggacttagagttccacatgactagggtggcctcagaatcatggcgggagacaaaaggcacttcttacatggtggcagcaagagaaaaatgaggaagaagcaaaagtggaaacccctgataaacccatcagatcttgtgagacttattcactgtcatgagaatagcatgggagagactggcccccatgattcaattaccacccgctgggtccctcccacaacacatgggaattctgagagttacaattcaagttgagatttgaatggggacacagccaaactatatcacgtgtggacccaggtgctgcacctcacctcgtatccccgccatgtgcctgtggccctgccatgtggcaggtgctccattcatgtggtcgaaggacagagtgaggctggccatctctcagagcattcaacattaaacgctttcttcagagcagagggagtccaggagcagaagctgcagcttggattcttctggggctgctcacaaacattctctccctccttttccccttctgggctcaggacatctgtctcaaaatggccttcatgaagagtgttgtgcaggttaccaaggccatcaacaacatcaaggacctggaggactttcactttgcccagaagacgactcttaccagcattatagtggtaagctgggtggggcacctccttggtcctgttcctggttttggggtctaactccctgcggtgagaggttttcaaagttcctgagggcatctgcagagctctctgaagtccttccctgtcttggctctgctttgtcctaactgtaggagttctgagaatgatttttgtatctgataaagagtttcacagccagtcaactgtttggaaaccagggtgggagattctggctgtcctgggtcctgcagtgcccagggcagctggttaaggcctgatagacagagattccctgggccggcttggctgtagcttccctgtctctccgtgggagggccttaggggcagggatctgctggaagcaggacttagagtgaagccctgaaggatgcacagaaggatgtaagacaaagaaaacgtccactgtccaaaggctgatggaacctgtggggccgccaatgtccttaatccccaggcctccccactcatgtcattgccagtgccttggcctctcaaagctgcttgggttgtgctggaagtggcccttaagggacatgagattgggtggaacagaaggcaatgaggaggaaatgggatttatttggctctcactggccaggagctttgaacctgtactttcacgctagcctggagcagccctgtaaaatgggtctccaggtcttgttttacagagaaggggacttgggctcaggcagaggaagtgctggcccaggggcacacagcaagtagatgagcagcgcgagctgggagcccaggcccactttgggccctgctcccactctgctgcctcccctaagatgccaaaagccaaatggccctaaaaagaatgaaagagatgtggggtgttagacactttgggaagtgccaggtcttcctcatgctaacactggggagtgctgccgccatcatggtcaccaaaagccaccaccccctgcttgtgttggacaggcggtcatcaaggcagaaccgactgacaacctggtttctccagtgcgagccttggcgatggaggccctctcgcacctgaggtgagctgggttcccaccctcaccccatcccaaggggtagggaaaagttcaagaccattcctcggtgctccttcaggggttgtgcctcctttttcctctcctccctctgtagcaggggtctcacttggmggctccccagggcaatgggccagcctagatgatgggggtcggcctcagccactcttttctataattctcagccagatttcaagttgggtgcttctccttggatttatggcacatgggtgggctgctcttccattgattggggatattttgagcaaaataacagtgataacactgaagagcattgcaagcatccttcaagatgagtcaggctcagtgagtgagttgaagggcttagtcaactatttgttgataccactggtacaaaatgatctaaagcccaagacttaccttcctggagatgccaatccattggtggggagggggaaaggggaagaagttatggatttataaaattagtatttaaagagtttgggtcatctctaagaatacctcccctataggggaagattcattacttaggcgcatagcagaactatctgttactttaagctgcatcaaacaggcagattttaaaataaatgtcatgaacatcaactaagcacaatgatatgctgagtactgaagggacacagagatacataagacctagtcccagccttttaaggacttagagataagacagacacatacaaacaggattataggtcaaagctgactaacaggactgtgtttacaggtaaacccacacacacatcagcaaaaaaatatctgagaacaaaaaaaaaggggctactaacaaaagcaactcagtttatacaaaaggagctatcaagaggcttggtgcaaagttggcatttggcttttgacctgggcttaggcagaacgactggacttggcgcttcctaggagagtgtaatacaagacactttgggggagcaggagtttaaagcaggatggtggctctcaactctaggggcacaatagaactcatggggaacttttaacagtatggatatccaggtcccaccccagatcctggggcttggacgtggtccctgggggtccttaaaaaatcctcgaggtatctttaatatgcatcaagcttgagaattgttgatgaaggagctagaagaagaatgagctagcatgcaccaatcactagcaacttcctctggagggcttatcaaaacacagatggctgcagtccacccccagaatttttgattcagcaggtcttggctggggccatagaatttgtgtttctcataaattccaaggtgaagctgctgctgctgctgctgctggtgatggtggtccaagcattacccttgaaagcccctggactagcaccagccagggagggcagattccatagttgcagtcggcaaggagcaatggaatgtttctgagcagattaacaggttcagagtagacaacagcagataggagagatggccttggacccctgcatctccccttcaatcacaagcaagagtcactggacactggttactggtcagagccagggcccctggggagggatgcttgccagagcctccaactggagaagtaggcctcttcctcttctaggatgtgtttccgtgcccagattgggcagtggggcagcagaagctcaactccccaatgactgttcctctcttgtcactgcttcttctccagcaagctgaagcctttctactccacagaggaaaacagtgagctgatggatatcagcatacattctgtaatttctctccaactcccaggagaggacaatgagtccattaaggtaggtccctctgggatgcctcatttgctgggtcaggacctgggagttaacattaacatgggccatgctgagagtccaccttcctgaaccacctttgagtgtttagaggcagcggagtgtagcaagctctatcagtaaatgtaaggtaatgctagctgttgaaacataaaccctgaaatctcagtggattaacaacataaaagtttatttatcacccaagtcaagtcaagcccagctgtcaatgggagtggaaatggagctgctttgtgcaattattcaggaacccaggctggtggagtcctcctgcccatcctcagtgcatgaatcccaagatcccaatcaatgggtattgatacccagcatagatagaagaaagagaaagtctagggaagacttgagagtcattttgccctccttctattggctgaaacacagtcacatggctccacccatgcaaggagtcctgggaaatgtagtccctgatgagatggctgtttccctgacaacactgtggaagaggagaaggaatcttttgtggacaggtagccatccctgcctccagggcttggccctggatgaagaatcagaactgggctccaggagttcagtatcctgctttgtaaagtgaatccctcttaaatggttgtcttgtacttcacttgagaaaataagtgtcaagagctcagactgaacagaagttagtggatgactgccagacccctccctggcatgaactccctgcagggaggggggttgtgggtgcccctcattgccgcctatctctctctccctcttggctgtagaccctgtatgcaaatgccctgagctccctggagcagctgatggagagcctcctgcagaggcagctggaccccaaggggctgcaggagatggtgcaggtgagttgcctggtggcgggccagagccagggatggccactcctccccagaagctggactgagggccagactctggggaacaggggagtgcatgcaacattgttttagtgatttcattgttataaaattccagatctgctaaaaatttgcaaggatagtgcaaagatactcttcatgcagattcacagttcttaatactttgtcacattttctttctcggttttcttctgcctctgtccttccacacacacacatcttttgaaccacggatagctgcagacatccagagtaacagtactctcttatataacaacagtaccatgatcaaattcaggacatttaatgttgacacgatgcatgtattaaaactgatggcccatattcaaatttcatgaattgccccagtaatgtcctttagagctgttttctcctcgatccaggatataatccagattaggcagtgcatctacctgtcaggtctctttgttctcctttcatctggaacagcttcacagtccttctttgtctttcataaccttggcacttttgaagggtgctggttaggtttttaaaaattgggttgtttgctttctttttatagaaccttttacaggttttacatattctggatacaacccatcagatatgtgatttgcaaatattttcttctagtctgtggcctttttattgatttcccaatatcttttaatgagcagaagtttttrgttttgacgaagtmgaatttatctttttttcttttatggatcatgcttttggtgtcaaatctaagaaaccgtccaaagattttctcctatgttttcttccagaagttttgtattttcagattttatgattaggtctatgatatattttgagttaatttttgtatggtctgaggtacaggtcaaagtttattttaattttttgcacatggatagccaattgtttcagcaccctttgttgaaaagactgccctttttctgttcaattatctttgcacctttgttgaaaatcaaaggctatgtacgtgtgggtgtatttctggacacttatttggctctgttgatgtgtttgcctatggtacaccaatactgcactgtctcgattactgttatattataataagccttgaaatcaggatcagataatgtaagtccttagattttgctttttttttttttttttttgctgcatctcacagatcctgatacgttgcgttttaattttatttcggttcgaaacattttaaatttcccttatgatttcttctttgacctgaaagttatttagagattttcaaatatttgggagtttccgagaatctttctggtttggattcctaatttaactgcattgttctctgatgacatacttaaattccgtattttaaatccttttaaattgactgagatttattttgttgcccagataccatctatcttggtaaatatttcatgtgtatttgaaaaatattctgctgttgttaagtgtagtgtttcaaaatgtctattaggccaagttggttaatagtatttttcaggttttctgtctcctttttgatgttctgtctttttgttctatcaattattgagaaaaaggcactgaaatctctgactaatagtgtgaacttgtttatttctccttttggctctttcattttttgcttcatgtattatttagctatgttattaggtgcataaacatttaggattgttatgtctggttgatgaactgacccttattgtgatgacatgaccctgtttatctatggtaatgtcatttgctctaaaatgaacttttatatcagaacggcctctggggccatctggagtgcagggtgggctgtgctcctggcccttcattacaggcagacatttggagccaggccaaatgcaacagccaagcaccatcctggtgagaatgctggggatgctctttccctgcctacagcctcatctcccttcatgatggggcctgtctagaaccacaaggaagcattgaaagtcgatctgagtaggagggtgaggtgggcaaaagctggccaggaaagggctggccccaggattttaacacccactttggtgttctgggctctacccatagctcctggaaaagtggatcttgtcggagaaagaatgggagcgggaaaaggccgtgagcctccatctctatctcatgyggatttatgtccacagcactgctgtctgtgtgagtccaggagtccccagcccccagcctgctgctctgacatgcacagaaaaattcctgtgtctatctggaagatgagggaacacttatgaaatcaagttctgtccccagagggccccttgggagaggctgcagtgacctagtgccctgggctgggtcagggagggagagggtgggattgtggttggcagagctccaggctttgtggggcctgtggcttctgtagcggtgagagccctttttaagaaaaaagatacatagttatgaaccccacattggctaggaaartgaatatttactttgagaaaatcaagtgctgcaaaatcataaattttgcaaagcttgacaagtaccgcaacccttaaaatgtctagaacgacgtagtgtttttactgattgaccatctgacacagcctgatgagacttaattgtctacactttttggctccatgctgtttgactgtcttgtcctcaggatggctgtggcaggaggatgatggagtcagggtctggggcgcagggatggtcgtctggtgcagggagagaagygggctgggcaggaggaccctggtcctgggcacctggatggaggtggggatgaaggctcagcaaaatgaggcaggggccaagtccaacactcagtaacatgtgaggccagaggctgtgtggaaggcttcacctgggctctcatgacattccctgcaagaggaggtgccatcatcatctccactgtgcagacaggaaacatgagactgagaggcagagtaccctgcctggactgctcagctagtgagcaggaagctctgatttgatccccagggttcgttacaggaacaactgggcccaagttcagagctgtgaactgagcagagctgagtcagagggagtcctgatccagggcccacagatccaggctgctcagcctccaggggcccagctgtgggcaggggaggctgatgcttggacaggggacagacagtggcaccctccccttccccaaatgggtgtttcagagcagggtttgccctatcaagttgtcctttacactgcccctgggcagccccaggtgtgcatgagagcacagaggtgtgagccccacggtctcctgtccctcagatccacctaaagctggggcagtttggcacaatggtcggactcattgccccgtgcacctgtgatgcccatcaaagaacccgcatggcctcaatgaatgtcctgtccagcctgctagatcttcacggtatgagagggcaggacatgaggaccagctcctctgggagggagagagggctgactccaggagtatgggctgcggcctgccctggagggaaggatggcctctgtgcaggcaggcatggagacaaacacaggtgaccatcagagggagcagtgaggggagagttcaccaacaggccatggaagcttccagaaggagaggttcattagcccagattgacccatggagggcatgtgctgggcactgagggcctggctgggagaaagtcagctcccagatgccaagcatgtgacagagctggccagagctgagttcaagggagagcaggcctctgagctgggcggagaggtggtgcgggcagaggccgccacagggaaggaccagtgagagcaaaggtcagaacgcctgggacgttcacatgctggagggtggctcaggcctgcaaagccagggcaggaggtagccacgaagggggggtggckgggccttttgtccctgctggtcatttctgaagttgtattcccgacagcaagccagacctgctccttgtggggcccttccaagsagaaggagcttgagaaatgtaagggggacctccagagcacagatgtggagaagatcttctgtgcatcctccagaatcgccaaggtgacagccggggagcctgcctgggctgccaggctggtctcagggcccttggccgtctctcagggagggaggccttcctgggctggcctcacagcccaagttttctggggtctcagcttccacggcctttggcccaactgctgccctctgtgttgaaagggcctgcagtatgtcatgtccctactttgtctctggcacacagtaggtgcttaatctgctttgctgtcttctccctgtccctgtgatgtgccacactgagtgctgaaagggccatgggaatgatctggacaggccctgcacgtggtgtgggcacgtgggcaggctcatggcacagtgatgaatggaagtgcctggagccacccaaacaggggctggggacttcaggagaccagccccttctggctcagcccaggaggaggccatggccatggtctgagagaggataggagcctggagtggggccatggggtgggacaggggaggagagagtgtcagcagtcatggagtggcaggggagggcaggggagtcacccgctctgctcctaggtggtctgcatggagtttagctgcgatgaggtggtctcgctcatccagaagctctgcgagaacactggggccatgaacctgcagcatgacaaggcctctgtcacctggatagcctycttcctccagatgcgggccaaggagctggaggacaaggtggcagagccgcggcagggccaccagagagaggggctggggctgcctggtgtgcccagatgagagggaaggacgagggcctcaccagcactcgctgagaatgcctcccccaacccctggctgctaaagaggaggaggaaacagagttctagagctagaaagaagcgtgttgaaggtagcctcgttagttaagtgcacgctgacctggagatcaaggttctcctccccagagcacaccacctcctgcactgaaagcctgggaaaatgagtttgaggcagagaccagaggatgcactagagagggtgctgggcgcttaacctccccattgtccaactgggccagagcccttagagcaggggcatgtcatggggttagtgcaggaggccataggggcctgggctgccccccggtgatgccccatccctacctaggtggccgagatcctgagtgccatcctggtgcacctgccggtggtggaccacccagaggtgcggcgccttctcattgacggcatcctgctgctggcgcaccaccaccaggagaccatcctcacatcgctcctgaggcagccactgcccatggagaggtgggtgccctggaggaggtggccccggcctcctgtgccatttgaccatgcccaactcaccaccccgatgtgtcccagaagcctggagccttgggcagtaccctgccccaccctgaaggaggtcgaagccctcttcctgtacctcctgcaggaggtgccagcctccgacgagccactgacagagcccaggcttgtagaacttcgccacatggagctggaatctggacccgtagctccccacatgcccgggacagtgtctgtggagttcattctctcccagagtagccctttccttccctgtgaacagagctccagcagatgggctgcagggtgcggctccaaggcatgagcaagccctggatatattccaggctgtccctatttctttcaaaatgtgtcctaagaggggaagcgacttgtcccaktctccaaggggagaatggcccaacctccagccccagaggtggccatgagtgatgcagagccaccccatctttattggtgtttctctgcagacagtgcagagctcctgtgtgtgctacagcatgatggcacaggcagctgggcatggtctccccacatgtggggagtctgtttggggtggtaccagaattcatctgggaggagccagaaagagctagacagtcatccccagagcagtggagcctgtgctggtgcagggacgtgaggagatgtcaggctaagtaagaggcttggaacagagaaaagagttttaaaaataggccccggctccagagccacaagggctgacctgcccgaaatgcaggcatgactcccctgtggagctgcttctcataagggcagccctgccgtgggtccagctgggagggtggtgcaggtgtcatgatttaatgaggctcagtggctcatgaggcagtgctgggtgggggtaagggggatgtgcggtgcagccctgggtcaggctggcgtacttggtggccacgtcacactggctttcacttagtttgccaaaatctgtattggtttgctattgctgaataacaaattatcacccacttagaagcttctaacaacatccatggattagctcacaatttccatggttcaggagtcaaggcatgggttagctgggctttctgttcagggtctcacaagcctgtgatgagggtgtcagctgggctgcattccagagcctggggttgtcttccaggattgtgtcattgttcgtagttgcttcttgccattgtaggactgaggtgccccttcttgtttccttgcgccccatggcttctttacagagggtgctgatgagtgcactctgccccctctccatttactcctgcccccaggcccccaggcacatctcccttcagacccaaactcaccaccctgctcttgtgcattggttttgtgggttccaatagtcagtttacacatctctttgttcaacttgaccttgttaaattacatttagacttgttagactcacattagccttttagaacctcccagatgccccgctctctgtgcctctgtacctatcctgggggacatcccttctcagcagggccatgggcttggacttggaaaccaggaaggcccttttccaactgtagtttggcaggtggcctgactgctgcaagcctcacttccctcttctgtggaatagggagacaaaataccttcctcaaagatgtgttgggagggttaggtgatataatatcagaaagctaccgacaaccaacctgatgcaaattgggcactaggaggtattgtgggacatgtccgtacagtcatcaaacaggtgggggtctctgtggtcatctagcagtggaggtggggcttccgtgggggccatggctttcccaaaggtaccgtgagcccgtgcagagaaagggggttgagtatagtgtcaggggcctgggttctaagcacgcaaattttggcggctccctccgcctccctgagattcagtccccagagtccaacccctacttagggggctgccaagggtttgaaagggattcttacctgccagggcacatgccaggaaactcacagtccttgtgccctgactttggttagccacctggcagaggtgtggctggcagtgtcggagaacgtgcccttcgcccggaccatgctccacagcctgatgggccggctgcagtcacggctcagccccagaatcagtgccacctccaaggctgacatctggcgcctggctgcggtggaccccctgatggtgagttgcaggcgcaggccccaaggctcctcaggggtctctgggtaggagcccgatgccctggaccttctctctgcagaccctgtgcaccatccaccttctcattcagaagctggatgagaatgacaagctcccggacttcctccctgacctcatctacaccctcctgctgcagcttggaagcagccaccgaccagaggccgccccgccggtcttgaagatgtggaagctggtccacaccactcctctgccggaggagatgaacctgcaaaggtgctctcgagggcggtgggtgcaaggcagcaggcctgggctggctgtagccacgggctgccccttagttgccagtggactccagtgaggggccctctgtctcctcctggtgggatctgatcttactcaaaatgccgttctcatgtgtgtcaagcacggtgtggttttcagagcttgcagatccactccctccctggacctttccctcagtcccttgggctgggcccggcaggcactggggccccacttcacagattgcagcagcctccccaggccatgcgctcccagcagggcagcgcatcacaagctcccacctcccttcagggtcactatcaagtccatgcagctcttgttcaagagagtcaagagccagcacctggcacataccctggacgagcaggcagtgtgggacctcctgcaggacggcgggacattcctggagggtgtgagcctgctggccaggtgggccctggctcccacagggtggcagggggacctgcagaggcacctccttgctggatggaagggctccttgtgaggacatggtccagtcatggctgaaggccttctttctgggggaactgccacgccaacctgtgactctaggatggcagtggtgtgcaagagaatgagaaccttttattcgaacccttcctgctcagagcagatatgagggcagagagaggaggggctcgcccccagggccacacagggtctagagtaggccagggatgggagttacttctggggtcctagtcactccggagccgccctcactctagtcccctttgtaaaaaggagatagacattgactgattcactgacaacctcaaccaagtccccaggaagaggagggagaaacccagagatgttacgacatctttccggggttatcttgccaccagggtccaggcaccgatgtggccctgcccagctcttggcaaacgtcaggcaggggtggggccgcctccacgacctggcactgtctctcctctgcaggctgtgcatgcagcacgtggagggccacaggcagaggctggccgagctggtgctcaggggcatggactcagaagtcctgagctgccgcatcagcagcacagcggtctgcrtggaartgaggcaccgggtgtgggcggggtgcaagcggaggggatggggtccctggattcttctggggatggcttgtctccaaggcatgggagtcggggggacaggcgagcgcccctcctctgagtgctcattctctcatctgctccttcattcattcatcacatgagtagtgcagggcaggccctgctggaaagacaggctgagccctgcagcattgcagttaactgatgtgtgacccaggcaagtacagtgacccaggggacccagggagggcacctgggttctcgctggggcaggcttcctgcaggaggactcagagaggccgaggggctttgctaggtgggaaggcagggcccagcgaccctatctcagagtgagtgttggagcgtcctgagggcaatgatgcccaatgcaccctaggaaccaaccacagcccaggccagaggccggccagtgttttctgtaaaggactgcagagtaaatttttggctttgtggccaactmagctgtagcaggaaaacagccacagccaataagtcaaccagtgggcatgacggtgtcaacaaaaccttattgatggacactggaatttaaacttcatggaattttcatgtgccatagaattttcttttctatatttcttttccccaacacttaaaaatgggaaaatgagttttggcagtgggctgtacaaaagctcctggaagtacaagaccagtctgggaggtactcaccaagcttttataggttcttcaggcccctccctgtgttcaggcctctgtaaatcttcaaaatgaggatgggaaggagaagtgctccctcgttgtctcacccaggacctgtcctttgatgtgcctgagtttggaattttcagcggctggaagccacacagggccaggcgcaggtgctggaatccgagggcctggttaagagcctccgctcagttgctgattggctggagatgaagttacttagcgtctctgagcttcaagctctccatctgcccaactggggaaagcagtgccttcttttcagggctttggtgagagctaaatgagatagaccgtgtatgcattgcttgcttgggaggtaagtgctcattaaatgctagctaattatggcagtttaaaaattaggttcagcttttttggttccatatgaattttaaaataatttttttctaattctgtgaagaatgtcamtggtagtttaatgggaatagcattgmatctatacattactttgggcagtatggtcatttgcatgatactgattcttcctatccatgagcatggaatatttttccatttgtttgtgtactctctggtttctttgagcagaggtttgtagttctcctttgaagaggcccctcacttcccttgttaactatattcctaggtattttattctctttgtagcaattgtgaatgggagttcatgatttggctctctgcttgcctgttgttagtgtgtaggaatgcttgtgacttctgcagattgattttgtatcctgagactttgttgaagttgtttatcagcttaagaagtttttgggctgagacaatggggttttctagatataggatcatgtcatctgcaaacaaagacatttttacttcctcccttcctatttgaatacgctttatttctttctcttgcctgattgccctggccggaacttccaatactatgttgagtaggagtggtgagagagggcatccttgtcttgtgccgattttcaaagggaatgcttccggcttttgcccattcagtatgatattggytgtgggtttgtcataaatggctcttattattttgaggtacttcaatacctagtttgttgggagtttttaacatgaagggatgttgaattttattgaaggccttttctgcacctattgagataatcatgtggttttgtctttaggtctgtttatgtgatgaattacgtttattgatttacatatgttgaactagccttgcatcctgggaatgaaggctacttgatcgtggtggatgagctttttgatatgctgctggattcagtttgccagtattttattgagaatttttgcatcgatgttcatcagggatattggcctgaagttttcttttttttgttgtatctctgcctggttttggtatcaggatgatgctgacctcatagaatgagttagggaggtgtccttccttttcaatggtttggaatagtttcagaagaaatggtataaactcctctttgtgtttctttttcctttttttttttttttttttttttgagacagggtcttgctctgtcgccaggctggagtgcaatggcgtgatctcagctcactgcaacctccacctcccgggttcaagcaattctcctgcctcagcctttcgagtagctgggactgtaggcatgtgccaccacacccagctaatttttgtatttttagtagagatagggtttcaccatgttggccaggatggtctcgatctcttgaccttgtgatttgcccgcctcggcctcccaaagtgctgggattacaggcgtgagccaccacgcccgaccacctctttgtatttcttgtagaattcagcctgtatagccaagacaattctaagcaaaaagaacaaagctggaggcatcaccctactggacttcaaactatactataaggctacagtaaccaaaacagcatggtactggtacaaaaacagatacacagaccaatggaacagaatagagaactcagaaataagatggcacatctacaggcaactgatcttggacaaacctgacaaaaacaagcaatggggaaaggattccatatttaaaaaatagtgctgggagaactggctatccatttgcagaaaattgaaactggacccctttctcacacattatgcaaaaattaactcaagatggattaaagacttaaatgtaaaacccaaaactataaaaaccctagaagaaaatctaggcaataccattcaggacatgggcatggacaaacatttcatgataaaatcaccaacagcaattgcaacaaaagcaaaaattgacaattgggatctaattaaactaaggagcttctgcacagcaaaagagactatcatcagagtgaacaggcaacctacagagttgaagaaaatctttgcaatttatccattcaaaaaaggtctaatatccagaatctacaaggaactcaaacaaatttacaagaaaaaaacaaacaatcctattagaaagtgggcaaaggacatgaacagacccttctcaaagaagacactcatgcagcgaataaacatatgaaaaaaagctaaatatcactgatcattaggtaaatgcaaatcaaaaccacaaggagataccatatcatgccagtcagaatggccattattaaaaagtcaagaaacaacagatgctggcaaggttgcagagaaataggaacacttttacactgttggtgggaatgtaaattagttcaaccattgtggaagacggtgtggtgattcctcaaagatctagaaccaaaaataccatctgacccagcaatcccattactgggcatatacccaraggaatataatcattctattacaaagatatatgcatgtgtatgttcattgtagcactattcacaataacaaagacatggaatcaacccaaatgcccatcaatgatacactggataaagaaaatgaggtacatatacaccatggaatactatgcagccataaaaaggaatgagatcatgtcctttgcagggacatggatgaagctggaagtcattatcctcagcaaactaatacaggaacagaaaccaaacaccacatgttctcacttataagtgggagctgaacaatgagatcacatggacacagggagaggaccaacacacactgggcctgttgggagtggggtgggggaagagagagtattaggaaaaacagctaatgcatgctgggcttaataactcggtgatgggtcgataggtgcagcaaaccactrtgacacacgtctacctatgtaacaagcttgcacttcctgcacatgtaccccagaactaaaaataaaaattaaaaaaaaaattaggttcaggtttaagaagcaagctatttaaattcttcaaatttgatagggatggattataaatgatttttttttaatgcttgctgacaatagtgtgggggctttactcttcaggaattttccctgaagagcatttaaaataggttgtgatcgttgtattcactgctctacctggccctgaataggtgctcagtatatgtttaaatgaatggaagtgctgtaggaagctcctgtgattgctgatgttggtgtctgggacaggctggaggtggactgaggtggagacaaaacatttggaagcttagagcaactgcgcctaatgggggtttaaggaactagatgtggggatagtcaatagatgctcatttctcctgtccctggactcaccaatttggtgtttagttttcaggcctctttcaaacatactcaggtacttgcatgcacacatgtacacacatgtacacacatgcatgcacccacacgcataccagtgaggttttggcactcagaatactaggccattagtaattctcctgaaagtgaaattcatgttttttgtgcctttctgttcagatgcaggtgggcgtggctcttgcatttggcagtggctgttatgttacctgaaaaaataaatgacgaatttatatatataygtaacacttatctagcattccccccatatttccttattaaatccccacacagaccctgaggcaggtactagcatcacccgctttttatagagaggaaacggaggctctcagagcccctcccctcctgtccacagagccaccaatctgcattacctctcctcccacgtcccaccttgctgctgagaaatgagcccgccctggggataactgcccaatgtcctcccttccagttcatgagcggcccagttctgtaccaggagaagctgctgaagccggcagctttgctgctggagaagggtgccgaccaggaggaagacgaggccctgcgggtgctgtccctgcgcgccctcggcaacatggccctgggcgcccccaagaaggtactgtgcctggccctgggcccaggtcccgggagctgagggtgcaggccgggtgccctggtcagcctgggagggagggtgcaggctgagggctgcccatgcccctccaggtgaagcagtaccggaaggtcttgctggagaagtgcctgggccccctgagggagcccgtgagcaacagcgtgactgccgagggcatggaggccctgaccaagatcctggctgagctccgggaaggggatgtggggtcctctttcgacgccatgtctgagcagtgcaggatcttcttcgacaacgtgagtccgatgagagcctccctgagcttgctcagtgaaggaggggcacttctcagaccctaaggaagagatgggctctagagcagaaaagagccgaggctcctgctgggtgtcagtttagcgactggctgatcacgggatcttgtgaagtaaaaggtattcttctaagttccagagaatcagtgctgtcaagtgacggctcctgggcctctgcagccctgctaggagggaagggtctcccccttttattccttgcasctacaaatacccccagggcacctgtgtcaccctgggcctctgctaggcagggctgtgcactcagatcctgcacaagccctcacccagggaagaggcgggcacaaagaccagagcaatgcccagccccttgagggctacgtgatccctgccaaaggagagactacaccctgacggaatgatccagaaggctctgcagggrccaaggcattgggtattccttggagaatggctggggttttgctgggcttcctgctgcctgcatgtcagcctgtgtccatcctggccacaggagagcgagctgctgcgtctgaaagccttcatcctctttggaaagctggcaagggtggtcgggatgtccaagaagcatttcttcaaaggggaggtgaagaaggcctggatccccctcatgctgcactcccaggacccctgctccaatgcagcccaagtaagatacatcctgggctttgtgtcccagtctggggcccgctgttccccraggaaacaggtccttgggtctgctggctcggtgagctgcaagcttttctctgcctcagttggttttctctgagatcccagaggccacagcctgctccctgctgtcctccatccctcacacaggctgaggagagaggccatccgagatgacctgcaaagccacctcactaagcagtctcagccccgtgtcgggggacatggtgtggtggctgcctatagccctcctctgcccaaaccctttcttctagcagattctgtaactggcaggtcacttttgagtattaggactcaaaataccccaaagtggtcttgtccactgcctgcaggcccatgttgggatgggagcgggcctggcttctccctctccacagcccagytcctctgttgctttggggcaggaggagagggagagacagatttgttagtaaatgtgccttctcatttgagttgctgcctctcaggctaaccccggctggctggggacctcaggatcctcactccctgcatggcccatgaccttgaccgccctcttctctccctagtctctgcttacagacttggggggtggggtcaggaagtggggaggtggctgatttggggaggttctgcccccgcctagtaagccttgggacgcagctggcctaacatgaaagaaatgcaatggtcattttcagcaggtgccttggactccagctctggggtcacaggacaagtmctgtcactatgagggcagcagtttccaggtggggtggagcgggtggcccagatggcctgggtggcccaggtgggatggcccwggtggcccaggtgggatggccctggtggcccaggtgggatggcccaggtggcccttacaggcagtgaggggkattgagatgcacactccctagacctgggctttgcactcaccaccccagcttctggactttgccacatccctctgccacaccatccctggccaccctgggcacaaggtgtcactgcccagaggctccttttccttgccagtcctcaccaccctctgtcttcagcccacactgttcttccatgttttatcgacaactgtccagtggggtgggggggcttcagggaaggaaccagggtgcacccagcaatggtgaccgagagtgaggaaagggctaccgagacagaagcattttgtcttcctgccctgccgtctccagaagctgtggccagcaggcttggtcacaggcagatgctggtggactgggcctgggaggtgaggacacgtgcccagtcttgcctgctcaagcccggctcccgcctctgatcccatggagggctgggtcccaggcagggctgctgagggcacgaaggkgctggctgagggggcgggtggggctgcatctgcccccaaggggctttctataaatgtacmtgcagccatgttcaagctggcaggggcccaggtcccaggtggcctcccaggagccaccagccctgcctttctttggcttggtgaggcttttctggggctgccctctggcttcctgccagcctcacccctctggggaaccacgtggcctggctgatggctctgctgccgtcctgtgtccctgcaggcctgtatggctaccatgtttcagtgtgtgcacttctggggctggaagtccctggagcatccctcagggccaagtgataccrctactgatgacaagatgaccrttttccagacaaccatgtgctccatcctggtgaggaagccaaagggggaaccagcccgtcccaggtggccacacgctggcttggagctggggggtcgagattgccacagctctttcttggggccctatgtttaccttccacacatgccatgtygagaccrgcactgtgcagcagaaatagaaggcaagtcaygtgcctatttcagctgtctgatgtttcttttagtaggcacatccagaaaagtgcagaggtgaaactaattttcatgtattttatttcactcaaataactaaaacatgatcatttcaacatgtaatcagtataaaaactatkattgtgatattttacaatttttggggtaccatcttaaaacccagggggcactttaccttaattcagaccagccacacttgaagtgctgcagggttacacatggcttgtggctaccatgttggacagcacaggttctctggtcagatgggatatgaaaaatataactggtggccagtggtccttcacttgccagctactcacctgctgtgtgacgctgggatgggcgcttgccctctctgatgcatcttggtgatgggaacacgcttgrtgaatgacagcccattgtcagggtctcatcctccaaagcwaaaagtgtgtatcacttactttttgcagactcggaaaaagccggctgttctctaccgcttcttgctagaaacaatggcctatgttaaaaataacttgtcaagaatcagaatcgctgcttgcaacttggcaggtgagcagagagacgtctcctgactcaagatagactttgaaggccctctagtccaccccrgsactcgggggaagggtggatcatgagtgggaggcaygtggcaagctgagaccagagctcaggtctaagccctgcactgtgctttctatcccgttttgattttggcttcctccctgccaacgtgggctcaacaaaatctttcatcaatgctctcataacgtaaagtaagtaaaccacaggacgacttgcctgctgacctaatactcgcgtgatgagcatttctttggctattgttttaggaattattatgaagcagatgtctacacattatctgaaaaagctggacttcccagcattacggaattgtgagtagtggagagtgttagatgttgagtccacgactcaccaactcactaggggagcttagagaaactgcttcaagggaagagccagaggaccctttgctgtggggtttygggggggtgggagtgcaaccagggcagagagatgcacctggrgaggcctttccaggacgacagctattgatgggtggagtccctttcattccctgggctgtttctcccattcatagcttcttatgaaatgcttttggcctgatgctgctatcaggttctgtgggtgatttctgtccctgttagggtggttactgaagccctgagagctatgatgtgtgttgaaacagctccacctgcagtcctctgctttcccacacaggagtttccccgtctgcccctgcccaccttctgcggcccttgcctgccatcactgcccagggcatgcagcatgtggtcctgactgggcrgggcctgaaccttccctctttgtgttctctctcagccctccaggaactacagctggaccyggatcccggggtcaggagggcagccctggagacgctcacagtcttggatagctgtagtcagcatgggtttctggcttcaccccaaggaatgtcctaggtggtccaaacataagacgtaaactgtcttcttagtgccaaatgcaagccctttttaatttagtttgtaagaagtttagtttgtaggaaaaacacyattgtaaaataactagtatccttttgtttccttccgttgaaataaacctccactgtcgttggagtagacttgtgactgtaaggtggtgacagcccagaaccaagacaatgaggcaaagggaactttggccttaatgagccacttcatttccgatttccccccaagtacgtttgtctgacagcccactggcccaaagggtcggaaactagctttgtgtcttcactcggagttcatccacacgcatgctgacagcgtgcctaaggccaggcactgtgccaagcggtgaggggaggcctagagtgtcccatctgtctccagggactcttcttttttttttttttttttttttgagatggagtcttgccctgtcgcccaggctggagtgtagtggcgcaatctcggctcattgcaacctccacctcctgggttcaagtgattctcctgcctcagcccaggtgcgcagcaccacgcccagctaatttttgtatttttagtagagatggggtttcaccatgttggccaggctggtctcaaactcctgacctcgtgatccacccaccttggccttccaaagtgttgggattacaggcgtgagccaccgtgccaggccaggacacttcttaaagggaaaggcacctaaccacaacacacatcagagggaggactgcagccagggtgcaagtgctacagtggcacaggagggtgggtgtgcaagtctggagacaatccagaaaggccgcatggaggaactgacatttattccaggcccttccctttgcgacttaaagttaccaaagttaagtttggactgttgcaactggagcccagtgaggcctggaacagaatttggctgctggtcaaaaaggagaaattagccccatgtctaagaacatgtaggggaagagaggggcagtgtggggaaggcttttgctatgctcaggccatcagaatagtctaggtgtccccagagcaggtaaaccaggacttccaaactgttcccagtccaactgccaaaggaawtcaccatccggggtcccatcaacaggagagagctgctatgctgtccaaaatccaacccgtgctaaagccttctctggaacagtggtcttcaaactgttttgtggagcaaatggtgacttgatttcctgcccagtgataaagagtattgctgctaaacaagcttgaacaccactgatgcagtggggagagtgcaccattcgatagagtacaaggaggcagctgtacatctgtacaattggctctccttccatgcctgtgcagaaacatttccagatggtttatagacctaaatggagagagcaaaatttaagacagtacagtattttttttatcctgagagtatggtagtttttcttttaaaagtaacagcagaagccagaaaaaaggaggaagttatctgccttagtatgtttagcgttgctaaaacagaatacccaaggctgggtaatttatacagaaaaggtttgtttagctcctaattctggtggctggaaagtccaagagcatgatgttggcatctgcttggtttctggtgagggccttgtgctatctcgagacacagtggaaaagcagaaaggtgagtgggcaggtgcaaaggcaacccgctctcacagagagtgagaactcactccttcaagagggcattcatctattcatggggtgtccactcccatgacccaaaaacctgccactaggcccccaccccctaacaattacatgtgcaattaaatttcaagacaaatggcatccgaaccatagcattgtgttaaaatgtaacttccatacaataaaataacacaaagttaaatgacaaatgatagatgatagaagttaaaaactggattgtttcatatcattggatccagaatacatccaaatcaggaagaggcaaatataaaaccagtgtcctgaggacatttaaaaaaccaggactcccaggaagacatgctcaacaagtcatcaagagaaagcaaactgtgaagcaacacatcttacacctgccagagctcagactggcagcaactggcagcgataatgtggggaaaaggtacctcttatattgtgggacattgggcaaactggggcagccatttgggagagcaatttggcaataactatggaagttcaaggcacacccatccgtgacctgtaatttgcctctaggtgtgtgtgtgccacagatagttgacagttatgcacaaggatcacgggtggattttgcacccgtccgcagacatccaggacaataaaccacctagagaactcaaagtgagatgcccacatctatcagctcttgtcatattcagtctcttgatgaaacaaaactgtagcatatgtacagtattaatttactcatatagtttgaaacagagagactataccatatatagtttatggggcccttattggcagatctgtaagttggcaagacccatgcccagatccttccacctcaccttcctccactggatgacagaacaccggcctttctggcagccaggcctggcccgggcagcaaggtttcagctgtctgctgggtgtgggggaaggagaggcacaagcagttctgggttgcagtgatggttttcctgaagaggaaagggtgggtcgcgttgtcctttaggaagcagcaggcctgagggaaggctctagatctgtaggggccattctggccctggctgagcctgagccagcattacactgccggcctgttctttgaggaaatgagccgtctgtgaggtctgcagcacctggcgaggttctcggctctcagcagcgtgcaccctccttactgactcacaggctatggattgaattatgattaagtcctagcccctggcatgatggtattggagatggggctttctggaggtgattaggtttagatgaggtcatgagtgaagggcccttatgatgggattagtgccctcctaagataccagagaccttgctctctccagcatgtggggacacagcaagaagacagctttctgcaagccaggaagagtcctcaccggagcccaaccatgctggctcccttgtcttaaacttctagtcttcaaaaactgtgagaaaataaacttctactgtttaagccacctggtctccagcattgttatggcagcctgagcatgcaggtgcgcacgcacacacacacataacatggtcccaatgtaagacgcaggggggaagagatatggggcagggtatgggggtgatacctgacatcaggagagcaatcgcctggggcggcaggcgggaatgaaaaatgtgtaatttaatctcattttaaatctttcataaaaaaaaaaaacccaaactcatatggccatatattaactatttactccagcatgagtttcaccaatgtattctgaatatgtgaaatatttcattacaaaaacgtcaccatgatatcctgtcatcaacagcttcagtaagaatcatgaggagtcacaggcgctgtggctgcaggagcgtctgggaccaccaggactgtttattttccttcaagggtcattgcatgcagggctcgaacttacgtctcacaagcaaacaatattctcgaatgaaatgggaaacaggagagaggattctctggacatatctaaatttaaaaaagaacacacggctgggagcagtggctcacgcctataatcccagcactttgggaggccgaggcagatggatcacgaggccaggagctcgagaccagcctggtcaatatggtgaaaccccgtctctactaaaactacaaaaattagccaggcgtggtggcgcgcgcctgtaatcccagctactcgggaggctgaggcagaagaatcgcttgaacccgggaggcggaagttgcagtgagccaagattgtgccaccgcactccagcctgggcgatagagagagactgtctcaaaaacaaacaaacaaacaaacaaacaaacaaataacccccccccaaaaaaaacacacacatcagaaaaacaggcctatcaaagagaaccctaaaaattctaattgagcaactttattcacataatttctacaccaagaactcgaggttatctctgatggaaccaatttcactaatatttactttaagggcagagaagtcaaccaagtcctcacagtctcaagaatcaaaaacaaaacaaaaatacaaacagagagcaagtgggaagataaataacactccgaaataacctagctacacacttttagtttccaatttttctagcatgaaatcacttttctcttccatcctgtaagacgtgttctctcctctaggaaaaaaaaaagacaaagaaaatgatgttagcaaaattctagaattcccaatgccagccactaaaaggttaactgttttctacttattccattgcatgtataaaaatacttatagaaagtggcattacgttaaataagtaagttatgttaaagaaacaacaaaaatataatggcaaccccccgaccctgctccccacactcccccagggagcacaagctggtggggaagtccacatcccacaccctggcccagctagcgctgctgcacgagtgaatttaggagttctaagacttaagctacttttccatatctattaaaaggagagacagcctgcctattggacagaatcgatctaatcaaggggttctggtggggatgaaagaagataagacgtaaaaacggttcagcatggcctggcacacagagagcactcagacgttaggcatgaaaactccatatgtagttgcagctcatgaagaattggtctctttcctcaagaaatctatcatttaagcgggaaaagcagaaaaacataggaaaccagttaaacatgtttatattgtggtttaaaatgaaacctggggtgttcatgatttgacttgctatcaaattccagggtagctgggagggccctgcggggccaccaagggctgagtcctcaggatggtcccacaataatgcaacctcacaccattctctacaaggccgaggtccctcctgtgtggctgggccagaagaaagccctttagactgagcaggtgaaaaagcaaggcaggagcctctgcacggagcactggggcagatgtcactcatggaaaggggtctgcaggcgactggcacggtgccagatcatggaacaaggtgggaaaaggcacgagacaaaatcccaggggcaggatgatggtaaaaggaagagctggggcactatctgagaaaaagcagttaggtttagacaagcaggacaagcagagcagaggagctctgatgtgtgggagaccaggagaaacctcagatctctctctgggccggacagttgtttttggtgaaattctcccctttcaactgagaaggagactcttgagaggtcatctgttaaacagaacgcataaattttgcctcaaagcagcctccatgaagtgtctgccatgaagatgtggctgagattcttgaaggcttcactaactgtggctgaaagtcacccggctggtggtttggtctgaaaaagccccaagtgggcacaggagtgggcatcaggcacacagttggagaccaagacccgagggaaagactgctgttagccgtgcactgccaggggaggagctccgagggccctgcccacacagtgcccctgaccctagctggggccctgcagagaaaaacctttcccatcacctgaacacttacgtatgtccatcctcaactgggaagacagatgacaaccaaggcttgtttcatctgcttctggttagctcacacagtatgactttatacacgaaaataactttgaaaaccaaaacatccaacaaaacctgggagcttctagaactgagccaaggagcctgagccgctaacccatgagactggtctgtgtccagacagctccccactgcagcacccaccatgtgcagcccctgggagggtgggggttacctgcacggagcaggcagctgagcggtgggtggagtctagggaggatgtccgaggatgcaatagcaaagaactggggagtagggggagaatgccagtgaaagttccctggaagggaagggctgtcctacggcagaccctggagcaggtggccctgagcagtccaagggcattgggaagacagagtgacagtgagaaaggccccagggggctcaagccacaggaggccgctggcggtctgagagtgtggtctctgccatgcacaggcgggactgcaggcttcgaaggcaggcaccacagaaggaacaaggcataccagaccttggttctgagctggacgcacggcaggagccagtggctgagaagggctcgcaggccaggcgggtccaggtgggagaaacagaaaatgggacacttatggcaggcagggtccacccaaatgacctcagagaagaggcacatcgccaggctagggcacaagggaagaggatactggagacacggcctcacctgctggaaccacaaacacacaaaacccaaaggaaccggccaaatcaaacccacagtcaagtcccgtccacctgtgggttaagaaagtcgcatcctccagatcctgactgtggacacacagagaagctgtgctggggaatccaacctttaatgccaacaaaggtactcactcccactgacccaccccaccccactgtctctagagaaaagggcacacgcagactaaaactctagctgacacgattcgcacaaattaagctgcagaacaaggtgcaaagttttaacactgagcactgagatatctgcagggcacccctcgcacctgtgagaatactgtgctcgtggctctcccgggccactcttgctctttccctaccaggaatccagaaataggaagtcattcgctttagatcactttcgccttacaacagctattttctgagtgtcagatgaagaggttagaaatgaaggtttgacaaagacgaataaagcgtagtaagtgaggatttgcaggaaaaaagcctctgaatgcattctaatggaaagtgtgaaacttctgcaagagcactttctgctttacctcgatgcatcttacacagggacacattcttgatagagacgctgactttacaggaaggaaaagcatttgggagaaagctcagaaaatgatcacgtatgtaagaattcggttgagattcactaaacgtggcgcaaagattcctaa

SEQ ID NO: 97149 - DNA, 14737 bp, Homo sapiens
gttcttgtgctatgggtgggagtcttcttcctcaagtttcggcagctgtgctgctgctggatgggctgctcctcccagggctcaagggctgtggtccgctcagggtctcatttccccaggccaagttcaaggcagcagccctttgtgaggcgctcttggccctgggcctggagggagaactttaagcttttttgctcacagggacgtggtatgggccctgggtgcaggtgcccacattctgctaatgagagctttgtctgatcagtcctgggtccatcagtttgtccatgtgtccggctgccagcccgtcccttgggatccttcccctggggtgtagccttgttcattagtatatactcattccttcatgctttcctcagcagaacacttccacttctgaggtgagcttttgccccatgcccttcctccacaggtgttgcctttttataaagacctgatagcagaataaattggtgtttccctgttgacccagcaccatttctgtgggcctagaatatggccctcaacccttagagtggggcagtgagggcttgaggagtgacccttcctttctcatggttttagtcattttggctgccagcccttaatggcacagatctgctgcttctaacagatggccaggaggtgacaccgatttcagccattgccaaggttagcaccctctcctttgagcctagggccacactgttcattgtcactttaggcaagtgcctgtttggctttaaaggtaagcctgccagctgtgagaagccttggtaactgatggactcatttcctggtccttaaagatgcagcctcttaagggctccttgatggatgccatctctcctagcccccagccctggtgccactggtgggcaggttcccattctttggggctgggagggacagcttgcctgtttctggtcacaaattacagtcttctctcctgtaccattctgtggcttcagccatgggggcagtagcccttcattagtgtagatagtcattccctggtagggtggagggtaagacatagggtctggaactgtttgggaccttttggggatgtcctgtgcctcccagattcctcgattctgggaggagaggctgccgcattctgctgctcctcacagcgagcaaagctgcacccacttacattcagtattttcctggcactacaaagagtgggaaggcctgggatttgctgctgctcccttagagcagggcccctcttttcagcactttggacacctggagacccagccctgttatttaatggtagtgggcaagtgtgtgtgcatactgtctgccactgctttctccctgccccatgccagagagccctgtccctgccaggcccagccttcttagccccaacttgggaacaaagtgcaacatgggatcatgggttggggtgctcaggtgagccctctctatagtgcttccctgggccaagctgacaccagcccctgagggtggggtgggacgggtggtgcttaaaagaggaaggggaccagtgtagcaacttgccagggaccccacccctccctctctgggcctgtgcagtgagcatggggattcccatcaaggggcctggcacctgtgctagttacgtagccgctgctcacgcgctcactcctgaccacatgcacgttccctagatgcagactgctttgaactttaaagctgtacaatttggttatgtttgtgctgacttaaaatatattttaatgaggaaaaaataatggagaaccctgggaaggacctggttcttttgcttctcggggaactgtaagccctcgcgttctgggaatcgctctctgctgctctttcctggaagctaagcctgtctccaccgcccgaggcctgcgccggtggctcccgccgcagttgcgtttgctttggaccttgcgtgcgggggagggggtgctcggtccgagcccgctcctttctgtacacctagcgctgcccgccccgcttgtgtctgaggtcgtgtatgtcaaaaataaagccgctagaaacggaggcgagtctgtctttgtgaaaatcccgtggcccgggagccttccctggtcaccctcggggcgaggccggggccgtggggcggggccggcggctgctggaccgcggcgaagcagggaacaaggcctcgcccttggcgccagttccgcctttggatccgccaatggccagctgacccgcgggtcccggcccgggtctccatggcagcccggcgtactcgggcgctcattggctacgtctgtcgcagcgctgcgctccaacgttccgacgccggcggccgtgccacgtacgcggcagccgattggcccgcggtggtcgcgtcactgcccgcgccgggtccggcctgagttcggggccagcagccgtctacccggtgtcgcgttctgtgttgtggcggccctggatccggcgtcagggcgaccgggcggacgaggtggagccagagtctgtcaggcgggttggtgaagggcgcggggccgggcacggcgttgggagtgcgcggcagggaccggccaggcgggctgcaggcacctcagagcccgggacaccccctcaacgtccgcaggcgcgatgaaggcactgatcttagtggggggctatgggacgcggctacggccgctgacgctgagcaccccgaagccactggtggacttctgcaataagcccatcttgctgcaccaagtggaggcgctagccgcggtaagaccctgggtcgggatcagagtcgcgttcggatctggcgggactagggatggccagcgactaggggtcaggggctcccgtaccttctgactgagcccgcccgtcggcctgcgttctgacaggcaggcgtggaccacgtgatcctggccgtgagctacatgtcgcaggtgctggagaaggaaatgaaggcacaggagcagagggtgaggcacagactcttggcccttattctcggtccccgcccaacttcccatcctggtagaacctgactgggggggcctcttccttccagctgggaatccgaatctccatgtcccatgaagaggagcctttggggacaggtcagtagaggcagaaaggtcccttgggggagggtttaaggccaggaaaagggtaagacccagcctggagtgggcctgctgagcctgaatccagggactcagacctccagcaaggtggtgacctgtccccttcccccagctgggcccctggcgctggcccgtgacctactctctgagactgcagaccctttcttcgtcctcaacagtgacgtgatctgcgatttccccttccaagccatggtgcagttccaccggcaccatggccaggagggctccatcctggtaaggcgccaggtcttctctctcttgacactttcaccctccatgcccagcctcccatgccccctagccttcatctgccttcggatgttatggatacagagctgtgcagtatgtatctttaagcacttggggcagagtctcttgagatctggaacggcatgtgtatcaaggcttaggaacactggactaggtccgaggtccccttccttgcattcaggtgaccaaggtggaggaaccctccaagtacggtgtggtggtgtgtgaggctgacacaggccgcattcaccggttcgtggagaagccacaggtgtttgtgtccaataagatcaacgcaggcatgtacatcctgagccctgcagtgctgcagcgcatccaggtgtgtaggagacagctgttggtgggctggggtggggcaggccatcaccgccatgaccctgctcacaagctgcccactcccacagctgcagcctacgtccattgagaaggaggtcttccccattatggccaaggaggggcagctatatgccatggagttacagggtgaggcagggaggccacagggtgggggtggtctgtggctgggctgaggcccctgatgcatccctccctacaggcttctggatggacattgggcagcccaaggacttcctcactggcatgtgcctcttcctgcagtcactgaggcagaagcagcctgagcggctgtgctcaggccctggcattgtgggcaacgtgctggtggtgaggcccttgcccagcccatcattaaccccctcagtcttgggagacaagtggcccacttgtatttttcccaccgctctcaggacccaagtgcccgcatcggccagaactgcagcattggccccaatgtgagcctgggacctggcgtggtggtcgaagatggtgtgtgtatccggcggtgcacggtgctgcgggatgcccggatccgttcccattcctggcttgagtcctgcattgtgggctggcgctgccgcgtgggtcagtgggtaagcctgtgggctgggctgggtggggagaggggcggggagtgtgcctgcctccctgacaaggcctatcctctcctggaggtacgcatggagaacgtgacagtgctgggtgaggacgtcatagttaatgatgagctctacctcaacggagccagcgtgctgccccacaagtctattggcgagtcagtgccagagcctcgtatcatcatgtgaggggatgcagtggggctggccgagccccggttttcccatcagcaaggggagtgctggcctgacacatcagaagaccctggacttgtcattatttgtctggggggcactgggtgaagctgaagctgttggacacctgccttctcatgtggacatcatctggcaggatccctgctgggcacaccccacaaaccccactccctcaagaagggccagggccagggctgtatggaataataatttaatgctcactgtggccctgactgaaagtcaagctcaggcacaattagggccatggctgggctcccaccaatgaggatacaggcaggcaaggaggttggatgtggtggtgtgggatacaggagaagggcaaagggagctcataaatagggcccagcctggctctgggttcaaaggtggaggttccaggatggcacaggctgtgagggctaggcagctgaggaggtagtactcgtattggctcccttctcccagtcctctacagacacgatggtggttttgcagaagaagcagtccttgttgttcatcaggtgctggttgatacaggctctacaacaggggaggggatgaggactgccctgcatgtacctactgctctccccaccaccaagctgtggggcccacttacttgcaggacttgtggccacagggctggaacacagcagagatggggtgggcatagcagatggggcagaggtcctcctcactggtgggctgcagggaggagagtgaagggtgggctggagttggatgcctggctatgtggatgtccgttgtgcctgtgtaggagtgcacacatattcaagtggcatggacctgtgcaccgtgttcccactcaccagggaggcagctgctgcctgggcagatgcagaggtcaggtgcgccagcatctgttccacttgggccagctcatcggcactgatataatccgcatctggggagtggtaggtagtgtcaagtcagaggtagctgaggatgtgatgcctcttgaatattcccagcctaggactttgctgttcttaaggctcctgacccgacccagccccagatttccctgacctgccccaccagcccactcacagctctgcagggagaagcgcttccggtcaggggctggcagagcagtgccaggtgctgggggctctggctgtcccaggagatagcatattgagcgtagctggaagcagggatctgccaggagcactgatgtggcttgctctctcctaggtaggggagggtgcaagggcagtcagaaggcttggggcctggctaaaagtctctcttgggattgccaatgaggagtgccatggctcgtacatgatcaccccccctgcatcctttccgtctccctgcttcccaaaccccaagtcctgtattctagtaaggtgccacacagcctgttttttttttttttttcttgagacgagtctcgctctgttgcccaggctggagtgcgatggcacgatctcggctcactgcaacctccacctcccgggttcaagtgattctcctgctttagcctcccgagtagctggaattgcagacgcccaccaccacgcccggctaattgttgtatttttagtagagacagggtttcaccaggttggccaggctggtctcgaattcctgacctcaggtgatccacctgccttggcttcccaaagtgctgggattacaggcgtgagccaccgcgcccggcctggggtaccactttaagaaggctcaggcgaaccmccttaagatagtgagagtctgcctgccccataatattatcagtccttcaaagtcacttcaaataaacactaacagcagcttggagacattcttccagactcccccttttactccccgaggaaaaacgagcggcggagagctgccagccaaaggctgacggggactttggggttggccttgctccccatctggcggtcatgcggggccattgggcacaaagggatgtagccgccccgcctcctcaaacgggaaccaataggagcccgggccccgcccctggggggagtatttaggagccgatcaggaactcgcttggagagggctagcgaagccgaagggagcgcggctaagagtgccgcaccgcctcacaacctgggaaccggagagtaggggccgtcggctggcaagaacccgccgtgcctcctcggcaagggccatccggtgccacccatgtcgcactagagcagaagagggtgagtcctggaactgcaacctgcacagagctgctctgtactgtccctggtggtcgccgccatgacctggttggtgctgctggggacactgctctgcatgctgcgcgttgggttaggcaccccggactccgagggtttcccgccccgtgcgctccacaactgcccctacaaatgtatctgcgctgccgacctgctaagctgcactggcctagggctgcaggacgtgccagccgagttacctgccgctactgcggacctcgacctgagccacaacgcgctccagcgcctgcgccccggctggttggcgcccctcttccagctgcgcgccctgcacctagaccacaacgaactagatgcgctgggtcgcggcgtcttcgtcaacgccagcggcctgaggctgctcgatctatcatctaacacgttgcgggcgcttggccgccacgacctcracgggctgggggcgctggagaagctgcttctgttcaataaccgcttggtgcacttggacgagcatgccttccacggcctgcgcgcgctcagccatctctacctgggctgcaacgaactcgcctcgttctccttcgaccacctgcacggtctgagcgccacccacctgcttactctggacctctcctccaaccggctgggacacatctccgtacctgagctggccgcgctgccggccttcctcaagaacggcctctacttgcacaacaaccctttgccttgcgactgccgcctctaccayctgctacagcgctggcaccagcggggcctgagcgccgtgcgcgactttgcgcgcgagtacgtatgcttggccttcaaggtacccgcgtcccgcgtgcgcttcttccagcacagccgcgtctttgagaactgctcgtcggccccagctcttggcctagagcggccggaagagcacctgtacgcgctggtgggtcggtccctgaggctttactgcaacaccagcgtcccggccatgcgcattgcctgrgtttcgccgcagcaggagcttctcagggcgccaggatcccgcgatggcagcatcgcggtgctggccgacggcagcttggccataggcaacgtacaggagcagcatgcgggactcttcgtgtgcctggccactgggccccgcctgcaccacaaccagacgcacgagtacaacgtgagcgtgcactttccgcgcccagagcccgaggctttcaacacaggcttcaccacactgctgggctgtgccgtgggccttgtgctcgtgctgctctacctgttcgccccaccctgccrctgctgccgccgtgcctgccgctgccgccgctggccccaaacacccagcccgctccaagagctgagcgcacagtcctcagtactcagcaccacaccgccagacgcacccagccgcaaggccagcgtccacaagcacgtagtctttctggagccaggccggaggggcctcaatggccgcgtgcagctggcagtagctgaggaattygatctctacaaccctggaggcctgcagctgaaggctggctctgagtccgccagctccataggctccgagggtcccatgacaacctagactgcccagggctcccccacccaggcccccaccctcttgctgctcgccctgctccctgcttcggtccagagaactggcagatactggtgggaagcactgtgcctggccccccagcttcctgtatgggcctcgaaacacaatgggccttctcgctcactggtagagacaggggttgtggtccccaacctgccttctgctctgcccctgcacaggacccaaaggccccaggccctgcaaggtgtgctagttcctgctttcccgcggacttcctagtgcccaaatgccctgtgaggctgagagacccaggcccctgtggctttcaacacagcacagctgtggaagtggctgtgttcttctacagcctgtggaagaacccctgtagcagagcctcccgtccaccctcaggggctgagacagctctcgaggagtggtgctcaagagctgacgcagggccacctccccttcccaagggggtgggagggagtgggcccacagggaaaagaaggcggctctgaaggaagatctcgcccacaccccaggacagaaagaggaaacaagcccgccctctggtgaaatgggactccctccatccaccaacacccaacctcctgaaagcttcacaacttcacgcagagtccggtgggcaggcaccaggcaggaaaggctcctcaagaggttcctggtggtctggcctaagccccagccagaggccctgctctctctggcctggggcatccacccgttgttctgaaggcagagcccattctgtgggctcacaagacacagtgaaggggatcatggcctgcacccctgcttttcagcagtaaaaagcccgaaaagcctggcgagcatggccgagctgggagggccgagccggaactccacgtccctcgagagcaggagcctcttaagggctggcactggtctcagcctaatggctgaggcggtaccctggcttcatatgcatctcactgctcccactgcaggggggcagggaaggggggtctgggagcccttcatgtgtgggggccgagctgggggcccccatggccatcctggacctcgctgctccagagtttaataaaggtagcacatgcttattgctagagcctttgcagacaatggcggtcctccgtgtgttcagctctcctggcggcctggccctgtccaccacaggacggcacaccctccggagtcctgcctcccatgcctggcctgaggcatggccacaagccagtggctctgtgggccagggccacctgtcctgctggggtcccagattctcctacttagagcagctccgtctgccccctatttaggccgttcacacctcaccaccttccctctgcctcaaaacctgatgctgaggtccattttccagatgaggaaactgaagtaccaggaggccctgtccagcccctcctcaccagacacacccaactcccacaggggcccacggtccccaacactcactctgaggctgggccacgcaccaggagctgcaccaggatgcccgtcactgccaccagaatgggatagtggtccacgctctctaggcctgaggggaaggggaggaaagagatgagccacccacacgctcctgcttcaagggctccaggcctgcccactgccctctctacagaagggtgagccgagactgcagagcaccaagtctggctgtccgggggcagaatgtggaatcaggcctcactgttcctagcagaggaaccgaggcctgtagtgtgttggggtgcagggcatctaggtcctcaccaggcagccgtagggtgaccacacgatcaaacaggttcctctcagctgtcacccggttcagcacctggtttagcagctgtgaggggagcaggagtccattggtggatggggagcgtcatcaatggggcatccccagggtcccacccttgttgcccagatggccacacctgtgcaagacgccgcagcagcatctcagaggtaggccgggtccagtcaaggaatatctcaggcaccagtgtgatagtcatctccaagacacgcagcaggctgaccgagaggtcaaagcaggtggcacataccttgagctgccggctgtccacaaagttccgctccaggcgctcagcagcctgctggatctgagccaccaacacgtgggcatgcagtggtcagcacctggctctagcccaggaccaggcctcatcccttgcaccaccctaacccacgaggccccaccacagcccacctcttggatcatgccaatgaattcagagaaggcccagttgagctgattgaggacgctgttgaggaagctgggtgccacatcaggaccctgctgtaggaggtccgccatgtgctgctgcagcagggtggaagggcagggctctgcagggggacaggaggcggcatcatcagggactccactgcagtggcctctgcctgtttgcctctgtcctcgcccattgaggctttggtataaggacagaaagatggctccctaggaatgctcaggtcatgaaagcaggggacagaggacagctgccttggagttagttgggacagaatctgtcccctccttctactaggcaagccccaggctgcagctgtgtccagccctgacaccacaccatccactccaggtccagagcagccacacagccacagcctgaccctcagcaagttctgggtcgcacacccttcagatagggtcagacctaaacagggcggcttagatgcttccccaccggcaccaaggccagctcctccaagagcctactctaagccctgctgcaaacctgctgtcctctactgtcctctgctgcccttggcctggccttggcatatggccgaggtggtgggcaccaagtctgggctggcaggcagcagtaaccggagccctcagctgcaacgggcctggcgcacctccccaccagcttgatacaaatcaatagttcccgcagcagcaggacaggcctggccccactgccgctctccacttgcagctcagttccgccctggacgcaggaccacggcaattggcaaggacttgctgtgtgacttagcagaagacactcagcctctctggggacaccctttggaccaaaacactgcccacaagggcagaaacagactacatgagccaagaagagccaccatgaagggtgaggacagtgtgtggcacacctggcactctgcaagggccaggcctaggggaaagtccttgctggaccctggagagagggcacagcctctgctcccaactaaatgtcccttcctccaggaactctcgtgaataccctctggggacctggccaacctccaatctgtgctcccagtggactcaggtgtccaaggcctaagccaaggccagggtctgccaccagcagatagcaaaaaagaagcagaaggacatggtgctgggacaaggctggaggtcagggagctagcttaaagggcaagggacagagtattcagtctgcatgagctgtagcaggccaggaacatggtgccgcctctcaccatgacccacatagagcatccaggcccaaagggcacatgtaggtaagactgtgggcaaggctggggagggggagtcccatcccgagtatccttgggctggaaggaagcagggaaagtggaaaccccaggggacacgtagggagtctgggacccaatgggggaaccagagaggggctggaagaagtggagagtctgaaagaacccatgggtaggaggtaagcgcccccgcctgccttgcccaggactcgcccaacccagatactcactctggaggctgggcaaattggcgtcctcaagtttggttttcagcagatgtggcagccgtgtatagcggtacccgaagccacagccctgtggaggtgggggtcagtgcccaggtcaatgggacagcgcaccctctccctccagccagcctcagccacttcccctcgagtcaggcttaccctccagagccgcaccaggatccagttggtctgggcccagggccgctgctcatagggcgccaggaggttcctcaccatggcgatacgcctgtgagggcaaggaggggagagacggggtgaggctgggcatggtgcttgtggccagggtgtgtgccccccaggccccactcactgctcctcggggattcgctccacagcccgcagggagtgtgggtagcacacgtagctggccagggcctgcatcagtgagtctcggatgtctgcggggacacaccgtgcctcagcaggggcttggcatgagccctggacccatacttcatgcccacctggccacatttttcatagaagaaagccgaccagaggtgccatcccatccccctccccctgtaccctctgtaggggcccctcaccagtgcccacaatgcgtgcgtcggcaaagtgtttggcgagaatggcagccaggcgggtcagggtctcttcatagcctgcaagggtgggaagtgagacgtgtcggctgggagtgggggctccagaggcaggcatgtcagcagggtgggtggacttgggtagcaggctctagagctggctcccaaggccagcctggacccagggtggcatctggggacatcgggcaaagcattcattggtggctgtgcaagggctaaggcacaggctcactgtgaagggatgacaggccctggcaggagccctgacctgggctcaaacccatctcagcacacacacctgatgagcagtcaaagctccttgggcactcacagctctgtctttgaagacaaagcctgcactgaggcctgtggctgggcagggggcaggctaggggcctgacagctcactgcctgatccagacatacactgccacgcccagcctggaatcagcaggctgagaggcccaggttcggatgtggaccctagcagggtccaccccctgctgtgatttaccaagacaaaccattctgcccctgaccaactgctacgctttgtgaccagtgccagggagtcaaggtgcaaggccagctggctcctggaccatggcagttgctcatagcactaggaaggaagtgaaagccaagaggtctacacccaccgtgttccatcttgtctgttttcctttgctagggagctgttggctctgtggctgcaggtcccagggcagggtgcagacgtttgtttgctgcagggtgaaccacagaggaagctcctcccctccccgccccccacagaagtgtgttgctgggccacagaggtctcagaccagggctcctagggctcacactagagaccccttttctgcttctgcctcagcctgaatggttccatcacctgggagctcctccatgctgtgcacgggaccaaagtaattcttgagagcactgtagctgttgatggccacgctcaggtagaactcgggcatgaaggcaaagagagaccctgtgcgatcaccgtgctcaatggtccgcaggcagacgcgcagcagccagtagatgtccagcatcttctcctgcaggaggcacacggggtgctgctgggttgcgcaccagtggggtcttgggggcatgtcctggcctggggatcaggaaaggcctccccaggcctacgacagcacaactgagacctggatttcaggaagcatgagcagtagctcaagcagggcaatcaagtcctcagcaggcaagagggacgcactcagcctggagggcgcattactgtgacccaggccagaactctggtcagcatatttgtaagcaagttttttttttttttgagatggagtcacccaggctggagtgcagtgacgccctcttggctcactggaaacctccgcctcccaagttcaagggattgtcttgcctcagcctcccgagtagctgggactacaggtatgtgataccgcgctcggctaatttttgtatttttagtagagatggggtttcgccatgttggccaggctggtcttgaactcctgacctcaggtgatctgcctgcctcagcctgtaagcaagttttaggcaagagggtgctgtgactggaagtctgtgtggaaaagtggagtacaaggtgtgtgaagggcccaagagagctggcgatggtaagcagacaggcagaaatttgatctggagtgcaaaggagaaggtggtgggaaagcagggggcagtgtgactggtggaacagaggtcacaggaaacagacaaaacctgctgagggccctgctccccacaatgtggtttccacaaagtctatgtcagggtctcacaaaggagcccaggcaagaatgaggcctcaggccccagcccagacccacagcacccgtgtgtcttggagtgcggtcacagcacctgggcttcacaccagctctctgatgtgccctaaagcccaaggaactgaggagaagatg

SEQ ID NO: 97150 - DNA, 12653 bp, Homo sapiens
ctaatgtgaaatagggaggctattactaatgcattgattcaacaatagctttattttactttgatgaaaccctgtccagagtttacacttagccctagggctcttaagtatatgtgtaattcaactggagtacaaacaaaacaggaaagaagtaaacaaacagaaaatgaagtaaacaggaaaaagtaactagaacaaaacacactagcagggaaaagaaattatcacttatatctttagggaatttttttaaaaaagaaggtagctgtatcacaaaatcttgatactttaaaaaggaaacatttggagggaaaaaaagagctcttgggaattaaacacaggttagaagaattaaagattcaagattcctactgaaaggtaaagttgaggagctgtcccaagaagagacagaaaagacaaaaaattagaagactagtccaagatatacaatatctgttcaatgaccgttccagaaatagagaacaaagtaaacagaggaaaagaaatgatcaacaaaataattttaggaaatgccccattcctggaagatgtgattttccatattgaaagggcacactgcctagcacaggggtggaggcacatcatcaagacacatcattataaaatttcagaacactgtggacaaagaaaaaaagacatacgataaaatcggaaatcagaataacttcagacttttctaccacaaccctagaaattagatgacagtgaagcaaagctttctaatttctgaagaactgtgatctccatgccaaaattctgtacccaacgaagctatcaataaaaagggtaggaaaggacattttcagacatacaaggcttcaacaaaaatgtccatctcatacaccctttctcagaaagccaccagaagatgtgcttcaccaaaatgaaggaggagtaaatgaagaaagaggaagacatgggacgcaggaagcagataatccaatacaggaaagaagtgaaggaatcacttagatcagggctggcagacttttcctgtaaagggccagatagtcagtatccctgtcacagctactacactgtccttcaggtctgtcttaaagaagatgctaagtgccaggtgtggtggctcatgcctgttatcctagcactttggcaggccgaggcaggtagatcgcttgaggtcaggagttcaagaccagcctggccaacatggtgaaaccccatctctactaaaagtacaaaaaattagctgggcctggtggcgggcacctataatctcagccacttgggaggctgaggcaggagaatcacttgaacccgggaggtggaggttgcggtgagctgagatcgtgccattgcactccagcttgggcagtaagagtgaaactccgtctgaaaaaaataaaagaaaaagaaaaagaagaggacgctaagctggatcctctcgtgggcttctacattctgtctgttagaatcagttgttttggttgatgtgtagatatgtagctggaaaagaaaggagcattttaataactttttcagataattgtggctattcatttttgtactacaccaaactttaatagtttctcaaaagttggttgggccaggcacagtggctcacgcctgtagtcccaacactttgggaggccgaagcgggcagattgcttgaccccaggagttcgagatcagcttgggcaacatattgaaaccctgtctctactaaaaacacaaaaattagccagatgtggtggcatgcgcctgtagtcccagctactcaggaggttcaggtgggaggatcacctaagcctgggaagtcaaggctgcagtgagccatgatcacgccacgcaatcccagcactttgggaggctgaggcaagaggattgcacagcctgggcaacataatgagaccttgtgtggatgaaaaaaaataaaaaacagacaccagagagtgagctctctcatctccccaaaatacccaagtctaaactatagtttgtgtgtcagttgttccttcaagtaaaaatggtgttccataaaatgagcaatcagttcacttcacaactcagttatgtaattgcttttcctcaagaccaccagcgtacctctacatgcagcaaaagtgaaaaagacaagcaatcaagggttgagacatcataaaattaataatttttactcctctgtccagagcattcggttgttcgatacgagtatgaggtattggagtgcaatagccacaggtgtgcttgtcggatttgcaccaaggcagccactttacccacgagggcttttgtgccaccagtgtaaatgtcagcacgtggaaaggacaaacactgccttagtatttttatgaaaatagttttaacctcctggattcctggaagggtctcagggatccctaggggtacatggaccataccttgagaaccaaatggacagttggtggaaagtttggggtagattaatatacatagcacacagaaaaaccaagcaaataaaaagacagttattaattccagtgagaataaaaagttgtatagaaaagaaaagtaacacttagtatttatgtaatcataatagtagattgataaaatgaattctgatcattgtcatgtattaggaggattaaggactagaatagttacgtgggcatggtgggggagggagtgtgtatggaagaaaaaataaattatcttctgtagtgaaaagtttgcaaataatgcctaaaaaaaatcaggaagtagcagacaggttatatagaaagttaatatccaaatactcttttaaaagaggtaaaagtagttactcttgggaagtaacagagagggatgggggctgctgtttttcataacaatactttaaaactatttgaactatgtatactttaatatttttattgtgaaaaatttcaaacatacatgaaagtaaagggcacaataaacccatcctccccacttcccagattcaactatcaagacagagtgttttaaaacaaaccacagacatgtcatttcgctcatacatattttagtatgaagctgaaaaaattttggacattttcttatataccacagtgccattagcacacctaacagtgactactaatgccttggtgtcattctgaacccagtccgtaatagatttccttcctttctcccatagattttcctgaattgggatcaaaacaagttatacacattatatttggtttttatggctcttaaatatcgggttaataaaaaaaaagcacccttttaaagatttttttaagagttaagaggcaaacgctatctgaaaacagaaggaattatgaggacagtatgccagcaatcatattttggtgggggtgggagcatgcataggggaaaaaatgaatggaaaaagaccagtaggaaataaaatcgaatgccaatagcggttatgtttgggtagtaaaactatgagtaattttttctacttttttgtattttctaatgttttttgaaaacgtgtagcttttatgtttttataaatgcttattttcgtgaaagtttaactaaacagaaaataaaagcccatagaagaaagctaacttgagtcaacagaaaagaactttgagtctgaattttgcctgccaaagtcagacccaagaaataaaaagctgcccaatctaatgagcttctaaaatatgagggtcataaaagaagcactagaaagtggcaaactctgtaactcagttggcctctggggtttctgttggaggtagtgtctggtgcccaggccactggcattagggactagagagcaggtgtgaagtaggcacaggatccaggaggggctgtgggcctcagtgcaaaccaagccagatcggaagtaatgagagtttggactagagacagagttgtagggcaaagcccactaaccacactccttgtactgttggttatccaaacaccctgcccagaccaagcgaccacatgagaggtagacctggttggttagtcctgggatgagtatctcttacccacaatcaagatgcatgaaatgagaggtcagattccagactcacatccaagggatggtccttcctcaagacactggcaaggaaagcttgagtttagcaagggctgggggaacaaagttcggaaccagatgggagggttagggagccagagaaggccaacgggcaaggggtagccctgcatcaagaacccagtgatgaagaggaggatctccgaagcctgtgtggccaaagtctgaggctggttttgcatgcagtggtgacttctcttggcgtaaaggtttggacttagaaggagtcagagcagggccaacagcatcatgccacagctgctgcgtagccaccagtctcacctggagttgaagtggagaaagctctgtatttttccttagtctattggaatggcttactttctggagcaggcatggtcagctatagaaagattgttccaacgttttcttaacgcctactaaatttttttttaaacactcacaagaaaatcttggacatgtatgcattcattaagctagtgctcaggcttttaggtcaataaacgctgaataatttatttttagcatatttctcacatgttggttgtgagagtcttattctctgacttagtaactaagtccttagaccttagaaccttagaatcttagggccaaagatcagaataataaaagaagggtctcacaattgattagctatcctcagtttgcgtctcctgtgacatccctgctgtgtgctgtacaggattagtcaggacctggagtgtactatggaagtcgcctatttcagccatttacttaggtcaaaaaccacggggtcattcttgactttggtctttctctcatgctacatctgcatccagtctgccagtgtgtcatcgctgctttgctttctgaatgcctccagaatcagcccccttccttaactaccggcactaatacctgcgtccaagctattctctctcaccttgacagatacagtggcctcctgactgtccttgcagcctctgctcttgccccacgtcatctcctctgcatacagctgtcagagtgatccttctgaatcttaagccttgtctctccattaaaactttccaatctctcattcacaataaaagataaaacgcccccttacaatggtaactttttccttgttcttttctgcctgtcttctgtgctggaaatgcatagactccagagtcttcctgcaaccagcatctcctctcatgtcctggagcattgctgctcacaggagagaagctgccttttatgtgtaactgagctctctgctgtgctgcaggccccctccccagctccagggacctgacatcagtcaaggttgagtttccccacctgccatcttctcatatccttcaagcctctgccccttccttgtagctgagcagatcttttcctccctgcttaactcattccattctgagaattggacattgtagaactatgttgtgtaccagttggggctttctcagctgaaccttcagtgctacttgggaatccttttattcgtcactaggttccaagccttttttcttcggttccaacctcaaccttgctttccactcctctttcctttaagacccatcattctcccaagtacctttcattcctccttcttggaaacgagagaggctagccaacttcaactgctgaggtccccctttccacatcaaaatttctctctgccttgccgctacttaggaggctgaggcaggaggatcacttgatcagattgagaacagatcgagaccctgtttctaaaatataaatgaatgaataaataaataaatatttggctgggcatggtggctcatacctttaatctcagcactttgggaggctgaggtgggcagatcacctgaggtcaggagttcaagaccagcttggccaacatggtgaaaccctgtctctactaaaaatacaaaaattagccaggcatggtggtgggcacctgtagtcccagctacttgggaggctgaggcaggagaattgcttgaacccaggaggcagaagttgcagtgagccacctgtgaagagaaagcgagcattctgctgggtgtataagtggattgtgtgcaatggtgcttcagtctagatattcatgccttaatcttactgtgttcgtctctccctttttcaggggaagcctgagctttgctyagtgatgatggccctagtgtgaggactggggcttgtggagtagcctcttgtttgctctagccaccccactgcctctgtcctctgcagttactaggaccttccctagcaagtttgcgtcctttccaccacaggcatgacctgcctctctctgctctcttccagcccgtcctctctctgcctagtccttttcagacacttgcttcttggcacctttgacttttctcactgccgggctgcccstactaaggatgattgccctgttttcgtagctctaagaagcagccaaaatccactccacctccctcccaccctccgtcactccaaacagcctggttttgttccagtcaggaaaaggtttctttcttcctcatatttttttgaacaaaatattttgcatacggaagcccggagctcctgcaaaagtgattttgtacctaattatttaagattataagttaaccccacttgcagttttttcagccagagatacatcttaatgaagtgctgacatttttcagaggataaatttaaagatacatttgaatggaactgaataattttcaaaggaagtggtcatacttctgtatcaatatagaaagttgatgtgtgtttgagacatacttggtttattttacttcatcatctgcctctgtctaatttatgaccttcacctgaaatggaataaaagtaacactagattttgggtctgtctttaactggatctggtcttggccgccacttaggagtttgtatgacttttgacaagttcctggcctgttttctcaactgtaaaatgggctgaacaatgcactcctcccagatgtgttaaggagattttagaagtagtaggtttaagaatactccgagtgttagactacttccggtcttacttagtacagtaggtaggccttgaattacagtgctgtagtacataattatgtactcctttttcagtagttttttcccagtaatacgccttcagtcagtgttggcactgtatttaatttgacattctgaacagtggtattccagagtatgtgcagtaaactcacctgcctacagaagagtgacccaaatcctgtgattaagaaagaaaagaggggccaggtgtggtggctcatgcctgtaatcccagcactttgggaggccaaagcgggcggatcacgaggtctggagttagagaccatcctggccaacatggtgaaaccccgtctctactaaaaatacagaaaatgagccgggcatggtggcatgtgcctgtagtcccagctactcaggaggctaaggcaggagaatcacttggacccgggaggcggaggttgcagtgagcccagatcgtgccactgcactccaacctggtgacagagtgacagagtgacagagcgagactctgtctcaaaaaaaaaaaaaaaaaaaaaaggaaagaggaaagacatgatcttctttatgaagtgttttgtttctgaagctctccctgctgtttctactttttccgtgaaaaactctgtccttttgtcttctgccactggctttggttatgcactgggcattgatgtgaatccagtttccaaattggaaagtaatgaggtgttccatacagagaggcctgccttacatactgtgaggttggctattccgaggaccccctccatttggatctttgctttcttgctgcctttctctgtgtcagacgacaacagactcctttcttttctgcttggcgtctgcagaagatggtttcaggccttctttccctggcctagtcattttttagtacatgtcaggtgtgactcccagaagcactggactgtgttaaggcatagtagattcggctgccagaggtccctgtgcctgagcaggaagttcctgatggctcttcaagcttctacctcagcccttcgtgtatttaaagagaaggttgggatggattttcagggttgcaggcgttaaggaagacgactgaagtgaagcaaaacagctatgggaaagtgatcatcagcactgcagtctccaatttggtggtgttcctatgtgctgttaggaagggacatcttatctatcttgactgataaggaaacaaagtagaggtgcccattaaggaaaaaaaaaaaggagctcaaatgaactggtagccaatgccagcataggcggtgagcaggctttggtaaagagtgacaagctgctgctttgggcaagtctcaggtaatcaattttaggaataccttaggattccaagtggctcctggtcagggccagcaatcagaggggtgagaaggagctacagagatgtgcttagagccaggagacgtgggcctgcagggtacaggggtgtctgggaacctcgtggaacttgctgctacgttttatgcataaatatttcagggaggagggcctggagcattcactaagtttttttctgtttgttttgtttttttgagaccgagtctcactgtgtcgcccaagctggagtgcagtggcgcaacttcggctcgctgcaaccaacacctcccagactcaagcaattctcatgcctcacctttctgagtagttgggattacaggtgcgcactaccatgcccggctaatttttgtttttgtttttgtttttttgtggaaacggggttccattgtgttggccaggccaggatgccaaactcctgacatcaagcagtccacccgccttgacttcccaaagtgctgggattgcaggcatgagccaccgtgcttggccaaaattcactagattttgaaagcagttcttgacccatggcttatgtgaaagcaaatgcccgatcagggtgcagtggttgccctgtgctggagcattcactagggaaaaagaccgcagaccctgggaggctgcagaccctgtgacctgaatgctggatgctggagggaacctccagaccacttgtgaaatgtgaaagagaacagtggaatagaactgaaactgacgttccctgagcatgctgaaggcagactgtacagcccaatgtagacgcacaggaggagtgactgggtttggaatgaaatgtagaaaaggaagcaagctaaatcaccaggggaaacccttgagaccacaagaatgaagaggtcatggccctgtcattccagaggaggctggagcagctcttcaggaaatgtggatgtgcgaagaggacaagcctggctgagcctaaaaggggctcttcagactcttctggagacctgcacatggcactccccactgggactgtcaggtggtacctggaattgactctacagttgcttttgcccacagcacacacatgcttcctgagagccaaattcagacctgcttgccacagtggaagatttgtgagattatttgaatcccttatatctttggatagtggtagttcttggaataatatggaaagaatagtttcaggatttttttaaaagaaaagttaaagtcagtgattacagattcaagattcttataagactttgctctggataaaaatgtgagtagttgccaccattcttttcctctaccccatggctgccatttttcaagagtattgattcttcctttaagggagggtgaaggtaccaaagtggtctctccagcctttcagggcagaagctgtattccctggaggctttgtggtgtgaacagcacctgggctgggctcagtccttccccatggggaatgcctacatactcttcaactggctttttcggaaagcattgtctgagagcttgtgaacagaagggttggctggtgaagagcaaggcaagggggatgtctgcaagcccaggttaaaaggtaaaatgttctactcttgactggtgctccctcccttttcttgcacagaaaatacacttccacgcatttatccagagcttttccattctcctcaggccctcaaactccacctagcctcctttgtactttgcctcatgctcaactacatagattggggttctgtgatagtcatgctctcagcttccctcttcttcccttcagggtctcctgccctttccttccttccttcctccccaccaggctgggcttcctctgtccaggatggatggcctccatttggcccaagatcccttttgttctcttgtgtcttcagtcttccttcagtgctggtttctcttctttaccctacaactgccacacagccctctgttctgctcattccaaagcgctccttccctcctgttcttttggaagtggtcatccacactggttgcattgcctccgcttccgatgcccccacctatccttaacctggtgcttcccaggttttttcatgtcatgtcacacacagaagatgttgctgtttgagtagcaccggggacgtgtgcatgaggctgatgggaggccgaagctctggctgccctgggagtaagaagagctagagccctcctcacagcgtctccagaacccatttgcagtacatgccttaaacctttgcagtgtgactctgcccctgtcctatattttcctaaaatagccttcataaacaccaccagccagcaaatgctcaatgccaggagcttgtctttgttttctcctccttgacatccaagtggcattggacatacacttgcggtttagagagactctagggctggactgcctgggttcagttcccagctttgccagtctctagcagtgtaaccttgggcaaattccttaatttctctatgtcttagtttcctcaactgaagaagaggatagcaaaattcctacctcatagcattgttatgagaattaaatagttgccatatggagagtgtgaacaatgcctgtctcatagcaattgctctctgagtgccctgtgttgtctttgagtcccctttcttaaagctcttttctcctgcttttcctaacatcggtcactcctggtttttgtcctgtctctctcagctctcttgttttttctactgttttcattccctggcttctcttctctccttaacatgaaggaggtgttaggccaagcagccccacctcccccaaccgccctttcttccatagacccttccacctccaaacggcccaggcccacatccgaatgcctgccagatcccctcacctacatctctccctgaacctcagacctaggagtccccaaaatgttttaatgtcctttttttgttttaaaagtaatacatatttattatacaaaatacagaaaagtgaaaataataaaatgcacctcagtggtaatcccaccgctcggctggcaccaccactaaacttgggtatatctccttcaagcccagtggttctcagcctgggccagctttcccctagaagacatttggccatgtctggagacatttttgattatcaacttggtagggagaggtgctcctgacatccagtggatagaggccagggatactgctgaacattttataatatacagttcagccccctggccaacaaggaattattcagcccaacagtgccaagattgagaagcctgttctagacttctgtctctacatatgtgccccaaatggaaaagtcggaatgggtttcctctttctagcctcatcctgcttctccacctgtgttcactctttttgtcagtggccccacctcccccttctccctcactccacatccgagctgttcccaagcctgcagagtccctgtctgccacattgttggcagctctctcctctactactctcagtgtcgacattgatgcccactcaccgaaactaatgaaaaagcctccagcatgccttgcctgtgccactggtgtgcttggggaccgtccataggtgtccagtgcccattggattaattccacgccaggtggagactaagctccctgagggcagcagcttccatctctgattcatctgggtgcctagcctgaacctgccaccattccgagcacacagtcagtgctcaataaatctttgttgaatgtgtatggatgaatggctgaaggaagaaaaacctgaaaaacatttgtcctcacaattcccttgtaatctgtccatctttgcagatccttgatgaatggtttggccggaccatcatccgctcctgcaccaaacttagctacgagcatgcacagagcatgattgaaagcccaactgagaaaatccctgcgaaagagctgccccccatttccccagagcatagcagcgaggaggtacaccaggccgtcttgaatctccacggaattgccaagcagttacgccagcagcgctttgtggacggcgcacttcgtttggatcaggtcagtacgtgtttttttagtgtagccaacagatttgactcgtgcctgaacccagcgtggatgagcgcagcttggcaggcttagactcttccttccttctctttgctccaggcaccacactaaaatcatgttctctgaggccggcaggaactaactcccattcactctccaaatacaggatattatgcaaaatattctgtattttgtatgattccacaggtacacgaggcctaatgacatgagcc

SEQ ID NO: 97151 - DNA, 12871 bp, Homo sapiens
tcctccactgctttctggcctccatgtttctgattagaaatctggtgggaacgttatggaggatcctttgttcaggatatgttgctttattttttttttctttagacagggtctcactctgttgcccaggccggagtgcagtggcaggatcatggctcactgcagtctcgacatcaagtggaccccctgcctcccaagtagctgggactacaggcaccacccagcctaattcttttttttttttttttttttttggagacggagatttcctcttgttgcccaggctggtggctcccctccattgtgcaatgatgcaatctcggctcactacaaccttcacctctaggcttcaagcaattctcctgcctcagcctcctaagtagctgggattacaggtgtgtgccaccacgtctagctttttgtattttcagtagagatagggtttcaccatgttggccaggctagtcttgaactcctgacttcaggtgatccacccacctcaggctcccaaagtgctgggattataggcatgagccaccgcacccaatcccagctaattttgtattttttgtagagaccgggttcttccaagttgtccaggctggtcttgaattcctggggtgaagcgatcctcccacctgggcctcccaaagtgctgggattacaggcctgagccactgtgactacctgatacgtctcttctctcttgctgctttcaaaatcctgtcttttgtgggagggcagctgccgagctctggacttctacgggatcatccactgaggacaggaggaccgggccctctacaggtggattgtatggcagctgccatgcttggagccagtgctcaccgagcacgtggcggctgtggagctggacgcggggttgataagtccgctgggggtgacgggctcatccatgagtggtacttgatgtggctgcagaaggcggatgtggtggtggcagaagtgacacaactgtccctgggtataggctatgatctgtgccaggccacagccctcaataagtgaatcctgtgcctgctccagccgcagtctggtggagtgctgtcggccatgatctgggaagaggcagatggctctgggttccaggtgtgggactacggagagggacaggtggaggccctgctgcatggataggttgaggctgatcctcccgagcaggttgcctcccctaacccaaccattggacctaatcccattttattaaattcttctcatcccagacactgctctagtaccagtcctggctctttgccccaggagcaaattaaaaggtacatttaaaattctaaaaaaagaaaaatctgtcttttgacagtgattatgatgatgcgtatggctgaagatctctttgagtttaccctacttggagtttgatgagctttttggatgtacagattaatatttttcatcagatttgggaggtttttcagccattaattcttcaactattcctttactcctttctccctgtcttctttcctgggactcccattgcgtgtatgtcggaaagcttgacggcgtctccaggtctctggatctctgtgcattgctcttcatgcttgttcctgttcctcagagggtactacctcaggtggcctctctccatagtcacaggctctttcttccaattgttccaatctgctcttgggcccctgggatgaattttcatttattttaccctacaactccagaatttttatttggttcctttttaaactttttttttgttttttgttttgttttgttttttggagtatcgctctgtcacccaggctgtagtgcagtggtgcaatctcggctcactgcaatctctgcctctcgggttcaagcgattctcctgcctcagcctcccgagtagctgggattacaggcacgtgccaccacgcccggctaatttttgtattttaagtagagacggggtttcaccatgttggccaggctggtctcaatctcttgacctcatgatatgcccgcctcagcctcccaaagtgctgggattataggcatgagccaccatgcccagcccctttttataaggttcatcccattattgatattctctaattggtgagacattgttcccacactttcgttagttcttttgacatggttcttttctttttcttgggagagggtctctctgtcgcccaagctggagtgcagtgatgcagtcatggctcactgcagcctcaacttcctgggctgaagtgatcctcctacctcagcatcctgagaggctgggaccataggcagccagctaattttttaaatttttttgtagagatgggggtctcaccacatttcccaagctgctctcaaactcctgggctcaagcaatccacgggcctcagcttcccagagtgctaggattataggtgtgagccactgcaccaggcctacacgtggtttctccctttgaagtactagccaggcctgaccatgcttagcttccgagatcagcaggttccagccggtgcagcctcagatgcagcatgttttaggtctttgaacatatttaaatgagctgactgaacgtctttgtctagcaattgcagcatcgggctggtcccattggtgacttttcccgtgtctgggtcgtcctttcggtttcctttccatgtctcataatttgttaaaacctggacatttcacgggcgataatgtggcaactccggaagtcagattctcttccctgccaaggatgtgttgttgttgttgcctgttggagctgtttctttgctgggtgacttttctgaactaattctgactaagcattaatgtctccattccctgcgagctgtggccactgaagccgctcttcagttacggcagtggtcagctaatgactggtcagagagttccttaggtgcctggaagcgaagtctttgccgagtgggtctctctctgtgtgccgggcgtggcttcagtgctcggctaggcagtgctcaactttcccttagccgtcacctgctgtctgcacagcacctcaggtcagtcacgtgtgagggctcagggccttgccggccttcctgaatatgggcacagctgcagacagccttacccacgtgcagggcacctagattcccaagaaggggcaagagctgttcaaaaccactacaagctggacatggtggctcacacctgtagtgtcagtgactcagaaggctgtaatgggaggatgacttgaggccaggagtttgagacctagcaagaccccatcccccacccaaaaaaacaaaaacaacaaaaactcactgtggaccgctcatgccccagctgctgctttttaaccccagctgttatccatcaccacaggcagcttcgattttcaatcatggatctgatgactttcaacaaactttcctgaggaaagtgctgttctcaccagaagagatctcaggacaaatgtagacagccctggcaagtggggtctccctgggagctagcagacaggtgaaagactgacagttcttggggaattaggcttttcttttgttttggagatggcgtttcatacttatcacccagactggagtgcaatggtgtgatctcggctcactgcaacctctgcctcccaggttcaagcaattctcctgcctcagcctcctgagtagctgggattacaggcacccaccaccacgcccagctaattttttgtatttttagtagagacggggtttcaccatgttggccaggctggtctcgaacatctgacctcaggtgatccacccatctcggcctcccaaagtgctgggattacaggcgtgagccaccctgcccagcccaattatagattttttaggtttaggtgttgacagtagctctcacctcagcctgttctctctccttgtcatgcagcccacaggggagatggtcaggccagtgtgggggctaatgaataaatgctacactgtgcccactcaggtgggtaagggctggcactcctcttcccctggagtggggcggctgtgctggcacccttggcagacacagtaagggggactgcacctggaaaggatgggccagtcggggcaggactactcatcactcatagtgtgggtgtcagggttgtgtcacccctcccacctccctctgcagagacgcaaagtcaagagtaggaagaagccaacctctgaggtaaggcttcccctggaaggcccagggctggggctctctcctttcagagctcagttagacccagacacacggcagggagtcccaagggtagtggcaggccccctccaggaaactcacaaggttaccacagctcaactgaaaaggaagaacttcccaggactgtgacaccccagtgtgagaacaggaggatgaggtgctctgaaggcctttctgcccagtctgccctcttattcctcctgcaggtcacgacccccaggagacctggaggactgaatgctgctgcccccaaggaggaggctgccgtcttatcccaggagggagagcaggtgaagtccccaggggaggaagcacctagccccattcctgctgagcaggaggtggcaggtaccccagactgggaggtaaggacagcccggggcttcgactgaacgtctccagcgtgggtccaactgagcagccatggagcactgcagagtgggaggcagcagggcagggaggcagtgctggaggctggctcaaccccaagaccagcaggccaagctgccatcccaggggagcgaggacgtctgtgcagagctgagaggcagcagccatgtgtgaacagactgggcctcatcctggccccaccgactttgtgtggacagagcctgtttccctgtctgtgcaacacagaacctgcctgatctcactgctggatccctcttcttcctgccaggaaaataaaaaggttcaaaaggaagttgctgcgtatccatctggtaagaccactgacccagcgtgctgcagggggctgcttccaccctgcttctcagtgactgccagggtcacagacaccccagccctttcccaccttcctgacctggggaggggaggggagggaagcagcccaggagtcaggtgccttgaccttcctgggagcctccttgggtgggcaggaactctgggccactcccctgagctggctgcatccctacctttcaccacagctgacctggccccggggcatctcagagggagggttggttgctcccaggaggggactcacaaggctgcctgtttctactttgcagaggcctctgaggacagcaaagagcaaaggccctgggaccgggtctacgtgcccatgacagagctctggctggactggttctgagcctctaacacccccaagactcagaaccgtgaagaaaatctttccaataaatccaagagttgctgctgctataggccaggctgccacctttcggggcctccgtcttcagacaaacccagcctggcttcatccacactccctgtccccacagctgcaggaacagcacttcctgccaccgagccgtgtgaccacagtggattgtctctggaggggcccaagggggccctggccacccttctgactgactcggtgccaggggacagaccaacgtccctctcgtgctgacagccgggccgcaccctggcatgagggcatttacagaaatgctggcggaactgctgccagggaggctgtagggtcctctggcaaaagaggcctcaggtggctcctcagagtgtctgtggttctctgtcccaggctgttccctaagaaggtctgcccaggactcaggtaatcatatgctcattagaaactcttgggcactgcctgtgtgcccagcccagcccattatgtcggtgaggacagacgtggaggacagcagtccctgcccttggttggggctccaggccagcaagggccacagccccagaaggcagagcaggaagacaggactcggggcaggtgaagcagccttctcgttggcagaaggaaacagaagcccggggtggggaagggtggggaagggtggggaagggtggggaagggtgggcccggggtcacacggggtaatggcagagcaaggactagggtcagggtctctggctctcagctgcccatgccacctcctccttctctgcccgccccagtgccttatgggtccaaggttgactcctgtccctagggcaggcctgtgggccctgcctgatccctactgggaggatggtacctagggttggagccaaacaagtgtcctcctccagcgccagcctggccctgagtgcgaactcgtcactggtcaggggtccagacagcagcrtccctgagggcccagagaggtrgccagtcctgtggtgaggttgagaggtgtcaacgtgctggyggtcctcgctcgctctcagcgcctcctcggcctcagcttctgctctgaccacacttgaggagcccttcagcccagcgctgcactgtgggagcccctctctggactggtggaggctggagccggctccgtctgcttgcggggaggtatggagggagaggcgtgtgcgggaacctgggttgctcgcgggccagcaccagttctgggtgggcaggggctcagcgggccctgcactcggagcggccggctggtgcctctggccccaggcagtgaggggcttagcacctgggccagcagctgcagagggggcaccgggtcccccagtactgctggcctgccggcgctcaccacacttgaattgtcgccaggcctcagtcacctccccgcggggcagggctcaggacttgcagcctgccatgcccaagcctccctacggtgggctccctgcgaggcccragcctcccggatgggtgcctcccactgctccacggcacctggtcccgtccactgcccaagggctgaggagtacaggtgcccggtgtgggactagcaggcagctctgcctgtggccctggcataggatccactaggcgaagctggctgggctcctgagtcaggtggggacttggagaacttttatgtctagccagaggattgtatatgcaccaatcagcactctgtgtctagctccgggttcgtgcatgcaccaattagcactctatctagctaatctggtggggacttggggaacctttatttctagctaaaagattgtaaatacaccaatcagcactctgtgtctagctcaaggtttgtaaacacaccagtcagcaccctgtgtctaactcaaggtttgtaaacgcaccaatcagtgctctctgtctactctatctagctaatctagtggggactgggacaacctttatgtctagctaagggattgtaaatacaccattcagcactctgtgtctagctcaaggtttgtaaatataccaatcagtactctgtgtctagctcagggattgtaaatgcaccaatcagctctctgtaagtggaccaatccactgtctgtaaaatgggccaatcagcaggatgtgggtgggggtcagataagggaataaaagcaggctgcctgaagtagcagcggcaacctggttgccatcattcttttgctgtttgcagtaagtcttgctgctgctgctccctcattgggtccacactgcctttatgagttgtaacactggaaggactgcagtttcactcctgaggccagtgagaccacaaacccaccaggaagaatgaacaactccgtacgtgcagccttaagagccgtaacactcactgtgaaggtctgcagcttcactcctgaagccagcaagaccacgcacccaccagaaggaagaaactctgaacacgtcttaacatcagaaggaacaaactctgaacacaccatctttaagaactgtaacactcaccgtgagggtccacggcttcattcttgaagtcagtgagaccaagaacccaccaattttggacacaaggtgacaggctgagggcggtggctcggtcctgggttttcctggggccttcccagggaatgttctggcacctgccgactgagccctgggaggtagccctggcatatagctccctgacatgatttgtcttccattttggggtgtcatatatgaagggaggtgactgttgtgatggtgctggcaggactgctgtccctgatgtggggtgggctgagttaggcctgaaatatgggcctccaggctgagtcctgccctctccaccacatccagggctgactgacacctctagtcagcccattctggccccttccccacatgccaggacaatgtagtccttgtcaccaatctgggcagtcagagttgggtcagtgggggacatgggattatgggcaagggtaactgacatctgctcagcctcaacgtacccgtctcaaatgcggccaggcggtggggtaagcaggaatgaggcaggggtggggttgccctgaggaggatgatcccaacgagggcgtgagcaggggacccaagttggaactaccacattgctttattgtacattagagcctctggctagggagcaggctggggactaggtaccccattctagcggggcacagcacaaagctcgtagggggatggggtcaccagaaagctgacgacacgagagtggctgggccggggctgtccggcggccacggagaagctgaagtgctgcagcagggaggtgaagaagaggaagagctccatgcgggccaggggctccccgaggcatgcacggcggcctgtggggaggggaggggcgtcagtgagcctggctcctgggtgatacccctgcaagactccacggaaggggacagggagccgggctccccacaggcacctgctgagaaaggcaggaaggcctccggcttcacaaagtggccctgggcatccaggaagtgttcggggtggaagcggaagggcttctcccagacggcctcatccttcagcaccgatgacaggttggtgatgagtgtcgttccctgggcaggagatgcagggtgagagtggggactggactctaggatgctgggacccctgccaccaaacacacgggggacacacactgcctggcacacagctggactctgtcaactagtcctgcgcccgagaagctccacagtaccctctccgaccccacagcagggcgcagtcacacctctcagaggcacccacactgccccctctccctgcaggcgctgggtcctccaacattctggcaggtcctgatttgtcttccccactagacgggggctctggatggacaggccagccctgcctatactctggaccccccatccaagtggggacagtcagtgtggtggcattgaggactaggtggccagggttcctagagtgggcccacctggcagtagccatgctggggctatcaccaggggctggtgctgagctggggtgaggagggcgccaggcctaccttagggatgcggaagccctgtacttcgatgtcacgggatgtcatatgggtcacactcagggggatgatgtccccaaagcgctgcacctcgtgaatcacggcagtggtgtagggcatgtgagcctggtcacccatctctggtcgccgcacctgccctatcacgtcgtcgatctcctgttggacacggactggacagacatgcgtccccacaatgggtcagcacccaggggacactctccttcctcctgtgttggaggaagttaggcttacaggagcctggccacgcctgtgctggaagccccgggtgtcccagctaagcccaggggcccccagctgtacccttcctccctcagtccctgccttgggccccagctgggctcacgctgcacatccaggtgtaggatcatgagcaggaggccccaggccagcgtggtcaaggtggtcaccatcccggcaaggaacaggttacccaccactatgcgcaggttctcatcattgaagctgctctcagggctccccttggcctgagcagggccgagaggatactcaggggatagaacggggtagcccccaaatgacctccaattctgcacctgtcagcccagatgcggctcgccgggtgatgcactggtccaaccttttgcccagcctcccctcattcctcctgggacgttcaacccaccacccttgccccccaccgtggcagccactctcaccttctccttctttgccaggaaggcctcagtcaggtctcggggtggctgggctgggtcccaggtcatcctgtgctcagttagcagctcatccagctgggtcaggaaagccttttggaagcgtaggaccttgccagccagcgctgggatgtgcgggaggacggggacagcattcagcacctacaccagacagaacggggtctcaatccctcctgtgctctgcgttcatctggaccagtctcaggccccagccatctccaggaagacccagggcctgcctgtccttaccactgacctcaccaagtccctccccaagtgccagcctccaccctctctctccttgcccagaggagaaacctaaaatcgaaatctccaacgtggacgggggtacagagtccttggcctctcctggtgccccctgacccgggcacacctctcccacgaccatgtctgagatgtcccctcctcctccaggcccttcttacagtggggtctcctggaatgtcctttcccaaacccatctatgcaaatcctgcccttcggaggccccagtccagccccggcacctctcaggagctcgccctgcagagacccttgctccgcacctcgcgcaggaagcccgactcctccttcagtccctcctgagctaggtccagcagcctgaggaagcgagggtcgtcgtactcgaagcggcgcccgcaggtgagggaggcgatcacgttgctcacggctttgtccaagaggccgttggggcgaaaggggcgtcctgggggtgggagatgcgggtaaggggttgccttctccgtcccccgccttcccagttcccgctttgtgcccttctgcccatcacccaccggcttggtcggcgaaggcggcacaaaggcaggcggcctcctcggtcacccactgctccagcgacttcttgcccaggcccaagttgcgcaaggtggacacggagaagcgcctctgctcgcgccacgcgggcccatagcgcgacaggatcacccctgggggcgggacgggcacgtgggcgttgccatgaaggccttggccccaccctccgccacccactccaaccctggcgctccacaaggtctcccgcagtccctagcccggtccagctgggcacagggcccactctttgctcacccacattgctcccctgcctggggcggggtttggccccacctcgtctctgcccaccctgaccacctttccactcaaggaagatcccgcccgtcccgcccacactgagcccgcagcataggcgcggtccccgccaccgccacttcgacgcatcagcctcgcccaccgggcttctggcgggtctgggcagtagccccgccccctcccagcccacagactcgcacctcccccgtgcaggtggtttcctggcccactgtcctcagcccactcgctggcctttatctctgtttcacgtccaggaccccacgccctgtcggcgctgcttgggctacggtcactgtccacccggggcccacggaaacgcggtctctgtcccccaccgccgcttgccttgggaacgcggcccgaagcccaggacctggtagatgggcgcaggcgggcggtcggccgtgtcctcgccgcgggtcaccatcgcctcgcgcacggccgccagcccattgagcacgaccaccggcgtccaggccagctgcaggctgaacacgtccccgaagcggcgccgcaactgcagagggagggtcagggcctcttgtcaagccaggatcaccccagactacaggtcctagtcctatttgaaccttggacgacccccggggctaccaggagtgagcaggtggaaggaggagacccagcctcctgatcctggggcgggggtgggggtcacaccttctgtgatggaggaactcagtttggatgcgtcacccaggtatgaccttgcaagagtcaccaaaattgccgagaggccccagttagcatcccattcccagatgatggtccatgccggtgagcagtgaggcccgaggacccacagtgcaaaaggtttgaaccgggtcactgcacccccttcatcctcgatttcgtgatttaaacggcactcaggactaactcatcttccattcccaaggcctttccttctggtgtcagcagaagggactttgtactccataacatatgttgcccaatgggcttgcatgcccactgccaagtccagctccacctccaggcccttgccctactcttccttggcctttggaaaatccagtccttcatgccatgtataaatgtccttccccaggacgtcccccaaacctgcttccccttctcagcctggcttctgatccagcctgtggtttaacccaccacccatgtttgctggtggtggggcatcctcaggacctctgccgccctccaggacctcctccctcacctggtcgaagcagtatggtgtgttctggaagtccacatgcagcaaggttgcccagcccgggcagtggcaggggacctggcgggtagcgtgcagcccagcgttggtgccggtgcatcaggtccaccaggagcaggaagatggccactatcatggccaggggcaccagtgcttctagccccatggctgcctcactaccaactgggctcctctggacacacctggcacccccaccccaccaggcacagaggaccaggcaggacactctcggcacaccgagcgcgtgacccttcccttataaagggagctgatgatggccttcgccctctgctgtgagtgaacctgctgtgttgactgtgctgccagtggcagagtcaggccagggc

SEQ ID NO: 97152 - DNA, 16270 bp, Homo sapiens
  misc_feature (1)...(16270): n = A,T,C or G
gccatatcacataataaaattatcttgtagaaaaaagcattaacaaagtgttacaacattaaatatccatcttaaatttacttccttaacctctcaaagcctatatcccaaacaaagttacaaaaaaaaatcccagtagtagagcatatgatctctaggtccatggaagagacaccagagaatcacaactcatctgcaacatacagactaggatacaatggctagaagaatacagtaaaataaaaatgtatacataacaaaagttagaatgctcaaccatatacttgaagtcaaaacaagcaacttttttaaatcatgggactgaatccttgtgctttagagcagctataagcttcagaaattaaaaatcttggccagggtagctcacgcccgtaatcccagcaggaagctgaggcgggtggattgcctgaggtcaggaatttgagaccagcctggccgacatggtaaaattcttgtctctactaaaatacaaaatacaaaaattagccaagggtggtgggcaggtggtggatggcacctgtaatcgagctagtgggtaggttgaggcacgagaatcgcttgactcacatctttaatcccagcactttgggaggctgaggcaggaggacaacttgagcccaggagtacaagatctgtctgggcaacatagcaagacaccatctctagtacaaaaaaagagaagaaaaaaataaagcaaaaaaattttaaaaacaaatccttagtggctcatgcttgtaatcccaacaccttgggaggccaaggtgggtgggtcacggggtcacgaggtcaagagatcaaggccatcctggccaacatggtgagatcccgtctttactaaaaatacaaaaattagtcgggcatggtcacacacacacacctgtagtcccagctactctagagactgaggcacgagaatcgcttgaacctgggaaacagaggttgaagtgaacaaagatcactcactgcactccagcctgggtgacagtgagaccctgtctcaagagaagagaagagaagaaccaatgacttcaaataaaataggcagaagtcactaagtcaaggaaattaatattatgaaatcctttccgtttttttttttttttttttttttgagtcttgcaccgtctcccaggctggagtgcaatggctcgatctctgctcacagcaacctccgcctcccaggttaaagtgattctcctatctcagcctcctgaatagccgggattataggcgcctgctgccacgcccagctaatgttttgtatttttagtagagacagggtttcaccatgtggccaggctggtctcaaactcctgacctcaagcgatccacctgcctcggccttccaaagtgctgggattacaggcatcagccactgctcccagccaggaattcctttttatatttgtccaaattatcatattagtttactatttagtcagaatggaattagatctactcctactcacagtgattctagttttttttttaatatcagatcatgtcattccctttctaaagaatatctaaatgacttctaatctcagaacaaatccaaagaatttcccatgtcctaaaggccctatatgatttggcccctgcccacctctctaacctctttttacctccaacttttcctttcactccacttcaaacttacttcattggctgtgtatgttttcctctttcccttcacttaaatttaagatactatcataaatatgcttaaatatggccagacatagtggctctcacctgcaatctcaacactttcagaggccaaggggggcagatcacaaggccaggagttcgagaacagcctgaccaacatggtgaaaccccgtctctactaaaaatacaaaaattagctgagcacagtggcgcatgctggtactcccaactactccagaggccgaggcacaagaatcacttgaactaggaggcggcggttgcagtgagccgagatggcgctactgcactctggcccggacgacagagtgagactcagtctcaaaagagaaaaaaaaaaatatatatatatacacacacacatacacacacgtatatgtacacatatatatacgtatacacgtatatgtacacatatatatacgtatacacaagtatatatacatatatacacacacacatatgcttaaatatacatactcatcctcttaaaaaaatgaaatcaagctaagtttggcataaactgcatactgattgcaatttagcaagagtatttgatgtttttctttattattagctataaaaatgtatttggatgaagcatcaataaactgagaccaacacccagaacgagcagcttcagtgcctgattttcagtcacatgactatcgtaattatgaacataccaaggccttcacttaatactacagctccacagattaaagatgagggattttatagtaattacaaacttcaaaccgtcttggaaattttaatcccacaaatgagcatgtccccaaagagccccatgtatagcaaggcatgtaacattaagttcaaaatttagttatattaatgtgtagttacaagcaaacagttccattgggcaggtaaacaaaggaataaactaaatggcagagtcagacaaaatacttaagatcctttttttttttttttgagacggagtctcgcttctgttgccctggctggagcacagtggcgcgatctcagctcacggcaagctccgcctctcgggttcacgccattcccctgcctcagcctccagagcagctgggactacaggcgcccgccaccacacccagctaattttttttgtatttttagtagannnnnnnnnnnnnnnnnnnngcatgaaccaccgcgccctgccgggatccttttaaaactacaaatatgggtgggcgtggtggctcacccttgtaatcccagcactttgggaggccaaggcaggcggatcacctgaggtcaggagttcaagaccagcctggccaacacggtgaaaccccatctctactaaaaatacaaaagttagccaggaatggtggtgggtgcctgtagtcccagctactccaggggccgaggcaggagaatcacttgaacccaggaggcagacggtgcagtgagctgagatcgcgccactgcactccagcctgggcaacagagtgagactccatttcaaaaataaaaataaatataaaactacaactatatggccaattttaaaatccagtgactatgtactatttatcataatcactagtaaccacaatgcaattaaacccaaggtgctgtctacagaaggccagcagcttcaaattagctctcttagaagctgatcagtctttcttctcagagttaacatatatctctcagctctctaagacaattaaaaagacgcaaactagcaccttctccagtcactgcatggactccaccccatggacaagaaacacctgaagagctacctgtttttactctcctaataacttacacccccatatgaccagaataaacttttaaaaagcagttaactgacaaatggaaagaaatcaggactacgaaaatactccaccaccaccacatgcatgtgcacagggaattgtttacttgatacacgcagtaccccaaatcaacagtcaaaagtgcccacagttaactaaaaatatcttagcctgacctaaatatcttggttttgaagcagtaaagtgtaggccttgctctagaagttggtcccttaaaaaaaaatccaaacaaagccatgattaggccaaccagggaccctcgtacattcatctatctccctcaattgaaggcaggaccatccagttaacaaggggagagtgctgtgtaagctaatgaaccgaaattttttggcaaatgaacagtttctcccaaactattcaccatcaacaaggtttaaaagaagaaacaatggaataagctagaagtcctgaattttagctgactctggaggccaactgcttgggagtaaatggagaataccttaacagagcagacagttctggtctgctcctgactagataggtaaccttgggaaatttacttaagtctctgggactcagtttgctcatctgcaaatggggttggacaaccagtcctgaaagattcctcttagatctaaaactcaagaactacacagtattcctactctcttcttccctccaacacagatttttatgagaacagagaggataaatctagcactagactttaactcaaaccaaggtgcaccttatatatttaatgtccccaagagccatcagtgctccacaaaagtagatggaaccaattaagacaagttatccagagatccttcaataagtcattctttacaattaaaaactagtttttcagtccaatgtcacttgtgccaaatgctcaaaacagtatctccgccaatctagccacatctaaggtgacaatcatccgcatggtacacattacacatctgggtgatactaagtggttgaaaaattctctccacatacaacattttaaattatggaagttttttggtttttcaatttttctccttcagaaaggcagagtgaaatatctacttacacacctgcaagaaacgtttaagactttcttcaagacagaaccaaacaagtcaacaacagaggtaaaaatttaaaatcagaactattaaaaaacacaagtggaaccaactttgaggtaaaaaggattccaattttccaccgtaaactactaaacaaggtttgtgaacaaatcaacttggatgcgaatagcgctattcaatgaagacgacccgtaactgtagatccaatcagtaactaaggtacagatgtttagatcattcctaatcaatacagcgacttcgactaagcaacattgcatctattttcatgcaacatcgcttaaatcatttacagttttgtgtgttgttttttttttccaaatggaaaataccccttttccactcaatacagaccccaaagctttcagacgagttcgggcgcgttcgaggtggtatggccgtagatcatacccctaagcgttcaatacaatcttttacttacttacacagtctccaacaagtctgcattaaaagaaaacctacccaaagtgtaactggactttaatcaatataaaacagtgattgtcgtttctcgttaaacgtaaaaagcaaaatggagttgtaaagagtttctttcccatttcaactccgacagccacgcgcgctttcagcggccggctacactgcgcggtcgcggggcccggcccaaagcccccgccctgcccggcgccgctgggagaggaagctccggggaccgagggcgggcaggcgggcagcctgggctccaccaggcccggccgggcgggggaaggggcacaggagactaccgggcgcgcttccggggactgcgcgggcggggtcgccgcttggggcgcggggcccgggctgggagtcaggtcaagggtcaggggccaggggcggctcggccacgagcagccggtggggcgcggccgcggcggtgcggcggcctgccggccggaagagtaccgggctggcgggcctggggccccgcggcgcctggagggaacccttccgctcacctcaggcaacgaatccgagtccagcctcttcgcgccggggacgccggtccgcgagtcgcaaactcggagacgaaggcgggtagctgaagaccagaccgtggactaacgagagaaccgacggaggaccgcgggcggcgggagggtagcgcgagagagcgagggcgggcggcggcgggagggcggggaacgacgtgcgcgcctccgagtgcccagcgggctcgagccggcacaggtcgcggccccgcgcacgcgcgcgcactcacagctcatccactattgctcaggagcccgtccacgccctaaaagcaaaacccttaaccaatcattgcagccgcgtggggcatcacgggaactccggggctataaaagacctggttgctattttatactcccggagtcactcatcccttaagcaagcagggtggggttaggtgcgcgtgcgcggttttaatactcctccccgaactgccaactcttcacgcacgcgaagtaggccccaccctggctgggtttacgcgtgcgcactaacgggcctggtcccggaagaccacacgcgtgcgtggtggggactacggtgacagtaccccgggtggggcgagggccagtcatggcggagtcctggtctgggcaggccttgcaggctctgccggccacggtgctgggcgcgctgggcagcgagttcttgcgggagtgggaggcgcaggacatgcgcgtgaccctcttcaagctgctgctgctgtggttggtgttaagtctcctgggcatccagctggcgtgggggttctacgggaatacagtgaccgggttgtatcaccgtccaggtgaggcttcctacgaacctccgtgggctggccgcccccgcccccaccctctcccgactgtaccattgggttccccactatcctgcaagaggctcatcagaacttaacattggttcacggccttactaccctgaacgcatctgacctcggaagctaagccaggtacttggatgggagaacttaacgttgtgccctgactcatgccaccataccattttacgccagaatccccaccagtccacccatcacattgtatctgttcctcagaactctcacctggcaataccattagtcccttaggaccctcaccagacttcaccaaacaataccagtggtctctaacctgacctgggctgatgcctgctcagattcccaycccagccttctgcagctctggatgtgtttctgcctccaggtctgggtggtcagaatggatccacgcctgatggctccacgcatttcccttcgtggtgagtaaatctgtccataccgcaaccccatgcttggcattccaaggacactcctgtgctggtgacagagaggggagttctcaggctttaagcccaccagcttaatggcctttgcagcaagcttcaagtctgcacgtagagctcaggcttcaagttagggtgacaccaaggtctggacagtccatcatcatgctgttcagcagcctgtaggataggtggtggtattgtcataatttcagagagatgaaatgacaggtttgttggattccactcygcacaatcccctcagttgggaaggcagtaatctctgtcctgagcacattgacctcatcagggtcagcctcctcttctgcaaaacatgcgctcactaatcagggcattcattcagataatctctgggcccctatcacgtgataggggccacacgaggcccagagaacaaagacaacccgggccctgctcatggggagccagggatttattaggggagggcggcagtgcatggggcaagggtggtcagggaaggcttctcccaagaaagacacctaagccgagatcaaatgccacagggtgacaaagtgtaccaagcaaagggaatggattgagcaaggctaagagggaagaatacgggtgacatattagaataggtaagactgtgatgctggagcttgaacgtgagagcttgttggaccctgggagccattgaaagactaactcagcaaggctgtggtctgatctaatttgcctttataaatgcctacttcatggcaagtagataaaggggtccaagagttagggctagaggttagaaaggctgccactgcccaggtttctgtcttagagaagaggccaggccccatggctcatgcctgtaatcccagcactttgggaggctgagatgggcggatcacttgaggtcaggagtttgagactagcctggccaacatagggaaaccccgtctttactaaaaatagaaaaaattagctgggcatggtggcatacgcctgtaatcccagctactcgggaggctgaggcatgagaatcacttgaacccaggaggcagaggttgcagtgagcccagatcacgccactgcactccagactgggcatcagagtgagactctgtctcaaaaaaaataacaggccgggcatggtggctcacgcctgttcctagcactttgggagactgaggagggtagatcacctgaggccaggagtttgagaccagcctggccaacatggcgaaaccccgtcttcactaaaaatacaaaaattagctgggtgtggtggcgggcgcctgtaatcccagctacttgggaggctgaggcaggaaaattgcttgaacccgggaggtggaggctgcagtgagctgagatcttgccattgcaccccaacctgggcaacaagagtgaaactccgtctcaaaaaaagaaaagtaataacaatagtaataaataaaaagaataaaaaaactagagaaggatggcaatgccgtactaacatggagaaccaggaagaagaatgagtctgcagggagaaggtgctgggcccagggtgggctgtgggagaccagcagagaggtctagattgttatgtgaccttactgagcctagctcagcccccaagaaggagcttgggagagccaatttcagcaactgttctgcccatggaataaccactctctcttctctctctccatcactttcagggaaatggcagcaaacgaacctctcaaaacccacagagaataagggaaggcagcagagggtctccaagggcatcactgggtctgctggcttctacactgggttctgctactccccagacctcagggacaactgccgggggttcagggttggtagcagggagtacccagtgcctacagggctgggcctcttctgcctcttaagcctgctccctcacccaggcactgggcaagtgaagagtttgcctgtactcttatctgggtgccttaaggagagagattgtgttcttcctctctcaggggtgataactcaggaagcctctgggttgggaagaccatcagttcttttgtcttaggtttcttttcctgtccctcttccatccccaagatgtgaccccataaaaatttttcctgagttggccaggcatggtggctcacgcctgtaatcccaacactttgggaggctgaggcaggcagatcacgaggtcaggagttcgagaccagcctgaccaacatggtgaaaaccccatctctactraaaatacaaaaattagccgggtgtggtggcacacaccagtaatcccagctactcaggaggctgaagcaggagatttgcttgaacctgggaggcagaggttgcagtgagccaagattgcgccgttgtactccagcctgggcaacagagcaagacccatctcaaaaaaaaaatttttttcctgagaggaagcctgaggttgaccagctctggggtttgtaaggcaggtctgttttctcctaggccctgagttttctgaatctctggttttgctttgttggcaaggagccagggaatcctgacctgagccagaccttaagctctatggttatttagctggccattcaggtataaggcagggtggtgtacctgctggcactatccagatggaggcaccaaacacccacatacctggcccaaccagacttctcccgtgagccaggcaaaggaaattgtcatctgccaactgtcctactcatattcctctcagtccttcttgggggtaagctgattacctgaaggacagctgaacccctggggtagcctcctatccaccactgcttaagtgcctatgggaatgtgggtctgcaccttgtcccctcataggatggtaccaagcatttagtgcacagtggccccatcatagcctgcagcctcatcatttcccatctgracctggtacaaatgcacgtcacaggctcagctcctccccactagcatyttctctaccttcaagaaccaggcagccctgccatgtcacaataggccaggggagtttccaaagatgtgggtggcaaatgcccctatagaaacaccagtacctgaaagcactgtagccctggacctgcctccttccctcggggccatacttctgtttccatctgctgggccaccagccactttagtgacccctgcctacttccttcctgttggatatcatacttccatctggctgcctttgcttaagccatctttgtggtagaggggccctggaattgcagctgtactgaggatgatgttattcacagcccctggcccacccactaataytactgcacagagtcaggatctcacatttcaccccaggctcaactgaggatgtggcttattaaacacggaagtgcatcggttgttgtggttattcagacagaacaagggtgtgcatgcacaggggcagtgagagagggaacatcctggaagctgttgccccttgggacccagatgcaataacttgcagggaggggagaggtgatgcagctccctggaggagcagggatggggtgcccaacaggggcaatatctccatttttatagactggcccctttcaaggagaacctattccaagcttgtcttggaggccaggaaggcaggcattgggttggcatttcaggaaccctgtgaacagagaacaatgaagctagagactggcaagtaagaaggaagtttaatttttttttcaggattcagtggagtccattaatgcataccaggggcaaagatcagcccagggtaaggcaagtctgggaggaagcccaccctgccctacagcagccctggaactcagaataggtggtgagtctgccatggtttgctactgggcagcacactagaccaacttgggaatgtggaagagtgagtctatgttccctcagccatccccaagtttacacacaggcatagcagccctactgtgagtcagcaatcattcctgacttgcagtaaggacaatttgcatttacggaaagcaaactggagggggtagcctaagtccgcactgcccatgttattaccctttgcaatgtgaaaaaccatggtgaggtaggttgggcaggttttatcctctccacaaaggtgagcctttgctccacagccagcacctggcagagtgggagagatggcagaaccaaagcttctcattaccctccagcaggcaagagtaggtcagtgggatcatggactgaaacaagacattgtgtgagctggtccgtcactcagaagcagggtcctgaaggaagctggaatggcatgagttaggtggggggaataggtggtgtggcccctcaaccagacaattagaatcagcctccaccttaactgcccacccccagtgagttctgcctcagcttcttgactaaccccttgtaggggcaaaactcctggaagggacagccccaccctgagccagcttcacttgagggtatagtagtttgtgggcacaaagggcatcttgctgactacagccatctgctgcttccgccgcacctctaccagcagcattgtccctggacgactgtactcgcagggcacataacccatcgccacattcttcttcagagagggggaggggcagccactagtcacagtacctgtcaagcaagcataagccacgcatcagcaccaccctgccagtgcccccaccctcctgggaagagacaagggtttcccagcttccctggtccacctaccaatcttggtaccctccatgttcaggatgggactgtgtgcccgcatgggggccccctcacacatcaaccccacacgccttcgctgcaccctgcccttcagctggggaacaatgaccttggctccagggaagtccatagcagctcggcggcgcttccctggagaatgacacatgagacataagccacagcccatagaagccctggccacaggaggtccttatgaggtcctcaagtaacacactatctagcatcaaggcccctttgcttgggctactccaggctctattcctcccttcactgccgtcagccaaccaaccacctcctatcccctggaggccatgctgcccacctgccgagcgtcttcagtttcttttttttttttttgagatggagtcactctgtcgcccaggcctagaatgcagtggcacgatctcagctcactgcaaactctgcctcccaggttcaagcaatttacctgcctcagtctcccgagtagctgggataacaggcacccgccaccacgcctggctaatttttatattttcagtagagacggggtctcaccatgttggccaggctattctcgaattcctgacctcatgatccacccaccttggcctcccaaagtgctgggattacaggtgtgagccaccatgcccggcagcatcttcagtttcttttttttttttttttttttttttgagacggggtctcgctctatcgccctggctggaggtgcagtggcgcaatctcggctcactgcaaactccgccgcccaggttcatgccattctcctgcctcagcctcccgagtagctgggactacaggcgcccgccacaatgcccagctaattttttttttgtatttttagtagagacggggtttcaccatgttagccaggatggtcttgatctcctgacctcgtgatccacccgcctcggcctcccaaagtgctgggattacagatgtgagccaccgcatccggccaacatctgcagtttctaatgggcaaaggcacagtggcaccttcagggaagggaggctcaggaaggcttcaggctacataacctttggatgagtcatgggctggctagtcttatcaagggtcaccctgacctccaggaccctatcctttagtgctggcccagctcacccagtgtccaactgaggctgccctccacaggtgtagtgtgttcatcaatgtcattcccatacaggcagaggcctgcctccaggcgcaggctgtccctggctgccagccctgccagcttcacctctgggtttttcagaatagctgttgccaggtgaactgcccccgctaccggcaccgagatctgtatgaaacaccagagggcagatgggaagctccctgtaccacatacccccaacccctcacatgcatcctgtgccctgtactgcccccacaccacttcttgacacacctccacaccatcctctcctgtgtagccacagcgggtcacgcggcagccagacacgccaaacacctccatcacagcactggtcatgaagggcagtttcctcaggtcatctgccacgccggcctgtagtacctgggctgcagtggggcctgggcccagggagccagtgaccaagtatccaggtcccagcatccctcaaagctggactaaagccttattcagggaccagaacaagccctgagcatgtcttactctgcaagtgggagaagatgcccttgtccctagcccatggagccttgtggtaggtaggaggagggcaagatacaaaacttaaaattatggcacacaaatatcacaccttccacacattcttcttggtatggcctctgtgctaagcagtcaatgaagccaggaaggcaaaggttggctccaaccccagcccagccctctcaccttgcagagctagcagggcattatccaacacctccaggcccacatctctgccctggttctgaagctccctgaccttgtcctaaaagacagaaacacaagagcatctggggccacttactgagcagctaccatgggctggacgctgcagagctggacagtagtaggacagtggagaggaggaggaggagggaggaaaaaaaaaggtagtaggctggttcccatcttacaaggtcacatagctactaagtgatagagatgacccaagcccagttctgccacctcacaccagaggggccaagaccccctccccatgcctggtaatcccccaccaccaaaccctggcgtgctccagagagggcctgctcttgagtctcatagctgttcattcactgaaagagccattttccaggtcccttgtctgtgccaaccctgtcttggacaacaaggatactgctctatgaacaaggaagacaaggtgtctagaacacagagggggtatacctgcatgagggccaaatctttctcccagcagccagcgttggacaccacatacaggtggccctcagaagtattggttacaatcaagtcatctaagatgcctccagcctcgttggtaaacagcgacagtgtcccctaggaccaaagtggagcgttttggcttccaggtccaggagggcaaggccaagggtgagccagacacaaccctggacccacttagttaccaaaaggttatgaaccctaatgtgaaggactcagggtgtgcaaggtacaagtctgggcccaagtccaaggtctttgatcctcatgcatcaagtaagttttcatcccctccctaccttggggtgcttccctgatctggtgcaacctctgcacccctccccactctgtactgagagtcccatctgacacttaatctatgacacctaggacctgctgcttcacctacccaaacctgggacgacttagcccatgtggcaacccacaggacaaaagcttcaaaggtcatcttgatgatcgcaggctctcctaagtactccatagcaatgcccccaaaaaacttccttagcctccccactggatggacaaaaagcctgaggttgagggggtcacatgaatcacctggggatcttgttaaaatgaaggttctgattcagcaggtctgcagcagtgcctgagactatattcctaacaagctccaaagatgctggtttagagaccacactttgttgttgttatttttctttttagactgagtctcactctgttgcccaggccagagtgcagtggtgcaacctcagcttgctgcaacctcagcctcccgagtagctgggactacaagcacgcgccaccacgcccggctaatttttgtgtttttagtagaaacgaggttttgccatgttggccaggctggtctcgaactcctgacctcaggtgatccacccgccttggcctccccaagtgccaggattacaggtgtttgagtcacgtcgcctggccagggaccacatgttgaatagagaggggttaagcagaagggatggccagagagcagcatattaaccttggtttctggcctcctagcctgatgtagtaagactgggatattcccctccctacaaatgtctgtgtctctggaaatgactcagggattctgtccaagactgcaagccctgagaagctgtgtttgactcatctctgtgcccctaagcctgaggtagggactcagcccatttgctggctcatgactaagaaaactcatagagcagaaataaaagggcccacctggtttggtcttagctctgcaatgtctccaaccactagactctccatcagcttcacccggtcactaccaagtatcttggtctggggaagagattgaaagcctcaggccattgcaacagctacaatccaaaaggctactaagcaaggatgcatcctccctgccatccacagtgcagtccagcccacccaaagtgactaaccagtcttttggttctacacgtggcaaaggaccaccttctgatttcctgacctcccccagtcactctgtgtggggggactgccagggaactggacaggacctagcaccttcctgaaataaccccttttgaaaccaacatccagcccaatacatgagagtgggtgtcagccctggaaaacccgggacattaaggcacaccatttaatgggggcaagctagaaggatgagatgatgagaccctctgagctcattcccttggggccattgacctatccatgacacccccatgacctctagctcttctgagaaggctgtccttggaatccagttcacagcaaacaaagccaaggagtggaccactgtaaacagggaggaaggcctgatcagatggccagtgtgctcccctggctcacctgcagcatatgagacacgtcaaagagcgagcagtgctggcgtgtgtgcaggtgcgagtcagtgtgactgtcccggtactgcactggcagactccaacccgcaaacgccaccattttcccgccgtgggccaggtggaagtcatagagcggtgtcctgcggagcacctcctgtgggcggctgggcttagtgccaccagggccctagcccccagccgcttccctcccccaccctccaagatcagcaccctctatcccacctgtgcgcaactaagtggacgacacaaggccggggggaatgcctgcaggcgaaagcccagacgggccaccacacttacagccctctgcatcgtcgcctgcaacgagtgcagacggc

SEQ ID NO: 97153 - DNA, 13975 bp, Homo sapiens
gtggtggtgcatgcctgtaatcccctctacttgggaggctgaggcagaattgtttgaacctggaggcagaggttgtagtcagctgagattgtgccagcctgggcgacagagcaagactccgtctcaaaacaaaaaaagtcatccttcaaatgctgcctgtctttttctttttttgacagggtcttaccctgtcacccaggctggagtacagtggcactatctcggcccagtgcaacctccacctcccgggttcaagtgattcttctgcctcagcctctcaagtagaggggattatcaggtgtgctccaccacacccggctaatttttgtgtttttagtagagatggggtttcgccatgttggccaagctggtctcgaactcctgacctcaagtgatctgcctgccttggcatcccaaagtgctgggattacaggcatgagccactgtgcccagcctggaggatgaattttgacagggaagcctggatgtatacctgcaggtctgtaagggctattacctcacaactgttaaaaattttatttccagagggtagtacaatttaattttgtattatttaaaataattattaatttgttgtttctcttgacacagttgcaagaatgtagtaactctgatcagctacaaggaaaggaggaaagagtaaatgaagaaagtcatctaactgaaaaggaatatatagaacattgtaacacccctacaactgattctgattcatctatagcagttaaagcactacaaatagatagctttggtttagttacatgctttcaacaagagtctcttgatgtttctcaaatgatacttggaaaatctcagcaacctgagtcaaaaatgcaatctgaatttataaaagaaaaaagtgctacttgttcaaatgaggaaaaagataacttaaacgagtcagtaataactgaagagaaagaaacagatggagatcacctatcttcattactgaacaaaactacggttcacaatatacctggattcgacagcataaaagaaaccaatatgcaggatggtagtgtgcaggtcattaaagatcatgtgaccaattgtgcattcagttttcagaattctttgctatatgatttggattaattctatataattttggacttttaaatattaaggttaaaaaatacctgtatctaaaattgattctgttaactgttgtcttaaaactaaaggtattaaagtataaaattaaaatttgcaattttttttaaaaaattgcaattttgattctcatgggggaaattggagataatttttttttttttgcctctggagtttaaagtttccttatggagataagttttgtgattcctgtaatagatgtgtatgttttctatttgagagttaaaacatttgagagttaaaacatttagttttaatacaacctatgtatatatacttctgtgttaatttttgctttgtcattaataaaatttaaaaatattcactaattgtgtttgtcacacaaagtaattctcaagaatgcatttaactggaattataagtacatgtgtggggggtagaatttcaaaactgtttctcagtctcactaagtaggacatatttaagcttgaaatagagcttagaggggaaagaactttactaaccaatattaatctaaacaattacgatacaaattcaccagataaaatgtagtatttttcatcagctctatattttgtcacacaaactatatatatttttgttacataaagtatatataatagatttagttatttagtaatgattttcaaaattcaattttgaagtatttcttagaagttattgaaatattaaaacatcttgtggttttatagaaatttaagagtaaaactggaatttttaaaatctggcaatttgctctgataggaaaattgccttcattacattattacacagaaaaacaaaaaaaagccagtgtttcctaatcactttctttttttttaagagatgggtcttgctatgttgtccagactggattcaaactcttaggctcaagtgatcctctcatctcagcctcctgcataatcaatttcctttataacacctaaaatgtgaggcaaagagaagatcctaacaggtttttttcttacaaaaaattttagggcagccaaagaaaatgaaaggaaggaaatacagaaagggaaatatttgttgatttaatcactaaccccaaagccaggagctgatctatttgtttcaaaaacagctactacttcacactctggccttcttagctcagtcctggaaataacctaattttttagttctttgaactagtgatgtcaggtcagagtaccagaaataggtacaaagcctcctgattcacccttatttataacccccaggcaaaatcttgcaccagactgggccgtgggtaagtctaaaggtagctcgtaaagcaagagaactatttgcctcaccttagataagcatatgtgctcttaaactactatgaatcttaaattgatgcaataattttgagactgccatttaatagttacaagtttaagtaacgtttttttttttttctttagatggagccttgctctgttgctcaggctggcgtgcagtggcacgctctaggctcactgcaacctctgcctcgagactcaaaggatcctcccacctcagcctctcaagtagctgggactacagatgcaccactacacccggctaattttttgtatttttagtagagatgggttttcgccatgttgcccaggctggtctcaaactcctgagttcaagcaatctgcctgcctcaacctcccagagtgctgggattacagacatgagccaccacacccagcccgtaatatctttacacagaaattagtcttttatgagaaattctcggttgaatgcaattacaaattaagggaaacttctataaacgtctacattaaatatggagcaaaatttaagcctgtttcctataattttctgtatctgtccttttaaaacgtatgatttaagttaaagctggcactagaaagtatttcactttggcatgactgaactttgtatcatttctggctttcaaaaacaatttaggctgtatttcccttacacagcaactttttatcattcattttcaatgcctgggtaatttgaaagccaaacagtttcttgcacagggaatgcattgtcataagctgggttttatttcaaactcaattatacaatgtagcaatagtaaatattaaaatgtaatgctaactcaaaacttgtagaatgccttcactgaattttggtataaagagtaaacaaaacttattctgcaaaaggattaggaacctttttatgcaaaaatgagtattttattttgtcagcactaaaagaaaaaaaaaaacaaaaccactgtatttctacattgaggtgaaaacaatgtttaaactttcttatcaatcaaatacattccaaaagaaagtgtgttctatgaaggttccaaaacacactcaaaacacaatagtacaggaatctaatactgaaaatgactgttctgacagggtgtttaacaaacataacttttaaattattaaaccagtgaagcaatcccttcctaataagtgtgtcaagagagtgaaactgggtttgttccattaataccctaacaatttcatcgtaatactttttactgctatgacagttttaaataaattttgctgtacttaaaataggttttgaaagtggaaaagtgtacaaagtttcagataaaaagattaataaatgcaatttaaataaaatttcccctcttctctcatatcaacaataatcaattttagcagataacagattgagctttaaaaccctactcccaaaatgaaaccttcagttttaaatcttaatcagacataactggaaaagattactatgtatttggacaccttttacaagattttgtttttgtattaaagcagaaaccagttcctaaactcttttattcaattgtatgtcctgtttggacaaatatcaaaaatagaagactgtcgcttttgtaactgtgattttcactgcagtcttctataacttttacagagttcatggtccctaatatctccccaccctccattttttctaggtggggaaatggctaccacagtaaacttttcactgatagttagagtttctggaaacatgtattgtttgttattatttaagagtgactcaatttgggcactctgagtggatggtctacaggttttcttgtgatgcataccacagtctccagcatgaaagatcctaggaatttgaggaaccagcactttccagaattttggaagacaagatacagtcaagtattgaagagtccagtcccagttataatcatcataagtacagaaagtgtctgtgcactcgatcagcttctgataggcattccgggtcaaggctagacccatattgtgctctgtggatttccaagttttcacatctaccttgtcagccatgccatagaaactgcgactggcactataggtccccagggagagaacatcacattcagggcactcttgctgcttcagtttccacatctttttgaagacatggtaaaagtctggggctaagtagtgatcctcttctaggaaaagtataaggccagcataatctcgaagaattttcactctttcccacacaaaatgcagcttccaccaccagtgatgtttggtctgggagaatttggcctctctataatggccgaaggagtcgggatactcagcattgatgcaccccaatttcaaagcggcattcttcggcaggtctctgggacaatctctagggtcactacctggaaactcgttagggtacaactgaatgctgaaaggaaagaacacctgcagaaccggacagaaattcaccccggcgatcagctgattgatctcggtcgaccagaagtcatggctaaagatgacgaggacgttgtcaattccctgggcttttcgaagtgagtccagcagcagtctgaggtattcgggccggttatgcacctggaccaccagcaccagctcccggggggcccaggtgccagccttatctacattcctcagggtctgatcaaagttcagctggtacaccagggaccggtaccgcagcgtcaggttgtccgcctcgggctgggggaccgccgggaccagggaagccgccgacacgttggagaccctgcggatgcccacagccacagaggggtggtccccaccgcggccgccggcaccccgcgcgggttcggcgtccagcaacggtggggcgagggcctcgttcttcctttgtcgcccattgctgctccagaggacgaagccgcaggcggccaccacgagcgtcaggattagcaccttccgtttgtagatgcggaacctcatggtctccagggccgggagcgcaggcgggcgggcgcggaaaggagcagctgcttctgcacggaaggggcgggcgggcggcggccgtcgccttggcctgtcacggtcggaactggcccccgcggctgccctcgctaactcatcccgggccccgggggtcctggggcccgagacctctcatttaccccgcgccgcctgcgctccacacatcctcgcctggcagctacagctcgagcatcggcgccgccgctaggagccgcggctcggcttcgtctccgtcctctccattcagcaccacgggtcccggaaaaagctcagccgcggtcccaaccgcaccctagcttcgttacctgcgcctccagcggccctgcgtcctctgcgctctcatccttacaggggccctagacggccagaactgagcgacgcggcctcgcctcactccggcggggaccgttatgacaacccgcaactgccccgcggcacaccgcggccctccggcccacacccctccggcccgccccttagaccgttggttggtgctttccagacgcgaccgaaggcgcctgaccgccgtggccggctgcctattggtttgcagtactgtcgctcaggtgcagttcccacttccgcctstttcttccctttcctgttaggcgagagctgcgaaaggcgagagctgcgaagggccaggtgtcgggcgctgtttctcggtaagctaagaacgaggctgtagcggctccaataggagcctcccttgctcagaatcctgggtaggactaggccttcttaggaaagggaaggcgagacctatggccctcgccggccttagttcgagagcaggcttctcccttcaggaaaaaggtctcaggcatggcggctatagaatcgcggggcgcgccggcttgataaggacacgtcagccctcgaggctgctgacgggtgactgtgcttcggaggggaaaagtgatactacgctgatgtggttctcgtagaaggaacggggcgggtcgtaaccgtagctacaacgtcgcgcgctgccccagccattctctagagctggaaaatggaggaggtgggtggggggaagggggtcaaagaaactctggtccttaacttccttttcggaagaaaattagatgaaccgcacttttcttttggagcagtcacaataaattaaactcatttcgtacggaaaacggactgtattgggcctcctaaagctgctgctgtcggttttcgtgagtcttgttctatatgagaaaagaagaatggctcggagcattgttaattatttgagatgtgcaaaatttgccgggcccagagagacagcagtatgggacttcagacacytccccacttaatgcctggcattttattcctgactagctgcttcacccattatgtccgcgttcctggaatttgtcatraaaagaatgatgtatagccaatcaatcgcttgtgttattttaatgtaaattcttggtagacaatttaggaactgccattttttcctctaaaaacccacttgcaactgctgctactcagggcattttgaatctgtgctctgggttgcaatcctcaaacttgccccaaataaacattctacttatatgaattgtgcctcagttcttttttttttttgagacgtaattccgctgttgttgcccaggctggagtgcaatggtgcgatctcggctcacggcaacctccgccyctccccaccccgcccaagcgattctccttacaggtatgcaccaccaccacgccaggctaattttgtatttttagtagagacggggtttctccatgttggtcaggctggtctcgaactccggacctcaggtgatccgcccttctcggcctcccaaagtgctgggattacaagcatgagccaccgtgctcggccttgcctcagttctttaggtcgacaaattagtcctccagtaatttaaacgaagtgtttcaaaaaggtatgtacttgtatgtgcgtttattcatatggaaaaagagtacgtggtggatttatatattactcatttatgtgtacggttttcctgtatatacttgtatagcactttcacttttcggaatgtttaacgtctgctatcttattttaaatattttactacagttttcatcatatagacaaaacagccctgctgcaaagatggtcaacgtacctaaaacccgaagaaccttctgtaagaagtgtggcaarcatcagcctcacaaagtgacacagtataagaagggcaaggattctttktatgcccagggaaggaggcgctatgatcggaagcagagtggctatggtgggcagacaaagccaattttccggaagaaggctaagaccacaaagaagattgtgctaaggctggaatgtgttgagcctaactgcagatccaagaggatgctggcyattaagagatgcaagcattttgaactgggaggagataagaagagaaagggccaagtgatccagttctaaactttgggatatttttcttcaattttgaagagaaaatggtgaagccatagaaaagttacccgagggaaaataaatacagtgatattcttamgcaaactttttgtggtttttacttataaatagaattccatgtttagtgtagtcccacctcaaactttactaacaagtttatatatgtatgaagggaaaatactactttactactttttgttttctggtcaatttcaaatgttgaatgaattcataaacattgagcagcttagaaggatctttaagattttgcaagagaaggaacaagataacgctaggcttgtgtatagcaggctgggttgggcaaaggatggaagttgggggatagtaagagctgaccaaatattctgtctagtaggggccgctagccaggtaatgtgtttcctgttacactagtcagatttagtactcaacagccacgtgtggctagtttattggacaacacagatgtaaaacatttccaccgcagaaagttcttttggacagtactgttagagactgtggccttgaatataaaaggatagttcaaaattgacttcacactaaagttctcaatctagtgaaagtccaagatagcataaactgttttttgaacctcttagaacactctgggaggtactcaaaaaaaattttttttttgagacaatctgtcactgtaacccgcactggagtgcagtggcacattcatggcttactgtggcctctcaggctctgtagctctgtaggtcctgccttagccttggagtagttgggtaccaccatgcctggcgaatttgcctggctaattttatttctttttttttttttttaaagatggggtctcactcctgggctcaagcaattcttgagcctaggctggtctcaactcctgggctcaagcaattctcccatctcagcctcccaaagggttgggattacagtgtgctactgtgcttggccagaacttgacagttaggaaggtttaggagttatgactgaaaacaagaaggttgaaattcacaatgaaaaaagttgagccttgtaattatgaaaggcaagaaaagttcagtatcaagtgaaaaactgggaaaaggtaggggttataagaggtcaaattctgccttttgtatatgaatttaagttgactaagatacatgggaatgacagtagttagaggaatgcaaagggctagggtgtgtaggagtaacagatggtttgcacataatcccaataactgactattatagctgcatttgattgtaaaaaaaaatgtaaaaatcatgtatacgagtttatttttaaatacatcaccatcactttttcctttttttggagacgggtctcgctctgttgcccaggctggagtgcagtggcatactcacagctcactgcagctttggcctcctaggctcaagctatcctctcacctcagccttcctagtagctgtagctaggactacaggcatgcagcactatgcttggctaatttttgtattttttatagagacggagttttgccttgttcctcaggctggtctcaaattcctgggctcaaaggttatctacccatttcagcctaaagtgttgggattacaggcatgagccacctcacctggcctaccatcactttttaaagaatgttttaattcagctattttgtaatatttatggacaatccctcaccaacctacaagtttagaaaatcctaaaatacttagggaattcttggttttaaagaccaaaagtaaattaactagaatacagtagcctgggcttaaaatctgatttgggttcatggtacttctctcgtagggtgatttttaaagattaaatgctgcttataaaacacctggaacggctgagtgcagtgggtcatgcctgtaatcccagcagtttgtgaggccgaggtgggcggatcacttgaggtcaggagttcaaaatcagcctgaccaacatggtgaaacactgtctctactatacaaaaattagatggccaggcgtggtggctcattgcctgtaatctcagcactttggaaggccgaggagggcggatcatgaggtcaggagttttgagaccggcctggtcaacatagtgaaaccctgtctctactaaaaatacaaaaattagccgggtgtggtgacacatgcctataatcccagctactcgggaggctgacgcaggagaatcacttgaatttgggaggcagagcggaggttgcagtgagccaagaccacgccattgcacaccagcctgggtgacagagcaagactccatctcaaaaaacaaaaaaaactgcatctactcaggagtatctgaactttcaaaaaagaaaaaaaaaatgccccaaataaacattttaggaagacaaacgcggtaaggtaattattttgtaagaaataatcttacagagaccctgctaacaagcccaaaacagcaattacattaacactggagagggcttttctccagtaacttttattctttcctttgttcacaaaaacgaggctgggattattgcaatgttctggtggagaggctgacttgaggtaggtcggtgggaatgaacagaatgaaaaagttaatactggttctattttccatgagtctttcaagttggttatttttccattccttatgccctagttcacgtcatctttttttgagacggtctccatctgtcacccaggattgagtgcagtggcatgatcttggctcactgtaatctcccatgctcaagtgatcctcccacttcagcctccagagtagccaggactacaggcgtacaccacaatgctcagttaagttttgcattttttgtagagataggattttgtcttcgtgcccaggctggtcttgaattcctgggcttgagcaatatgcccgcctcgacctcctgaagtgctgggattacaggcatgagccactgcactgggcccaaatcaccatttagctggtgtattgccactacttttaaaatcaaaaacattaaacattttgtcatttaatatgacaaaataataaacatttttgtcatattatgtgacaaaaataatttaaaaacccaccctaataatacaaaatgtaatcagcaaaaagtagcaatttttggccgggcatggtggctcactcctgtaatcccagcactttgggaggccaaggtgggcgtataatgaagtcaggagttcgagaccagcctggccatcatagtgaaaccctgtctctactaaaaatacataaaaattagccgggtgtggtggcacacacctatagtcccagctacttgggaggctgaggcaggagaatcgcttgaacctgggaggtggaggttgcagtgagccaagaccatgccgttgcactccagtctgggtgacagagtaagactctgtctaaaaaaaaaaaaaaaaaaagtagcaattttctgttccctttcccatcccacccaatcccaaggcacggtgactcaagcctgtaatcccagcactctgggatgcccagatgggtagatcatttgaggtcaggagttcaagaccagcctggccaacatggtgaaacaccgtgaaaaatacaaaaagttagctgaaaaatacaaaaaatacaaaaaattagctgggtatggtggcgtgcgcctgcaaccccagctactcaggaggctgaggtggaggttgcagtgagccgagattgcgccactacactccagcctgggagacagagactccatcttagaaaaacaaaaacaaaaaaagaaaccacaacaactactatgggaacatttttaaaaattataaaagctaaagtctttcctgaaacaattcctactttttgcttggtaaatgtaaattccacatgtagaataatgtatctgaaaaacacaaaaagtggtatgcttaaaaacttacatataatttcataataaacaagttttcactataatttaggacatattagtcctccaagagatattttctgcatacagaaactcagatgtgtttaactgggatcaatatctgtttaacattaaaagatatctccacaacccatgttggaaactttagggtgaaataaacacaagtgtaataaattaaaaaaaagttaacaccacagtaaaactaaaattggttttaataaaagttttggagtcatctaaatgagtaactatacacattcctcctctccagcaagtatacagaaatcttcccttactccaatttgacgctgcaaaatcatacatgcaccccaaactgatctgttattgaaatttctttttctggtctcacccattactttaacatatcagaggaattaacataacagcctagagaacagaaataagagataataggtgcttcagtaccacccaaattatctactaagaccacagtgtgggcaacagaatgcagattcatggtagtagttccttgaatgaaagagttcagacagaatcttccacaaacacaaatttttgcggtatccaaatcttggcagagatggaatggaatgatatgagagccatatggaatcctattggaaagaatgataaaaatattttataacatgttactagattcaggacatgaattattaggacatggaattttaacaatgaaaagtaaaattattaagcgattagtatatttaaaatatactaaaaaacaatatatgacatattgtaaacttcagataccacaccataaaatatcttccagcacaaccacttaatagcataactccctaaatggaatgaaaaagtcacctgtcctttaaataggctcttccagggatcaattgttcaaaagggaaacttaaactctctaagacaaatttaaaatacatgtcacttgggacatgagttttactttagtggctgggcaagtaaggctaaccttaccttgcttaaggcatttcactctcacacttaaaacccttcagtggtgcccaagtcaaacttttgatttttactttttgagacagagtctcgctttgacacccaggctagagtgcagtggtgcgcgctctcactgcaatctctgcctcctgggttcaagcaattcttctgcctcagcctcccaagtagctgggattacaggcgcctaccaccacgcccagataatttttttttgcattgtatttttagtagagacgaggtttcaccatgttggccaggctggtctcgaactcctgacgtcatgtgatctgcctgcctcagcctccaaaagtgctaggattaaaggtgtgagccaccgcacctggcctaaactttttttttttttttgagatggagtctcactctgttgcccagactggagtgcagtggtgcaatctcagctcattgcaacctccacctccagggttcaagctattctcctgcctcagcctcccgagtagctgggattacaggcacacgccaacattcccggctaatttttttttttttttttgagatggagtctcgctctgtctcccaggctggagcgcagtggcacaatctcggctcactgcaagctccgcctcccgggttcatgccattctcctgcctcagcctcccgagtagctgggactataggtgcccgccaccacgcctggctaattttttgtatttttagtagaggcagggtttcaccatgttagccaggatggtctcgatctcctgaccttgtgatctgtccgccttggcctcccaaagtgctgggattacaggcttgagccaccacgcctggcctggctaattttcgcatttttagtagagacgggggttaaccatgttggccaggctggtcttgaactcctgacctcaagtgatccgcccacctcggcctcccaaagtgctgagattacaggcaagagccactgcgctgggccttgaggtcaagtttttaaatcatctacaagacactaaaacacagtcttgagattgcctgcccactgcccaaacctccccgctaaacacaaccatgctccagccactttgcctcccacacggtgtcttgttctttgttgtttctctagtctctagcttaggctggcacataataggtgctcagatatttttcaacaaataaacaagcctagtcttacaacttaaaatgagag

SEQ ID NO: 97154 - DNA, 13091 bp, Homo sapiens
tgccctggagctgcagagctaacacctcactctgcggggttgtaaagtggagctgatgctgcttgaccccacaaaagctcacaggccttttaggtgcctgttaatgctggaatgaaaccacaggtagccaagaaggcctgcctgtcagaccgcgaccgcgcagatctcagcagaatgtttaaaaggcgctctctgcagttttggaattgtggcgctgctcttgcttagtattagggctcaagcaggttaacgtcagggttcgttttcttaaatggccggtggccgtggtggtgttggacgtggctaacctggcacagggcagcagagatccaggtgtcaggccagtggaagggttgaagcctctcaccagcatgtctgttttggagggaagtgttggacattgagtgaggcccctctgcactcagcgaccctgccctgtgctcccagacccagttttgggtctgcttggttggcatcagggtcctggccctttctgtgttttgggacctctgtttgcttatcatatttgcatcattgcctttactccctggggggcagaggggggagctcctgaagccatttagccctgccagcctgggtctgcccttgtgcctgtgctgtgttctttctgcctggcagtcctgccctacgcagtctcatggaggcagggctcatgggaggggccttcccttggccccagccatccccccgggaacatcacactctctcacagacacactgtggccattttctgttgaagctactctgtgaaacattctctatacttggttcgggggggagcaaaatccagaatctgctaaacaccaatgctgtcactcagagtttgtgtatctgctgtctgtggagctctggaccaggcttgagggacgcctggggtttccacccacatctggggcaaaccagacccccaagtcactgacatgtcggtttttctactaatcacgttggctttggcaattctgtatataataagaagtattgtgttctcacttgcacttgggcagaacggttcactccaaggctgaatgactgccacggaccattcccccagcagggggtcctggggtttagtggtttgattctgagcacctctacgcacagagccccttagtgggttccctaactggacggctaaccctgctgtggaatctgactttttctggaccgaagaggacaggctgctctggagaaactccttgggccttgtgcctgatgctggctcgggccaccctggccaccctcccttcatgccccatgggaccaggcagcagcatgggagggggcagcttccagaacacccttctgctaggggctgctggcctccctgctggcacggccacatccatggtctgagtgtgtggttggaatgttttatcaacaccagtcctcacagcttccccagatgagcgaaggggaaggggatggtgtgtggggggattgcctcccttgaggccccccagctcccaggatacttgctggcggagctctgcctgcggtggaggccctatgacttgacctccatcttctccctgggcccctcgctggccctcactggcaggggctcctgcacgcctgcaaggccagagcctcccgccaggtgcaggagaagtaaatgcaggccagagataaatcgtatttccctctaactcggatgtggagtgagaggaaggaagcaggagtggagctgagtgttagtgagaggtggctgagaaggcggggtcccgcttcttgcttccttgggcatttgctgtaggtgctgggtttcagcctggaagggtgcagcctctgcactaagtctggtttggtgaacgttcatggcccccaatataaacagtgttctgggcgttctttgtgactctcgagccgaaacactgtggtgatctctcgtatcatctgcttgttatgtaatgtgacaacatggatatgaaatagaaaccagatgtcagggtggagcggctgaattcttccccagcgaggccgccgggagagcaggacttgggtttctcctgagttacggcgccgaacgccctgagaaaaacgcctttggagcagtttccgggattaagcgaaagtctgggctgaaggtaaagcaccaagtcagtacgattaactcttttttaagaaacttgtaagggattttctgtgctgttatgtaactgctcagtgtcttccagcgagccggcggcttgttatcaagaatccgtttagaatgtttgaactcagcctctgggggagctgggagcactgtggcacctccaggggcctgcagcgtgcttccgagggcttgggtgtagaggaaggggaacccgtctttcgcctgtgacagccttgcccttgggtctgggagcaatgaggactcggaacgtgagcctcctgctacaggtacaggccctgggggagtgagggcgctggcggacagcagtcttggcacttcacgttagcagattcggagtttctgcagcggctgaacccctgcactgggctggaagggggggacacccggaggcctgttaaccacactctgcctggactacaccatgaacatagatctttgtgcttttgaaatacaaaaaacgagctcacctggatacgaagtgtggttccggaagcagtatctggctgtggatggaggttatgtattccaccaacgatatcttcattattgttattttcctttggtagctgatctttcagagagatctgcagattcctcactttgctaagaagactctctgaaaacaggaagctaaggaactcctcactcccaagttgattacagcctcatggaagtgtggaattcttattaggaaagcctgttgctgagtaccaagcaggttatcctcttgtcccgtgtcaccagggggccagcttgatgaggaagaaagtgaccctggctccctcgtgtccccaaggcagtggactcccccccgggtctctagctctcttgtccctaagctgatagctcatcgtcaaggagggcttcctgcacgctgaccacccccatctcacagatgaggaagctggggcccagggagggtgagtgatggggtgtaggaagggtgagtgacaaggcccagagagggcttgtgatgggcccggctctcaccgttgggggtgggatgggccatccttggctcctcgcagctcgttgctgtgtggccactcattgctgtgtggccgctcactttgggggggatggggacactttgctggctgttgctgccgggccttgtgttccgttttcaggtggagatcaggaattctgagatagtggcaaaacgtgatgtggctcggggtgcgtggagacgtgtgtgacagtccccaaatccacagtggctgtggggtggcgtttcaggctgggaaaccctctggaaagaaagcacgaaacactccgacatcctcattccattttgcttgttctaaaagagaacttgaagaaaatcatcccagcagcatttgcttagaccaagtgcggtcatgagaacgtcatctgagtgaggagggcttctcttgcatgcgttttcttgagcaggagttgtcgtttggctatttggaaaaccaagtttagggtccctggtgagtctgcgaggtccaggaagcagacactcactttatctaggtgagaggacggagctgcagagatgggccttagtgaccactgggccctcgtatctctggcaggtccctgattagtggtgggaggggggttcccttttgtagccacttggtcttttgacagcttggggtacccatccttcaagcccctctctcctggggcccagtggccgcctctgggcatcacggagagccgctcttgtgttggggcctccggctcctcggctctctgcttctaaacagaacaccctcttgtttctgaaagtagcccatggtcccctgagggtcctgagcacagcccccactcatctgaggatgaccattggggcacggagcctgccccaggccctgggctttgtgcccagggctctcttctccctccctgtcagggtttccagacccctcgtgggcacccaggatggacggcaggcacagagctggagggtgtggcctgagatgggccatccggacgactcgggcctctgggctcaccagagtgctgaatgaaggccggagggcgagagtgggaaggatggcatcacccaccctgccggtggcccctatggtcctgcggctcctgctgcttctgggttaccctgggcccagggtgcaggcgcccttggggaggtgcacacgggaggctcaggccctccttggacattcctgaacgcccccatgcatccctgcagctccttccagaaggttctctcgatcctgtctggctcctcgggggtgtgtgggaaaccaggccagggtctcccggttgttggctggggtggggtcctgccttcgccccttagcattcaccccctaccccttttcaccatgtaaaaccctgtgggccctgggccctggatgctctgcgcccgaggacctgggttctgccatcacctgggcagtgtggggggcatatagggggaacatggggtgcctgatgtagtgcctgtgtttgaccttgtttaggtgaagagcaccctttccagcttatgttttgtatcatgaccgggaaaggtacgaaacaagtgtgtcggggcccagatgatttgatggctctacgggccgagtatgggacacaggatagcttggccctgggtcaggtattagtcagtccttgctggcacctgggcagggacacatccgtggatggggcctggccaggtggcctctgaggtcctcgtgtccactggaaggctgtgtcctctgttgtagtcactgacttgctggacctgggtgggagctcacccacctgtggatgggccagggagctcctggaatcactagaaagatgaactttttttgccttctaaatgtatgaaaagatgggaaatgataggaaaataagtggaagtcagatctattcaggaaaatgacttcccagggaagagctggggtgcctccaaacccagaatcctcggtttctagaagcaaggctgaccgaggtgggcagcattctttgggaccttgagtgatgaagtagttacttaagcagagtgtttctcatgtgaagccaggcagtctaggacactaggaatcatttcagcgtgggggagacgcagacactgtgcttgcccagggtgctgcattcatctgaaatgccggtggctaccagctctttgtcacggttcctccgtggtctccttgaatgctgtcagattcagggcccgtgtgggcagcggcagcctcgttcccagtcgtgtttagggaatggggtcagagaagtacttgctaaagcttcctgtgtgcacgtgtaattgtgtgtgcatgtgtgttaaataaatgtatttcaactcgaaatacacgtttcgtggccatcagtctagggatggctagaatttagtcactaaatgaaactaagccgcaccgtcaccaataatgtgaacatgattaaaaaccacactcagttcttattcatttacctacaagtccagaaacttttagaacttatttcaccattaaaataaatagttttttaaaaaatatacaacaataaggaaaaatttgaaagcctcttgcccctccatcccaggcctgacagagtggcttccacaaagaaagaggcagaagccagggctgtctgtgcctgcagggcgctgttgggctcacagatgacccagactcccccgtaatggagccgcggacccacagcgagccacttgcaccaggcttagccaagctgacaggccagcggagtaaggaatgttccctaccattgtccagaaaatgtaacgagggtgaaggtgtgccaagcagactccccgtgtcagccctgaggcgactgccatcgctttcagaaacctgactaccaacctggatgaaaaccgactgcttggtcatggccatgcagttagaaaacacagcagcaatcctcagatgagtgtggccgtatttgtgttactcaagctgctttgtcatctgcatttgaagaaacgtggtgagcctcctgtgtgtgcccatgtggcagtgggcacctctgccccctgcaaaggctgtctaagaacacagagcctgcagtacaggccctgcctcctgacatgccccaggccggctggaagaaagcgcgggactgtcctattgacgtggggaggggacggctggactctgtgatgctmactgtgttctctgctgggccatgtggctccccacagagaccctgggtgcccagtcattcgcgttctcctatgtgtgtgtatatatattatatatacatgtatttactaactttagaaagcccccaagggggccttgtttctgcttggacagtcagcgtccatagcgtgtcattcctaagctccattaaggagattcagaagcaagcagttacccctggagtctgcacgctgggcacaagggtcacaccttcgttgagagctcctgaccccaggagccgagggcaggacacggtagtgtttacaggacctggcaaaggggcactgccttgtgtgtgaggttttttcaccagtcagtcccttttaaaaacagcatatcttttgaagaacaagaagtttacgcaggcataagcaactcactttgcacgtggagctttcaggacgtttcatgtctgttacgttatagcctctatcctcatgggggctctgagttcagcagggcctgagctgttaatctgctttttcaaattattaataatgaaagtaacaccatgccaccacctggtatcatttcatgctttctatgtgcctggtgtttacacggcttatctcatttaatcttcccagcatgtaataaaaatattgcaacaggtactgctcctgtgtggactccttcccccgagctcacactgcytgaggccttcccagctctgggctttgtgtcctgtgtggacttcttccccgagctcacactgcttgaggcattctagctctgggctttgtgaatatcctgcttttatcctcatttataggtaagaaagctgactcagagaggttaagcagctggtctgaggtcaactgcttacgggtcggggagctgggcctgcacacaggggtctgatgcagagctggtcctatctgctttataagctgtggctcacagggcactccaggggctcgagaggacctggcgggctgagatgaagactggtgaggcctgggaggcaggtgcttgactgaggtgggaagtgggaccttggtgccaagcattcccagggccacggggcaggcctgtagggtctggtgggtatctggggtcccggagaagcccttggcacggggcttcatgagagcataggcgagtgccgcgccctgcagttgagcacgggggatgcagctgtcgcagtcgcttttgaagagtgaggggtgaggcctgcagttgctgcccgacgttgtttacaagtgagcaagttttacaaaaaacatggacagcatcagggctgacttgaattttttacttgaggcagcagctcaacctgttggtttcctcaattgtgaattaaaaaaaaaaaagaaagaaagaaaacagagaaagctgacaacgtaacattgatgagaggattcttaagggagaacaagccacaggctgtcccgagaaaggagcggggagatcgaggaagcacgctgccgtgtcttgttcgtggggtgcttgtgacgctctcgcaggatgccctgtgggccacaccacgagtgctcggtggcgactgcagaagggtgagggacgtttcccttcacaccagacggcgggtcttgatggcagaggaaccaggcatcagaggaggacaagtcaatccgggagcgtagataaaaaggaagcgaaacttatttcacattgtcaagctgtcggggattccagggaccttgtcctccaggcctgtccctgtgccctcctgtccccaggcctgagcagccgggtgtgggatgggaacaggccagggccaggtgcctcacgccctgaggctggagtcaggctctgttgccactttgaatccaggggcccaccctgaaccctgagctgggcttctgttcagtacgcggaggtgatgacctctcccacccggggggggtttgaggactcccgaggtggcaggggtgacgcccagcccagcatgcagagtgcccaggcagtgcccacacctttcctctccctgccaaggtgctccgggcctgagcctgtgtggccccctgcttggggctgtcaccacaatgccattccccgcacgcccagcaagtccctcctatgggtgagagcctaacttgagagactcttttggggaggagtaagatgacctgcccttctcaagagtgagcagttcttagatgactgccttgagcagcgatggttcttcctgcaggggtgcgcccacgaaacgctctgcgtgaagcacattggtgccatgctcaggcccagggagagtggagggtgctgtgctcttggactgggtcctggctcgagggttgaggggctgggccatgtccacaaaaagtcactggatggctgggctgctcccactgtgtcgctggaagaggggcagcgcccgctgcagtgtttggagtgcttggtcatggccccacgtggattctccttcctgggggaagctgttccgtccccaggttttcagctaacttatctgagttttgatgaagagagcaaggggttttgctaatctggattcctgtggaagggcctcctctctctgctcgtgttttatagcttggcaactctagtgctagttctgcaatattcgaatttgagtagccagaagaatttgctgccagggtggccttgcccttgactttgaaatgaactcacccgagacttcagcttgatgcctcctttggctaatgctgggttctgggctttggccgccgcctgcctgtccatcacaaggggccatgttctccaatcaggacagagttctaagcatttcacagtaaagcctgcaggagttaggttttctgttcttgacagactgagaatgatactgagaatgttttctgattgatttggtgagctgtctgtttatagcatcattagagattattttccatggctaggaattattcttgacctcacagtaaaggactctgaatcccccaccccctgcctgttttttttgttgttgttgtgtttttttgtttgtttgttttaaagaaaagacttgtaccatcagtcttaggcgtaatctccttggcagtagtgaggagcaaggcatctgatggagaaacaaagcatggtaaggtttttaccattcaggaatcacaccgcagtagcattgtagtatttgatcacaatttactcttactttttttcataaagaaagaaataggcctacagtggctctcacttgtaatcccagcactttgggaggctgaggcaggaggattgcttgaggccagaagtttgagaccaatctggacaacataggaacacctcctctctacagaaaagattaaaaacattagctgggcatggtggtatgcgtctgtagtcccagctgttcaggaagctgaggtgggaggatccttcgagctaggaggtcgaggctgcagtgagccatgtcataccgctgcactccagcctgggtgacagaggggagaccctgtttcaagagagaaaaataaaaaaaaaaaaaaagaaagaaagcaccagcagaatttagaaatgtgggccagtgtgggagcctcgcctggcatcactggcctcgcctggcatcactggctgtgggctgctgctctcgccctggagctgttactttgagagcagatcgaggactcagcaggcaggaggaatgttcacggcagggtcagttcccacgctgcatacgccccaccatcgcccctcgtcgtggctgggatgggagaccgactttagaaccagaggctgggaagagggagatacccccttccagaaggggccttctgccgctgagtaagggggtggtgcccggctggctccatgaggggcatgaggggtgctggctatgcttggcctgaggggttgctgcaggaaggccttgctccccgccggggctgagggacccggctgagcagcagcagcaggaggaatgagcagtgctcttggagcccggaggagggggcagggcttgtccttctggacgggcagccccaggaaaagagaagcccagagctaagggcccttgccctagggaggggtcccacatggaccccgaagacgttcctctctgcagcccttcctggcactgcgtggacacgatgtacggaatgaggaaaacgagcttctttcccttctctttcacttctccctcccatcacgcagcgtgcaattatggaagaggataaagaaggaaagagcagtcggaaaaattctgtaagaaccggagaggggagttcgggtgtttttacagctcctggggttctccgggaaacaaaggtgtgctatttccacttctgtgtcttcattcctgttctgcagggaagctcagcctggcttcatccacatgggtggagcagagtcaagttcagttgggaattttttttttttcctgctcatttggaaaaagaggaaaagacactgggatacaaagagggctttataaagaagaggcctccttggtcctccactccaggactttctgcgatggcggaaatggtccatagcagcaatgcccatcggggcagccactggtcatgcctgactgttgagcttgtcagcagccacatcaacacatggatggtgtggccgaggaactggatttcaaattaaattaaattaaatttcaatttaagtaaccacatgtggccagtagctacctacagcgcactctcaggaaggctctagactgagagtttgaggatcatcctttatcagtgatttgaatggatgaggcttcatctgtttgaatttcccagttggggtaaaaagaggggatgcttgtactggaatgggagtaggttcacagcgcacagcctgggccagcatcagtgtgttgctgaatttatgctccttcccaaggttgttgaggagactggaagagaagttctgtgttagagagagggacgccctagaggagttcacttagtcacaaggagcagaaatgccctcagtggcatggattgaaaggcacttacggatggaattcgggagaaattcatggagcactgcagggagtcctctgatgggacccctcttccttctctgtctcccctgtctcccgagccccaggactgccggtctcccatctgcttagtccccagctgcgtccctgcaggctctccgctctgttgctggtttggttcgtctggtgtgtgcctcccctgtgacatgccgggagcagagcggaacagctgtgccagtccctgggccccagctggactgtgctgggtccagggtctatgagagctgctgggaggccaccagtgcaggtgggcaggaccttgctccgtgattctacccatgacgcttctcactcaaggaattggcttttgtttcagtgcatcctattgaaaatcacttagccagtaagcaaatgttggcccttagtctgttaaacattaatacaaataagcacgtgtcgctgccctcccgttgtacagttgtacagctgtaataaacaccactcgccctgcctcgtgtgcatgtctcttctggtttcggcaccccagtgccgtggttgtgcgaggggatcagaatatctgcttgagattagcccatgtcagcattttattgggattgttaggcacctccgtcctgatcattgcaccacgctctgtccctgtacttaaatatctctacttggcatttgaaacaaaacaaataaacctattgtacaggatggaccaatcatgaggcattttcactctgatgttggcagtggatgtgttgacattgagaggatattcatggtggcaggctgcccccagttccaggttttggatatttggaataaggtaggctatgacaggccgggtgcaatagcttatgcctgtaatcccagcactttgggaggccaaggcaggcggatcacgaggtcaggagatcgagaccatcctggctaacatgaaaccccgtctctactaaaaatacaaaaaattagctgggcgtggtggcgggcacctgtagtcccagctactcgggaggctgaggcaggagaatggcatgaacccgggaggcggagcttgcagtgagccgagatggcgccaccgcactccagcctgggcgacagagtgactgcatctcaaaaaaaaaaaaaaaaaaaaaaaaataggctatggccatgaagggttgcttccggattcagtacatttaggaggaaataatgttgttcatcatatgacacagttaagtctccgagagataattaaatgaaaatcattctaaaatgtttgattaaatgcctttctagcctagcccctgtaggtggagtgtcatgatttccacgttgttgggtgctggataaatgatttagccacagtctcacggctctgtaaagagtggcaggctgttcctatcactgctgatcctgtgtgtgctgtgcaccggatgtgggtggaatgaggctgcaggggcacctgcatccccagtggctatgatgactaaatgaggaggcccctgtagagtgcacagcgttcacccagtgacagtgtgattgtaatagctggggttgctgggaccctagagtatccacggtgtgcatgcacttgaacttcaggataccctgtttccctctgaggtgcaagagctctggcgattccggatccctactgtgtgtcaggttctggaagcatcttctctcatctccacgtgatgcccaggggctcccccagcttctggaagccaccgcttgtccagggcaccagcccagtctgtcgtcaagcctggatttgatcttaggtctggctgcttccggaataccgagacgggcctctgctgttccctgagcttgctgtcagcaaatgtttggtgaggagaattatttggtttggaatttcttgtttatgttttagtccattaattttttttatcct

SEQ ID NO: 97155 - DNA, 12835 bp, Homo sapiens
gcggaggcggggagcaccgctggggctggggaagggagccctagagggcaagggcggcagagagggcaggcggctttctgtccgggagctgggtggacaaaggccatgcatcgaggcactgaggctagagtgtgctgtccctcaggattctccagtccttaccaggaaacgtcactgcctccccatgtaacacctcagcttctggccgggttctccagcatgggaggggctgcctgtgggccccatgaggggacaagatctttgcctcgatgtcaccggggctgccacagcaggggcttcagcaggcgtgggagttgctgagcagcctcaaagcatcagctcatcaggccgtgtcctgcacacacgcagttctgtgcgcccacctccacgcctttcagaatggcggctgctcctgacaccttcatccattttcaaaggaccggctgttggtccatcccctaccaccttcagtctttcaaacctgtggaattcagtgggcggaggatggaggcaggaccagctccaccagcagaaggatgaaggcaggcttagctccaccaccttgcttaggtttctaagctagtttcaaacaaagtttaagagagatgatcaaaaaggaagacccctttcttgtttttggtttctttattgaagtgtctctgcagcatccctttgcaccattcctgttctccgaaggcaaccattctagtcagtttcttttgtttacaggaaggttgatcattctatttcttgttctttcctggaaagctttgtgctttaaaatctgttcacattcctgtgaggatgcctctcccattaccttctcacaactcaagatcgatttttgaatttccgacaattgtcctaacccagaaacttcattatcatcagtctaagtatttcagacatggtaatagctgatgattatcttgagttttgtgaacataaccctaatgaggtgtttaaacactactgtgtgattttttttctttcctcttttaatggaatccacaagccgctaagccgtgtgcaagggccttcatatttcctttctgatgtggtgagatgccacacataaggcgtggctgaattggctcgtgggcctgaggcaggctggccgctgccctaggcgtcactgaaagtcacgtggctcatctgctcatgtcagctggcagggtgctgcatccgggcagagctgggcccctggcgagtgggtgccggtgatgctcagggtagggtgcggcaggaaaatgacttggcacagcgagggcctcctcccagccagggagcaggagcagcagcgagaggatggctggagccgagccttccctgccccaggcacagaacgcctgtctgccagcccgcggcaaacagacaagtagtaaggctggtcgtttgcagagcttcaggccctgtcaccaggctggaacgtttcgtggcctgggcttggtgattgtggctccaaaccacaggaggccgctgggctcctcacaactgtcaccaaaactctgcctataactccattcctatacgcatgcatttggatgcataatcgtgtactttttctttgttgttttggtctttgctagataatgagcaaactcaaaacagtcggatgacttgtggttttaatgtagacatggttggctatgatttcaaagagattcagtctcttgcagatacctggacacgtgtgtctactgtgaattcatatagctgagcgcgtgcattatttggaaaacgagctccctagtttctggcagtgtctttcccgtgcgttggagtagtcagtgatggaaggacgtggcccacggagccactcccagccccagctactcagccactcaccaaggccatgaccgcccttccaaggcagcacccgcccactgtggtgaggttggcattaggtgaccccactacagacgacgggcagcaagcaggacagcaggtggcttggcaccttggcacccacgccctcctcctttttcagtctcgttccacctgcgcactagctctcttgcccaccacatcccgccagctcctgcccagccccagcacctcccaaaggggtccggcgtgcaggccgcttccccgcatggtcagccccacgtccactacttgctgtcaccaaggcacagaggagagcagggccaacatgcctgcggggatgagggctgaccaccatgaggttcaggcgagaagtgttagctgatgttgtcccatgtgccacgctgacatgtggacacgggaaccagggtcaggagccacgactccaggcagtggcgggtccgtgagccatggacacggaggaagtaggcccaggacagcgcccaggaaggggaggcatgctggtgctgctgccctcagtgggcgtgagggccaggacccagaggccgaggcatgcctgctgagcgctgcagggagagccagggccgactgaagcccctgctggctcaatgccttgtacagcccaggcagggaggagggacaaggcgggcacagaccctgcccttggagccaggccaggtggagaggagcgcgggctccctccgacacaggctggctcctccgagcacgtaggcctttgtctggaaaacgtcacagcatctgcatggcgcctgcgcccctcagctggccgggccctcctagcagatgggggccgggcctatcctccctttgcctggggggcctgggagcccctgagccccttctgaaagtggctgcagctgctgccccctgcctcctgcctcctgccctgctccctgttggcatggcagctccccagccccgggccgtggacgtggccattctacaagcctccggccttgatgcagatctgtgacctccacagagtgagaagagcctgagtcagctctgtgcatcgggcctcacactagggcctggctgtggctgtctgtgggacatgtgggtgtctgtggggggtgctggtgtccgtgtggatgtccgtggggggtgctggtgtccgtggggtggggtgggtgtctgtggggggtgctggcgtccatggggggggtgggcatcagtgggggatgctggcatccatgggaggtgctggcatccgtggggggtgcaggtgttcgtggggggtgcaggtgttcgtggggggtgtaggcgtctgtggggggcgtgggcatccgtggggggtactggcgtccatggggggtgtgggtgtccatgggggcggggcggggggcgggcatccatggggagggtgcagtcatccgtggtggggtgatgggggtgcagtcgtccgtggtggggtgatggtgcaggcgtctgtggggaggttgcaggtgtcggggggggttgcaggcatctgtcggtggggtgtgggcgtccgtaggggtgcgggcatccgtgggctaaggcaagcaggcctctgtttagcttctcgtctgtgccagccactctcctgcagcttggggccatcgcagttgctcttcccagccaggcacgctgttccctgaggaagggttcctctcgtgctaaccgggccggcaagccctccaggcaagaggcagacaggccctaatggacctatggccaactccttcctatggcccccggcagccagccctaggagcgtggaccagagcacacagagtggaggctactgttctggagcaggctgagaatgggagaggagccccacagcggggggtacagcccagctgaggccagaaagtggggtcccacgttggataaaggagcctgttacatcaagccagtctccctggagcatgtgagatgtcactccagctccagcccaggaaggggccgggggctgcggagagtgagggattggggcccaggcagccgctaggaatggtaggtcccgcccctggttagtgggggtctcttgtcctccacagatgggttttaagctggtgacgtgcattcagccagcactgggtcaaacaggaaaaagacagcacccctgtcctgggagcactttcactgccggagcaggcgcgggtgccagagcagtggggtgggggtttcgagggccccgatttccatgggaggaggcctggcgtgcagctgcagcgtccttggagccctcagtcagctgtacacgctccgcctgtgtcgcagggaggggctgtcgctgcatacattcccgaggatctcagggtctaagaggcctcaggacccatgtttaatcccgggacttgccccttgtttgccatgggagggggctgctagacaagccctaggagctcactgaggagccaggctcggggtcctggagcaggatttgctgttagatacagcccctcaggggcacgggctgcaggcagacgcccaccaggggtacctcgtgctccccagtggcttggtgcctctcctgggcccctgacaggctgatgccacaacaatttgaggtgtccccaccagggtctgtgacccagctcagccctcacaggagtcaaggcacctctaagggccagacactgaccctgcagcagggccacagggtgtcacaagggggagcagtggcccctcgttgtcccacaaatgcccaagtgccactgaagaccccggagtgcgcccagggcctgtcgagcaccttggccgcgtgcccttggcctctctgaccgtctccctcccccccacaggctcgctcgcctccgtgttcgtccggctcccttgcggtggtgttggggtaagtgttcctttaatgtgtaaataatgtcctgtttcttctcgagtcccagtggtcacagaaatcgcagccttgcttccctcaaagtgaataattgctgccaggtgttttccatacgcaggggctgcccatgtgcggcttcaaaggccgtgtgagccgagagcgttttgatcgccgactcgggcacctttctctggggaaggttgtctggcgcaggtggctggggctctggggtgcagtggctctcgctttaagaaacaggatcctgtatgcagccagcatctcatccccttcgaagtctgtggcagtaatctgctcacatcaggccacgagtatggtgcgggtaggatgcgtgcttctgtattctgtacctagtttccacccgaagctacaggtggggctcccagtgcagtgaccgtgatactcatgggccacgtggagtctgtagggctactcgctgggctgtgctggcttctgtgagctgatgatatggacctggcctgggcatatgaatcactggtctgtgccagcttctacgaactgatgatatggacctggcctgggcatatgaatcactgggctgtgctggcttctacgagctgatgatatggacctggcctgggcgcataagttcacaaggactttccagtctgggcatctgcccatccgtccacacaggaagggtcaggtcttgcaatcaaacttctcaataacaaaagagttctcccctggcccctgacctccttgatgcagcctgggcaggggtggcaatagcgagggcggccatgagaagctgaggcggagcgtccgagcagatccgggccatcatggtcctgcagtgccgcgaatcaccacagacggttacaggcagggaggacgggagccggtggacagcaggagccgctgcagccgaaacggtgcagtgtgtgtgtaatcactgatcgcagggtgaagctcaaggtctggattctgttatggaaatgaaacaaaattgttttcttcctgagtttttataaaaatcactgctttgaaaattatcccgtcagaaagagaataaacggcatttattcataccaccaccaagccctcctagagttattttattttgtattgtaaataggctgcaatctcttaatttggggcatgtttttggccagacttgaaaaggattgaatttgcactgccctgcagccagcacgcctgtgcaaggcagaatttatcatttgcaaatgaaagctaagtgcagactcagagctgagggggtgagcccagcagcccctcccaagtgttaaatccagatctgaggcacagcagatgagagctgcaccctcacgtctgggtgtgcagatgctgatggaaaagctccccacgtggacgcgggcagagagggtagcctgttggcatgggcagggaacagtgcaggccgtggggcttcctgaggtacagccaccggcaggatgtgttttcttcccattgttttccaaaaggaagaagacagacaggaggccggtgcagacccctgccctggtgtgggatgcacctgctgtcgctggcacagatgcagctctcctgagcctcatgtctcctccagagccaggaggggccagcctcctggggtgtcaggaggagcaaagtagacctcgggagccgaagtgtgggcacacagcaggtgctcttgtcagggagggcagagcaggtgagcagagccagccaccttccccgaaagcagctgcaaactctcccggaggcagaacagtggggcttggaacacggaaaactcaccactcctcggcgctgggaaatgggagctgtaaagtgctttgacctctttttcaaaccagatcagctcctgcgttgctcctctccagtgaccgcaagtttcaactgggtgaggagctggtgtccctgctcggcctcgcccagcggagtccyggcctgctctcgtacgcccggctccccgcggctcctctgagcttcccaaaggcctcccagccctgccagccctcggcatgtcccttttagactccatgggattatccgtgggaagctttctccatgtttccccccgcctttttcctgtctttattgcgaaagagagagaaaaggagaggagagaagcgagagagagagaaagaaaggaaaagaaaacaaaaaaaaaaagaaacgaaacacagagtgagccatttgctccttcctgcattagcagttgcggccgcctgccctgagccaggctattgctcagtggtggcgctgcacgcctgagccaggctccctgcaagaggcctggagctccaggctggtccctgggagctggagccgtggtcctgaagcaggcgaaggagggtctcttgagttctctggggactggggtcctgcagtttggctggggctttgtccttcactctgtgcaagactccagaagcttctgaaccccagggtcccatgggagggggcacagacacaggcacctggtagaccgagcagctccttggcaccccaggtgtgcagaatccccagaagacccttcagaacacgggtgtagtacaccctccgctccctgcagtgttggcctaatcccaaagcctagttcattgtatgttggagagaaaccatctctgggtgctgtccccacaggggcagcctcggggcctggcctgtctgggaccccgcctctgctggctgacacagagcaggtggcagaatcttgccctgcccagctctcactcctgcgatgtcaccttggatttttttttttttttttttcctctttggagacagagcttcagtctgttacccagactggagtgcagcggtgcattcatggctaactgcagcctcgacctcctgggctcaagtgatcttcccgcctcagcgtcctgagttgtggggactacaggcccaggccaccacatctggctaatttttgtttgtttgtttttgagacggagtctggctctgtcgcccaggctggagtgcagtggcgcgatctcggctcactgcaagctccgcctcccgggttcacgccattctcctgccctagcctcccgtgtagctgggactacaggcgcccaccacggcacctggctaatttttttttttttttttgtatttttagtagagacggggtttcaccgtgttagccaggatggtctcgatctcctgaccttgtgatccgcccacctcagcctcccaaagtgctgggattacaggcatgagccactgcgcccggcccacatctggctaattttttgaaaagaaaaccatcaccgaatacacttcaggaaatgtcttcagccccttgaaaatgcattttaactcaccttgctttgatgatgaagcttcaagaccgcctggaaagaaatcctccctccccacataatgagcggtgtctatcaagtggcaagtctgcctggtggtggacaggagccctcgagggcctggtctggggaagggagaggcagggtggacacgcctggctcctgcttaggagccccaaagcactcggcgctcagaggggctcagtttgagaaggaggcgtcctgcaatggacctgcaatcgccctggtcagcaccgtgtggaagctgagcaacctatgacacggcttctaagacctccaccgggctgggcacccccaagtccccggtgtgttaccccacagcagcttgcaggcaagggacacacttggggacagatgctcaggttccctggggccagcccaagggctgtgtatttcatcttaacacctccctcccctggccagactcccataggagactgctctgtgcagaactggctgtccaggtctctgtctgtcgactttcctcctgaattgagccagggctgtaagaaatttctggtgtgcctaaataaataaatgagccaacacacaatcggggattgttgacgtgtttgtgtgaaacacgttttctgtctgaagtggaaaaggccagcgggctgacttgctggtgtccaggcagagccgtgtaccgtcactagggcagagcagggcagctctcctcacccgcccacacggccagtcccgcttagctacgctggtcaacatgtggagcttccagttaaactcggcacaggagaaagtcactattggaagagactggtcgtgattccccttacatttcattttgctgctaattatttgacaggtcgactatcccttatccgaaatgcttggggccagaagtatttcagagtttggtgtttttcagattttggaatatttgcattgtacttaccagttcagcatccctaatccaaaaatctgaaatccagaatgctccagagtgcatttcctttgagcgtcacgtaagcgctcaaaaagtttccagttttttttttttcctttttggagacagagcctcactgtgttacccagactggagtgcagaggtgcattcatggctcactgcggcctcgacctcctgggctcaagtgatcttcccgcctcagcctacaaaatgcttttgtagtatttcggatttcagattctcagatcagagatactcaagctgaataactctcttaactacagttccagttaaaaaaaaaaaaaaaaaaaaggaaatagatcaccttgacatcattacttttagatggaagtatactgaagcaattgagggaaaggaggatgcctcagaacaggtcaggacacatgcatctttcttctggtaaattctcttgtattttcctgtttaaactttttggcatgtcttaaaaagattgaaggctgaacgtgggctgcagctgccctggctctggtaggccctggggtttcagaagcagagcccacggaacctgagctgctctgcccagccagggctggtgatgacggtggcctgggagggtgacctcactgtggggtgttgtttccacaggtggacagtgacaccatatggaacgaggtgcactcggcgggggcagcccgcctggctgtgggctgcgtggtagagctggtcttcaaggtggccacaggggagctgaaggtcagtcggggcctggacagtggtggccctccaggaggcctgccatagattcccagtgtggggaggggccgcccactccgtctccctctcatcaggctgggaggcggctgtgatggggaggcgtggaccccactctgtcagcacagcctcgctattgaatcaaagagacattgcccacatttgtgatagggtatgtgcatagtacagagattctcaatgatttgggtcttaagaaccctttatactcttaaaaatttatactcttaaaaaaaaaaaaaaagctccaaagagcttctgtttacatgagttatatccacaatattgactctattagagattacaactgagaaattttcaaaatgtttattaatttaaaaatagcgaccgggcacagtggctcacacctgtaatcccagcactttgggaggccaaggcagggggatcacctgaggtcaggagttcaagagcagcttggctaacttggcgaaactccttctctactgaaatacaaaaattagctgggcatggtggcgcatgcctataatcccagctacttgggaggctgaggctggcgaatcgcttgaacctgggaggtggaggttgcggcgagccgagtcacgccattgcactccagcctgggtgacagagtgagactccgtctcaaaaaaaactaaaaaattaaaaagtaataaaaaaataaaaatagcactaatgtcttgcctgtggacagcagctggttctcacacctgcccggcgtcattcttgggacatgttgaagtacatgaaggaatcctggccccacacagatacgtaattggaaatgggagcaggattttaatagacttttcagaggtattctaattgtgggtattctttgacagtataccaaaaattcagcaagtggtagtgtcttgaaaattagctgcagtgtggatctgaaatcaaatcgtggcctcctccccctccgttttgtttaactgaaccattagcccttcttggagatcaaatcgatccttcgttcatgggtgattggtagcaccgtgcgttggtcatttggaaacttagcttcacggagttacatggatcttccatattctgacccatacagtatcaaaaaagtcattaatttttgaaaccattaatatcacccccatctcaccagaagtcttataagtagtgagagagccagcaggctcacaggggcagagccgtgtgttccaaacttgtaattttcactggaaagctcacagtttctcacgcttccttcccgtctctttactcgggatgttaaaaggacgtgtttgagggcggagatctactaaaatgtctgaatactgcttcatcgagcacattgttaagagaagctgctcacacacacacacacgccctggtgctgttccctgcccgccgtctaccctccggtgcttcagcaccatcggcgcaggtgtcagggcagtgaaaagagtacatagagcctcaggactacgtggactacagaccctcagcaggggtcgggaccgaggggtctgcagcctacactcggaagcactgagtgcagaaacgcagggaggccagggcctcttgagagcgtttgccgccacctcatgggctgccctcgccccttcctgagcctggtccctgcggcgtccggctcaccccgtccatggcattgtcactcatggttggccggcactttttttgaggcttcattacagaccttgaccacacagtgtcctgttgctggtgagaccaggagaggactggaatccatttttatggcagcaactacagagtggtttgcagatggatttttgacgcagaagtgatggggcagaggacagcgtttctgcccagtgtgagaggagctgtttcgtgggctgcccacttgcccgccatcctgagagctgaactgcagtaaggacagaggcagtcacgtgaaggccaagctgggacacaacgtctctgccccgcggccaagtccttgagtggggccccttctgcttcatcttcctccagtggccacctagcgggtcctggtcccgagccgacggggagtgagcacatcctttccacatcaccccgacccctgagccaagggcaccacgcctcaccgacagttctgagagtgggcagggcacccacctgttatcctagtgactgcgtttcgggggaaccattagtagcccccagacctctttaggagaagggcccaggcttcccggaaaggctcccagctggccctgcatcctgtccccatcactgtggccagggtgcagcaagaaactgtcctcctgtgtagcccaactctgctaaaagttgagtgtgcaaccattttcccgtggctacaaagtgtgtcttttgttgctctctcctggctgtctggtgtcacctgcagaatggctttgctgtggtccgcccccctggacaccatgcggaggagagcacgcccatgtgagtacacgccgcagccccgcacagcaggggaacccaggtcttccttccctcccttagggctgggtgggtgtgtgagtgactgcggggagctgggctgctgtttgctggccacccaggatgtgccgcatgccggcttggctccagctcctgggtgtggagtgcagatgccaaagtctgcgagcatcactgctcggttatgacggagacagatcagaggaaaggatgggaaagggtctgtggaggttagtccagagaagcctctggttgttgagtagttgtcaacacttgggagaggaaacaccactcaccctcaagtgagtcactgcagcacttgcttgtctagaggactcaggtcattttgcgcatggccttttagctgcctgccgaatgcctggtactgacgcagcaagccacagagccacgtccatgcaggcagctatcctgatgctgtttcgggtctttcagagactgccgacggtccatacagctgaggatctgggcagggtggcgagtgtggggtgtgggtcctcccggatccatccctgtgtgtccagagccagtggcaggacagacccgcagctgtctgtggagtgccttgcagcctgggtggtgaatgaatgatctatcccgtcaaagagcatgctgtctcctgggacggtagccgctctagtgaggaggggtggtgctagaaag

SEQ ID NO: 97156 - DNA, 40506 bp, Homo sapiens
tgcagccacccccttactctactagtttgtaaaatttctacatcatgttaaagtgcagttcacgaaccagcttcatcgacgtcacctgggaacttgttagaaatggagaatctggctgggcacgatggctcacgcctgtaatcccaacactttgggaggccgaggcgggtggatcacttgaggtcaggagttcaagaccagcttggccaacagggcaaaaccctgtctctactaaaaatacaaaaattagccgggcctggtggcacgcgcctgtattccaagctactccgagggtgggggtgggggtgggggtgggggtgggggtaggggctgaggcaggagaattgcttgaacccggaaggcggaggttgcagtgaaccgagatcctgccactgcactccagcctgggcaacagagcgagactctgtctcaaaaaacacaaacaaacaaacaaaagaaatgtaaaatctcagatcctacctcagacctatagaatcagaatttgtattttaacaagattcccaggtgatcctaggcaccttcaaaattgagaagcatggctttacttgactgggctccctgaggacagggagtgccctgttcatctcaaatcctcagcctctagcacagggccgggtatatagtaggttaaatctggatgaatcaatgtcataaccaaaaggctaaaacaggttcagaaccaggggaaaccattggaaaatcttcagggtgatccggggtgtggaagggaggaaccaggtcacaagaaggacctctttcctggagagtcctgtttcagcaaaacagccattccctcctggccattccaccttctttggaagtgcacccctctccagcttacccctgcctgcctccgcaacagatattaaggacaactgctttgtgccaaagctcgaaaatctgtgaatttccgttccttttgcctttacagtctcaagaatgggatgtgaagatcagggtaataataattacggtttattgacacgtactgaaggctatgtgtcagatattgtattaaacactgtacatctcatttaatcttcaactccatgaggtagataattatttccattttacagaggaggagaggaaaggacagaaacattaagtagcctgtccaaggtcacacaactacgttaacggagctgtcatttgaactagtcagtctggcctcacagttaagctacttaaccttatgtactattatacctattttacagctaccaaaagtaaggatccgagaggttaagtaacttgcccgaggttacacagctagcatgctattaacactcaatttagaaactggaagtctggttcacaagcctgagctcttaaccactgagactaggggtagtgggatacaggccagagcccagaaggttgtacgggatcaggagaccaggccaccagacccgcccctcactggatccccctccaggctgcagtgtagttggccgctttctgccccagagcgccagaggtatgaagcctcctacctccaacattgggagatggaggtcctgggggcctcgggccgagcccggctttgctcccctttggcgtaggtgcctgcgtcttgacccccaccgaaggccaagtagagaaccctcaccagggtcctgggacccgtccacccctacacctagctagcccggagcctctcagctccgcgtccccacatcctccggatgcccagcggttgctgagataccgcgggccgttacgccggcgcggactgatgatgtcagcactgcttccggtcggtggcgcttctctctggcccgagccaggtcagtccggcagtgcagatggcccatcccgggctctgggctcctagaccggggtgggccctgccaggagtgggcctgagcctcgcacgtcctctgaaactacgctatgctctgcttttgcggcgcgatgggcgtgggagcgggggctgcccaaagatgggctggggttggaggaagtggcccggtagccgctgtgtgtcctgaggccgtaaggcgcctgaccccacccctgaagctggcgacggagcagggcctgttttctctacactatagtgtaggttccagagacctgggcctgagctctccgcattggtacttcatgggtcgtctggattgtgccggacctgtgaccctgccgttgttttctttccagcatgatccgctgggcccccagcgcatctcctggaagagcccactcaccctggacgagctcttcggtagcctcagaccgtccttgaagaggatgactgagacattatgggccacgcgctgtgtgtctgctctcggggaactgtcatcattgacaataagcgctacctcttcatccagaaactgggggaggggtgagtgtttggaagtcagttaactagtcctcaagtttatgatcattgaaggacagcggtgtgcatatgcttggggcacaagggttttatccctatccctgtcctctctcacctgacagaacctagctacacagtatcaagaaggtggattctggagccaggcctgctaaatccacctcgtgtgaccttgataaaccatgtttttttcatcagcttaatggagatgattattatccctcactgatggagttgtgaggattaaatgagataatgtgtataaaatgtctcacccaatgcggggttgacaagtacttgataagtgttggctattatttatttagcatctgtcaagtgcagaggtctctattacgaccataggacctcaaagatttctatatctctgctcctgaggagctcacggtgtaatattcttcagatttctcttagagccacatcttgggaaggtttctgctaaatgggaaggacaccccactccccaccaggaaatttctctaggtccaagccatgtgggagatgaccatggccctttattgacccctttggcccacagtgggttcagctatgtggacctagtggaagggttacatgatggacacttctacgccctgaagcgaatcctgtgtcacgagcagcaggaccgggaggaggcccagcgagaagccgacatgcatcgcctcttcaatcaccccaacatccttcgcctcgtggcttactgtctgagggaacggggtgctaagcatgaggcctggctgctgctaccattcttcaaggtcagaaagactcctggttatggagggggttgcagcagagccacctactcaagggctgtgtgagcagtccagcatgttaggaagcagggaccatgtcctgggtttggccactttagattttgagtttgaggtgtgtatcatgaaagggctgataggctttgacatagggaagggatcaggcctaaggagcagaggctccaaaaacatctccaactgtagggaaacttgtgttgcagagaggtacgctgtggaatgagatagaaaggctgaaggacaaaggcaacttcctgaccgaggatcaaatcctttggctgctgctggggatctgcagaggccttgaggccattcatgccaagggttatgcccacaggtcagtgggaggaccctgtgtgcttgctggggcccagaggaagagcctcaccaggagacatgggaggtctctgttctcccaagaaacagcctgtatgattcttttgcttgctgggattccagccttcctgtccagagatgctcataggtcacttctacttctctacagagacttgaagcccaccaatatattgcttggagatgaggggcagccagttttaatggacttgggttccatgaatcaagcatgcatccatgtggagggctcccgccaggctctgaccctgcaggtaaaagagtctccaggttccttttctcacctgttccccattcccaccccttctggtgcatgtcccagtttggtcacatgaccatgacctgtgccccacttttgagctctgggatcactgttccaggactgggcagcccagcggtgcaccatctcctaccgagccccagagctcttctctgtgcagagtcactgtgtcatcgatgagcggactgatgtctgggtgaggagcatgtgggtgggtatctgggtagggagggctgtggctctgtacccaccgtggagtagagtaggttgttggtttctgttgcatggggcgccaggaaccacaatatgtccccatccacttcaacttccttcctgggaaatgtcactgatactgtacccagttgtaccggatgtggtataatctgtgcccctgaacaaggtgagtacagctcagtgtcagtagtgaaggcactggctaagcaggggctaagctaaacaggggctgcggaggcctccagctgactggcagtttctctggaccctggtggtgccatgtggctgaggtcagcgtattctttttagcttatggagtctccttttaccacagaagtaaagggagagatgtcacctccactggtccccttctagggactaatcaagttatgctcagtccctaggctgcgtgctatatgccatgatgtttggggaaggcccttatgacatggtgttccaaaagggtgacagtgtggcccttgctgtgcagaaccaactcagcatcccacaaagccccaggtgagtgagcaacgaatagggcatcaagtgtttcagactcccccctggtattagctgagttgacagataggtgtcatccggtcaccctgggctcctccctccacaggcattcttcagcattgcggcagctcctgaactcgatgatgaccgtggacccgcatcagcgtcctcacattcctctcctcctcagtcagctggaggcgctgcagcccccagctcctggccaacatactacccaaatctgaaaaagcagcatgttgagaagatggccccttgtgccttggaaagaggttcccatccctcattggaatcaccacccattccatccaggacttctcttacacttgggggtagcggggtcaggacaatcatctcagtcctgcatcttttcttctgctttcttccctccaagagcaaaacctgggcaaggggacttactgagtgggggtgggtgggggttgggaaaagggaaactggtgggatatggaacatggctctgagcaggactgttgagctcacatagtgttctgactccaaatctgggagcaggagaatgtgtaaacaagaataaagtggaagcaggttggtgtagatcttagtctcagtgttcctggagtgagagaagaggtgcaaggggcccaaagtcaggttgccatttcaggcgaactgcctgggaaggaggaatggtgcagagtcggcaatggtgtgacttcattctacaggaggttggttagcagtggacagttctagcttgtcttagatcaaaacttaaagctgcttgggctcaagctggcatctgcctgtgtcaagaactagggccccctaaaaacactcaactagttctttccttccttcactcctggggtgagtagcttagtcaaagctgcctagccggtttgctaggcaagggcctctgggtggagacacctgaggaagctttgagacaggtagattacaggtctcccatcctcagcctaggggcgaggggagtggaggtggcagcggcagctgttttggcctgtgtctccctgatcgttcaagctcatacatggttaatgattaatgaggcagtgtggtgtggcagtatccagctgccacttcctgcctactctgctgagtaaacaggggccctgtcttagctgggcttcaaacctgttccctagggaagggctctgttccctgaatcaccagggaggaaaggcaagggcagggttggcatctcctgctcttttgtgatccaagcctcctcccccgaaccatgtctaccccacagtatgacatcagcatggggcctggggctcctgttagcaaagttgaagctttccccagggccctagcaggagtctcccactagctagcacagaggctgaggccagaaagaaatcacaaacagaggggagatgacctgacttttaatggcacagccccagctccagcaaagcagcaagacaggaagctatgcaaagctgctcagaggtgcagtggcacaaacaactctaggagatcgcctgtgttccctcccatcccccaagcttatgacgtggctccatgcccaggaactctgggccagcccagccccactcccaaaccctcataatgcacagaggagcctgggccaagccttgcttccagagttggtaaatktagaggcagcaggaagaacagggtagcagtctaactttcaaagacagaaaccactggattatactcctacttggaaaggagctgaagactcatccttcaacagtttgtgcctggattttggtcctcatttcctccctatactgagtaaccctaggacttcaatttaargtccctggggttatgcttcctgggcctggcaagaacccctttgcaggtctcaccttcagcgatggaagggataagggtcatgaacagcaaacagagcagcagcagcatgaaggggaaggcagcagaagctcaagcactcagagggaacaagaaaccgtgcaaggaaactgtttatttcgaaaggattttgcaataaacatagtgaataggctccaggcagctgctttattcttctccctcatcytcgtcctcataggagtcgatgcccacctcctcataatccttctcmagggcagccatatcctcacgggcctcggagaactcaccctcctccatgccctcacccacataccagtgcacaaacgccctcttggcatacatcaggtcgaacttgtggtccaggcgggcccaggcctcggcgatggcggtcgtgttgctcagcatgcacacggcacgctgcaccttggccaggtcacccccaggcaccacagtgggaggctggtagttgataccaaccttgaagcctgtggggcaccagtccacaaactgaatgctgcgcttggtcttgatggcggcaatggcagcgttgacatccttgggcaccacatctccacggtacagcaggcagcaggccatgtacttgccgtgccggggatcacactttaccatctggttggcaggctcaaagcaggcattggtgatctctgccaccgacagctgctcgtggtatgccttttctgcagagatgactggtgcataggtggccagggggaagtggatgcgagggtagggcaccaggttggtctggaactctgtcaggtccacattgagggccccgtcaaagcgcagagaagctgtgatggaggagacaatttggctaatgaggcgattgaggttggtgtaggttgggcgctcgatgtctaggttgcggcggcagatgtcatagattgcttcgttgtccaccatgaaggcacagtctgagtgctccagggtggtgtgggtggtcaggatagagttgtagggctcgaccacggctgtagacacctggggggctgggtagatggagaattccagcttggatttcttgccatagtcaacagagagccgctccatcaggagtgaggtgaagccagagccagtgcccccaccaaagctgtggaacaccaggaagccctgaagtcctgtgcactggtcagactgaaaggcaagaacgagaaagaacagtttaggtaggggaggggcctgagggactctatcacctggctccataaagcgtaagatacatcagcagtcagggcaaatactgaggatgccatagcagcaccacactcgagaccatgtatagttagagatgacctcctgaaaggatctgaaaaaaaatattcctgaccattagcacagtctcaaaagttccctccctcccaagacacactctcaccagcttgcggatccgatccagcactgggtcaatgatctccttgccaatggtatagtgaccacgggcatagttgttggcagcatcctctttcccagtgatgagctgctctgggtggaagagctgtcggtatgggccatttcggatctcatctggaagggcaaaaaccacaaagctatgctcagcagggaccttcctcccccagggtggtagctgtggccagatkcatggaaggactcatcctcctgccagcctgagataccagagtgtgagagaaacccagaccagctgcccaggccagtctcagatcagcttgccttctgcagcttcaagtacggctaggaattttcagggctaggaatgcctggtctaaataccctctctctccagggagaagctttgagtcatgctccacccccttcaattttgtccccacttcctctcaccaatgaccgtaggctccagatccacaaaaactgcccggggtacgtgttttccagcaccagtttcacagaagaaggtggtgaaggagtcgtcccctccaccaatggtcttgtcactgggcatctgcccatcaggctgaatcccatgttccaagcaatagagctcccagcaggcattgcccatctggacacctgcctgccccacgtggactgagatgcattcacgctgagggatagagagaggggacacagcatgagccccacatccacaagtcctcaccttgcgagtctctcttccaccctatcatctaccagctrggatgactcagttggcaagagtggagggttggggctgggcagaggtgagaagagagtagcagcctgcccgggctcccaggtacaggactccccacctggaggcacccagcaatgcaggccaacctcttagcccacttctcagtggggaatctgtcaagtgagcactgtggctccacatgacaaaaggtttcctagaggtatgggtttacagctagaggccccccccccacttgattaattatttgctttgagtatgaacagctagaattcatagaaccctttccctctktcttycctgtaagctgcagaggtgtctcagccatccaatctggcatcaactgaccacacgccatcaggatgccctcctccctcacctttaaatcycatctggctctggggatcaatcccatctgrctcctctccccacctccacccccgcaccctgggtgtcttcaccactttcatctcccgtgtcagcccgmacggaaatagcggcggtaatgcttgtaagctcagacagcaggggccagcaataaggtttgagggtactggggcgctcactgccttaggctccgtccctgtcagcccgaaattaacccctaaagcactaaagtccggcagggcccgcgcgctcttcccacaccgaaatggcggggtgacggtttccaaatacccagaaaggaagtggaacctgcggtgaggccccagaggtgacccgccttgtcccgggcaggatgggcgccatcctgcagcccagccctacatccgctctccctctggagtctttacagttatttcccagcccaaagcggggattgggtttcggcccccgctcctgggctataaataccaccccctacatgcacctctctcccctccccccaacctggcctcggcccgcgcagtgctcagcgccagctgtctctgcccatccgcgcacccgggcttcggctggagagggccagctcgcttcaggaggccgaaccccgttcccaccaaccctctcagctcagacgcggggtgctgagtcacggggggggggtggttctgtggatagttggaatgcatacacagaggaaagggggatgcggcaccaggtaacctgaccccttccaccttctagcgccaagcacgtgctcggtcagtgctgaggaccagggactggggatgtaagagggcagccaaacccgtcttcttttgcccgcggaaaggacggggcgcgggcccgcgtgactctcatacagagtcgggacacaaatgctcgtaaggcaggagcagagtgccaggaagggttcctctctgttactgaagagtcgcactccaccccaagccccaaccccagccaccgaaggtgaactatacggctcggccaaagtcaccaggagggggttggggagggaggatgcaaaaccctcgcacctcctggagacccggaacgcccggtggaggtccccgagcatgcctggaagaagtgtcccccaaaggasaggggcaattaggggacaggcgcgaccccggccgggccgcactcaccatggtgagtccgggcggtgcgtctcacgttgagtcggggtgacaggtctcagtgagaactgcgctagctgcagtgccgcaccgcccttataggcggggggggggcggggcccgcgttccccgctcgcccactagaggctgggcggcccgcaggccacgcctcccgggagggtaagcggcccccccgaggggcggagcctggcckggtaccctccccaagctgcgcgggggtccctcacctgtcccgctgggattaagagtcgcgattcgggctttaaccattctttcctcgttttgagcagacacgctgggctcccgagggcctccgcggagatgcagggtgctgtggcagggcgagtctcacctgcacctgcgtcctggaggcaccggtcatccakgtgttctgacttaggtcgggagcaggcgaggcggtccttcccaagcggccacagctggccttcacccctgcccttccagccctgcctcccaggagactcgggccggctgtgaggctgtggcgcgtccccggggagcccttgccagctgcctgacgcttcctggtccccggccggggcggcagcctttcgccgacgcctgtgggcggccgaggacccagaactgcacagcctgagccccagattgccaatgccttaggcgctcccgcagagtcgagccccgcagcctgtctgccggggccgaccccggaatctgccgcggctcgccggccgcccgcgggtcagtggcgctgtcatcagcgcagtcactatgatgccctcgctgmgggcacctgcccactcccctgctgccagaactgcgggagcgctgaccgggggacctcaggacctggattctcctccaggctaccctgtgtgaccttgagcaagtgacttaacctcactgagtccttgacattttcgtgggtgaaaaggagacagtgatgtcatagtggaaacattgttgtaagctatcaaaatgtctgttgcctctgaagagaaaagaagaaaatcgagattctcatatcttggatgattctgactcttggtctcttctgtctctaacccaagagcaggatctgcaacccgcaccttaatggtctcagcactcagcccctggtctccgcagaagcccttctttctacatttcattccgttctctccaccccatcttttcaagctacttctgctttctctttctctctctctctctctcttttgagtcagtgtcttgctgtgtcacccaggctagagtgcagtggtgcaatctcagctcattgcaacctccatctcccggctcaaggccatccttctacctcatccttccacctcagcctcctcagtagctgagaccacaggcgtgcaccaccaccatgcccagcttattttatttatttatctatttttgagatggagtttcgctcttgttgcccaggctggagtgcaatggcacgatttcggctcacctcaacacctgcctcgcgggttctagcgattctcctgcctcagcctctggagtagctgggattacaggcatggatgcctggatgatttttgtatttttagtagagacggggtttcaccatgttggtcaggctggtctccaactcctgaccttagatgatccacctgcttcagcctcccaaagtgctgggattacaggtgtgagcccccacacccggccttattttttgtatttttagtagagacaaggtctcgccatattgtccagatttgtcttgaactcctgagctcaagcgatccacccgcctcaacctcccaaagtgctgggattacaggcctgagcaaccaccccagcctgccttgcattttctaattgtctcccttcactggggaaagtcatctggcagtgccccaggtgctgctggtttgcagatcttaagaaacctgtcttcctggctctacatcacttggaaaggattcacccctccctcccccatcacctgacaacacaacataataccatgaaagaactagtgatggcaactctctatcaacaaaataggcaaggcatggaaaggaatatagtgaaatatgacaaggtctttcttcccagtagacttgccatctgattgggagaacaagactcattcataaaaagaaaactgacaggggcgtataatgaggcttctttggggaataaggtcatggtccctacaaagaaaggagccgtggtgactataggacacatggcagtaggttgcagaccctccctgaacctctttttccttgtgctctcctatcctagcagaatgaacatagtaagagacttgagctatcttaggaaaaactctaaacctctttgaccttcaggtgcagattcttcatttgtaaaaccgggataacaacttcagattgtgaatatcagatgaatttagagatgtacatattcacatcaaggcactgtgtaagtagctgtgacatttattttagtgcatatagcacatcatgctatagttatttgtgtacatgtccatcttaatattatagatagcaaactattggaggtaaggactgtgtcttattcatctttgtttctagctcctagcatagtgcttagcacacctggtaagcatttgctaagtgtgtgtcagaagaattgtttcacttcagagatggtaggcagaagaatgctaccccataaagatgtccacatcctcatctccaggacctgtgactgttaccttacatggcaaaatactttgaagatgttattaaggtaaagatcttgagatagggagatgatcctggattatcccaggtaggcccagtgtaatttcaagggtccttataagtgaaagaaggaggcaggagggtcagagtcaaagaagaggtcagacctggtgcagtggctcatgccagtaatcccaacactttaggaggctgaggtgggaggatcacttgaggtcggcagtttgagaccagcttgggcaacatagtgagaccctgtctctaccaaaaaataaaaattataaaataaagaagaggtcaaaagtaagtagaggtcagaatgatgtgattgttggctttgaagagggataggggccatgagtaaaagaatatgggcagcctctagaagatggaaaagtcgaggaatagattctcccctagaatttccagaaggaaggcaacctggccaacaccttcatttcagttctgtaagacccattttggcttttttttttttttttttttttaagatggagtctcactgttgcccaggctggagtacagtggcgcgatctcggctcactgcaagctccacctcccgggttcaagcaattctcctgcctcagcctcccgagtagctgggactacaggcatgtcccaccactcctggctaattttgtatttttagtagagatggggtttcacagtgttagccaggatggtctcgatctcctgacctcgtgatccacccacctcagcctcccaaaatgctgggactacaggtgtgagccactgcgcccagcctttttttttttttttttttttgaggcaggatcttggccgggcatgtaattccagcactttgggaggccgaggcaggtggatcacgaggtcagaagttcaagaccagcctgaccaacatagtgaaaccccgtctctaccaaaaatacaaaaaattagccaggtatggtggtgtgcacctgtaatcccagctactcaggaggctgaggcaggagaatcgtgtgaacctgggaggcagatgttgcagtgagccaagattgcaccattgcactccagcctgggcaatagtgagagacactgtctcaaaaaaaaaaaaaaaaaaaaaaaaagagacaggaagacaggatcttgctctcttgcccaggctggattgcagtgctgaggcaggagaatcgcttgaaccagggaggcagaagttgtggtgagccaagattgtgccattgcactccagcctgggcaacaagagcgaaactgtctcaaaaaaaatatatatatatacacacactatatatatatattttatagatatggggtcttgctgtgttgcccaagctggtctagagctcctagccataagctcttctcctgccttggcctcccaaactgctgagattacaggcatgagtcacctggcccattttgggtgtttttttttttttttttttttttgagacagtctctctgtgtcacccaggctggagtgcagtagtgtgatctcagctcacagtgcaatgcaacctccacctaccaggttcaagcgattctgctgcctcaaagtcccgagtagctgggattacaggtgcgcagcatgcctggctaatttttgtagttttagtagagataggatttcaccatgttggacaggctggtctcgaactcctgacctcaggtaatccacctgccttggcctctcaaagtgctaggattacaggcatgtgccaccatacctggcctcattttgtttgttttgttttgttttgtgtttgtttttgtttttgtttgacacaaggtctggctctatcacccaggctggagtgcagtgacgcaatcttggctcgctgcaacctccacctcccggcctctagccatccttccaccacagtctcctgagtagttgggactacaggtgtgcaccaccacgcctggctagttttttttttttttgtattattagtagagatggggtttcaccatgttgcccaggctggtcttgaactcgtgagctcaagtgatctgcctgcctcagcctccctgagtgctgggattacaggcatgattcaccatgcccagcccacctggctcattttggacttctgaactccagccctggcagataacaaatgtgtgttgttttaagctatgatttttattacaatttgttacagtaacagtaggaaaataatacgacaacaatagaggtatgtggaagctaccatcttaagatgggcaacaagctccctccagttcgccacagtcctcatcactctctgtgtctccctgacacagaacacaagtgtctgttgtcatttaacttcatacgatcagcccacgttacacatttatgataccctggccactgtagctaagagtttataatccttgagcacgctttctagctgacaaaatggagaagacatgggtgcaggaagaaatgcccaagatggccgggagcagtggctccctcctgtaaatcctagcactctgggaggccgaggcaggcggattgtgaggtcaggagtttgagaccagcctgaccaacatggtgaaacctcgtctctactaaaaataataaataaataaataaataaataaataaataaataaataaataaattatccgggcatggtggcaggcacctgaaatcccagctactcaggagctgaggcaggagaatcgcttgaaccttggcggcagaggttgtagtgagccgagaatgcgccactgcactccagcctgggcaataacagcaagactctgtctaaaaaaaaaaaaaaaaaaaaaagaaatgcccaaggcatgttagtgaaatacagattctgcttctgattgtgtgtgtgtgtgtttgtgtgtgtgtgtatgtcctcaggatgtatacagatccccagaattagggccataaactctgggtgagtatgcaggtaatggtccattttaccagatcaaaaacttttagacattcacagacatgtacagaatctagaaaatgctaccagatgttgaattacttttctaattcactctcccgttgaattaacttttcagtccatctacctatatgtgtactctccctctgggtctctctccctcttctcctttcccattatcatctccatcttttctgaccccttcccagggtctcacctttatcttggagcagggcagcaaggtactcaaagtttaaaatgtttgcactgactccatctgggagagatagagccacagccttagtgatgtgcatccttcagtttttccagactagagcatctcccagccatcctccttctcacagcactgcctttacaaatggggtagccctactcatcacatatccatgaattcacccctcaatactctccctgcagacttgactcacatgctccgctgagatgcttttgccaaggtctctagtggcctgcctcttgccaaatccaaaggccacacatctccatcttcatctttcttagccgctcacagcagcatttctcatggtcgattcttctttccttcttgaaattcttttttgttggttttgatgacagcaccggcttctagcttttgtcctggcccctccttcttggtggcctctgatagcttaattttaaatgatgttccccatagcccagtctcaggttctcttatttccttcatttatttttctccctgaaggagcaattgttgaagcttggtgatgaatatatgaggttttattatattatctctatttttaggtatatttttaataatattcatcataaaaagttattgtaacatttttggaattatttaaagagaattattaaaaaataattttggaattattttaaaactagagtatatacattcccatacaatagtgaaggaataggataaaaagaaatgaatgtcatatatatgctgacgactcaaatttatatctccatttctgacctctcctctgaacttcagattcatatgactaattgctttcttgacatctccacttgaaagcccatgagacatctcaaacataacacagtcaccatggaactgttttctaccctcaccccactccctgccaaacctgcttctgttctaggcttcccagtctgagtgatcatcttccttccaagtgcttgagttaaaatcttaggattggccgggcacggtggctcacgcctgtaatcccagcactttggaaggccaaggtggcggatcacctgaggtcaggagtttgagaccagcctgaccaacatggtgaaacgccgtctctactaaaaatacaaaaattagctgggcttggtggcgggcacctgtaatcccagctgctcgggaggctgaggcagaagaatcatttgaaggaggcgaaggttgcagtgagccaagatcgcaccatcgcactccagcctgggggacaagagcgagacttcatctaaaaaaataaataaataaataaataaataaaatctttattttaggatcactttcctctctctctctctctctcctctccctcttttaagttagaattttttggctgcaaataatggaaaacctaacttatcaatggcttgaacaatgagggcatgtattatcccacaagaaatctgagtatagggtctttccagggttgattcagtcatgtcaccaataactccagtgtttctagctttctgcgctgtcatcctcaaagagcgggtgacatcttccctcaggaacacaagatacagcagctctaagtatcatgtccttatatgactctgtcttaaggcaggaaatggggggcttcctcccacatctgtttttatcaggagaaaaacctttccttgaagcgccctagcagacttcccccttctatctcactagcttttgcctaaaccagtcactggagggagggagttaaatggccatggatggtttggactaacctgtacacacccctaggtctgggggaaagctgtcttcctcaagcaagtgcaagggtgaatactcaaataaaatcaggaccttgctagtgaagaattgggcaggggcaggcaaggctgttgagaagctctgccaccacctacactagtatgtccttcactttactgccaacccagctacttctcaccaccccctactaccatcccgttattcctagatgccttcagcagcctctgaaccagcttcctgcctctaggcttgaaaccctaatgcagtctccacacagcagctgcagtcatctctctgaaacacaagctaggcaatgacgcttgtttcaaaccctcctgttacacttatataaaagccattctccttccaaggcccctccacctctatgatctcatcttgtagagctctctcctttcctcactctgggtttttggacacactgggctagttcctrcctatgattgtttgcacttattattctgtctgtctggagaactggtttccagatcttgcctcgctgactcctcaccattcagccctcagttcaagtgtcaccttctggccgggtgtagtggctcacgcctgtaatcccagcactttgtgaggccgaggcgggcggatcatgaggtcaggagatcgagaccatcctggttaacatggtgaaaccccatctctactaaaaatacaaaaaattagcctggcgtggtggtgggcgcctgtagtcccagcaactcgggaggctgaagcaggagaatggcgtgaacccaggaggcagagcttgcagtgagctgagatcgtgccactgcactccatccagcctgggcgacagagcgagactcgagactctgtctcaaaaacaaaacaaaacaaaacaaaacaaatatcaccttcttatagagtggcttctgttcagtctaaaatagcagcccctgcatatctttctgttccattatccagccttgttttcttcacatgcttattgctatctggaatgttcttgtttgtttattgtctgtcttccccatgaaaatgaaagctccattttatttctttttgagacagggtcttactgtgtcacccaggctggagtgcaagtggcatgatcacggctcactgcaaccttgacctcctgcgctcaagtgagcctccctcctcagcctcycaagtagctggggccacaggcatgtgccaccacacccagctaattaaaaaaaaawttttttttttgtggaggcagagtcgcattatgttgcccaggctagaatgtaagcttcttaagagcataaacttgccaggcacagtggctcacacatgtaatcccagaactttgggaggccaaggtgggcagatcacctgaggtcaggagttcgagaccagcctgaccaacatgatgaaaccccgtctctactaaaaatacaaaaattagccaggcatggtggcatgcgcctgtaatcccagctacctgggaggctgagacaggagaattgcttgaacccgggaggcggaggtcgcagtgagccgagatagcaccactgcaccccagcctgggcaacaagagcaaaactccattccccaccccccaaaaaagcataaacttttgtgtttatcactgtatccctggcacctgaaatggtgcttggcatacagcaagcactcaatatttgttgaagaaattaagagtattcatggcctcttatgttttaatctagatgcattaaaatgctttaaaaatctcagtcttggccgggcacagtgcctcacacctataatcccaacactttgggaggccaaggcagatggatcatctgaggtcaggagtttgaaaccagcctggcgaacatggtgaaacactgtctctactaaaaacacaaaaattagcggggtgtgttggtgcatgcctgtagtcctaggtactcgggaggctgaggcaggagaattgcctgaacccaggaggaggaggttacagtgagccaagatcacaaaactcagtcttttcattctgctttacataagacagctgactgccattaggatagttttctttttggagttggtgatacctaggttgactctgagagtccaactcccaaggccagttgggagaagtttcagtgctacacaagagagttttgagcccagtgggccctctgggccccatatcactccatctggacaataattcctgaggtccatggtttcatgggccaacccagtagaaggctgagctttcttatctttgatatgttaagtggctgggtctcttctttgggcctctttgttccaggtgggagacagaagagttctaaccttcagtctgtagccaaagccagagttaaccaacttgagatcattccctagcttactgggttgacagggtctctgaaaaagtcccctgtttcaactgcactatgtaacacagtggctgaaatttcacattagcaactacttcctggatagggttgctaaataaaatacttttatttgctaaatctggcagacctagtcctggttttggctgctatctggaagagggactgaactgtacaacagtccccccttacttacaaagatatgttgtagggcccccagcggatgcctgaaatggcggatagtactgaaccttatgtactgttttttcctatacatgcatacatatgaccaagtttaattcataaattaggcacagtaagaggttaagaacaayaataggccaggtgcagtggctcatggctgtaatcccagaactttgggaagtcaaggcaggcagatcacttgaggtcaggagttcgagaccagcttggccaacatggtgaaacaccatctctaataaaaatacaaaaattagctaggcgtggtggcatgtgcctgtaatccaagctactcaggaggctgaggtgggagaattgcttgaacccaagaggcagaggttgcagtgagctgagatcatgccactgcactccagcctgggtgacagagkgaggccctgtctcaaaaaaaaaaaaaaaaagaacaataatgatatagagaaataaagcaatgatagtaatatgccagcatcactgctyttgagcggtggggctgttatgaggtagaataagggttacatgagcagaagcatcgccacagtcgatctgataagggatccggctactcagtggctaatgggtaggtagtgtcaacagtgtggatacgctgcacacagggatgttctagacatgatggagtaggayggcactagatttcatcacactactcagaatggcgtgcartttaaaacgtatacattgtgtttttctggaaccttctctttaatattttcagactgtggttggctgcaggcaactgaaactgcagaaagtggctaatggggggctactgtggtgtgatttccaggcaacatgagggcccatttgaggctagtggccatgcgttcgaaacatcagtcagcatggttctggatttttctatggccactgtttagctgggtgagtgcagacacagagctggggacaaaacaaatttaaccagggttctggtttagtcaaacaaggatgttgaagctagtgggaggcaagacagttgaggggtacaaaagggagtgaccctggctggccatggaactgaagactgggaggaaggagataaagaccgaggaggggctgctgtgcacactctgccatgtggaaagaggggaagcagagcccgagtcccagataaatcttaattccagcaytaattaatccccatgtgacctcaggcaggacactagggatttcaatttcctttccttcatcctgggaaagggaggccctgccttgcctaccttacagagttgttgagggattcaaaggaggtacggagagaaggtgccttaagcataaagcagactaggcgcaggggctcatgcctgtaatcccagcactttgggaggctgaggcaggtggatcatctgaggccaggagtttgagaccagcctggccaacatggtgaaaccgtgtctctactaaaaatataaaaattagccaggcctggtggcaggtgtctgtaatcccagctactcaggaggctgaggcaggagaatcgctcgaaccccggaggtggaggttgcagtgagctgagattgcaccactgcactccagcctgggcaacagagcaagactccttctcaaaagaaaaaaaaaaagatgcataaagcaggatacaaatgctagagactagcctttttatttcagaattttgcctaagactatcgggagactccttttctggggacataaggccaggctagagcagcagtgacttgccatggcctaggaagagacatttaggaagtgccttgaggccctgctcatcctcttgctttgcccttggagagcaacagctgttttggactaagcacttaagaaaggttaccttgttagtacctcgtaatactacctctccccattctccagagagagaraaaaaaagaagttttaattgctagtagctattagaggtgggattaaaaccaagctctaggtcgcttgttctatgatattctgagtttccaggcaggatgtcctgaggcttgatctcttggccgaggactcattatttctggatcattgcagagatcttcttagtcccacccacagtcgacttacagccctcagcaaccctagggcaggggagtgcaggggtttgatgggtgggggcggtgctggagctcagggtcttgatttctaaatcatcttccacctgtgaagtgcaggctgtgccaccaggaaatgggattgcgtgactgacaacagataccatgtacccagaggcctggatacctgtgtggagttactagccctggcccctcctctgcccacctcagctggctcccctgtttgggtgcaggcccagagcttgcctcgtactctgtgaccaagtcaacaggccctgccctcccaggccgtttctaacaacatccacctgctgagagccacccagcgagtataaggaggaggctggctggccgctgcaggcctctcacagatctatccctgctcactatcctgcagcagacagagagacaagaccccagccagcccctgtccaggcagcatggtgagtagaaggggccttggggggactgagcatgcaagtgagggtcccagtgggcccaagatatctggcgtgaaggtaccttgggagtccacatggtgatggggctacagtatgtggcgaggtggggagagggaaagagacttccagatgtggctgtggcccccaaatgtgcaggtgtggggggcatcacagggggtagggaaggaaagtttaatggtaaccaggttgtggggctgagcctaggctgagaagcagggctgctgagggggtctgaatttaggtgtggggagtgtgggggaagcaggacttgagcagaaagtgtaggcgatttcctctgctggctgaggatctccagaccctgggccttgccacaggttcactgttgggctctgatcccaccttcccaccatggggacacatcctccatggaagcttctcccctctggttcctccctccaccctgcccatctgctgtgcctttgtctgacctctcatgtcagttacagatcagtggggagaagaaggaggagggaaaagggggtgctcccatctgtcaagagctggctgtgcctggggcttatttgatatcttttacccacctccctaccaggcaggatagaagaacagttaagagcatggttggtgccaggccatccctgctctaaatattcttggttttgctcatggccttgagcaagctacttgacttctctgagggtcggtttcctcatctataaattgggggtaataaaactacctacctaaggtgaatgtggtaaagattaaatgagataatgtgtataaagtgccaccttcacctggcaccttattagtgcttaataagcagaactaagcaatgtaacaacacaggccgccggctatgagattcttctctttctacagtcatgaaaaaggtgctagggaagctgaggtgaaatgacttgtattggatcacagagagatgggggtttgaggccaggtctgtgtgactccagaggctgagttcttttttttgtttttttttttttgagacggagtctcattctggagtgcagtggcgcaatctcggctcactgcaacctctgcctcccgggttcaagcgattctcctgcctcagccacccaagtagctgggactacaggcgcttgccaccacatctggctaatttttgtattttgagtagagacaaggtttcactatgttggccaggatggtctcaatcgcctgaccttgtgatctgcccacctcggcctcctaaagtgttgggattacaggcgtgagccactgcacccggccaggggctgagttctttgccccaaaactgctgcctccagtgtgagacatcattcccagaggggccagagacaccttgcatgggctagtagttctgggggccaggacgatgtctgggtctgtggacagaactggctggtcaggctcagaggtgcagcaccaggcaggtgattggtgagccaaggcagccccaggattggacctgggatttctcctgtccttgaggtctcagctcaactcattatcyttttttttttttttttttttgagatggagtctcactctgttgccctggctggagtgcagtgatgcaatctcggctcactgcaacctccaccttctgggttcaagcaattctcctgcctcagcctcccgagtagctgggattataagcatacaccatttttgtatttttagtggagagggggtttcaccatgttggtcaggatggtctcgagctcctgacctcaagtgatccacctgccttggcctcccaaagtgctgggattacaggcttgagccactgcgcccagcctcaattcattaccttctcttactatgacatcagggattgagggtgggaaattggaaggggaacccaacatgcatggcacaccctagtgtgtgttaggcagtgggccaggcactttgcatgcattctttcatttaattctcatagtttttctaggaggggctcttattattgtctacatttcaaaaggagaacattgacaaagaggttaagatttttgctcaagacaagtagagaagtaattgggctggaatacagattatttatggattaatctcagtcatctaaaaatcatgaaaagtcaggcctttgtgttatataaaaatagtcaatgaagtgttacatttttggagaagtcatcctcattaaacaattaagaaatatttcaggaatgcaaaaaggtataaataataacatgataggctgggcggcggtggctcatgcctgtaatcccagtactttgggaagccaaggcaggtagactgcttgaccccaggagtttaagacccacttgggaaagatggcgagacctgtctctacaaaaaaatttaaaacttagccaggcatggtggtgcatgcctgtagtcccagctactcgggaggctgagacaggaggatcccttgagcccaggagtccaagactgctgtagttaactatgatcacatcactgtactctagcctgggtgacaaagtgagattctgtctcaagaaaaaaagaaaagaataatgtgatgaacagcagctatcaagcttgagaaatagaatctgtctccaattgcatctatctgcttcccctgccagagagcaccattattccaaatttggagttaatgtctcctgtgctttatctttgtactattttcccttgcttccctcaccaatggctcctaatttcyttctggacactggtgggtagattatcttgcacttctagattcattcgattccttcaatgttgctcattgagacaggcactgagcaagagtctataatctcaggactgcccgcatcttctgcttcccccaatgattttggcccagcccctacagccgatgcctgttgctcctcagtgccaccagtaaatgcttagatgcaggaggcgaggcaagcagagtagagtccaggaaccttggccctcagccaaagagccactcaaggaaggcaggcaggaaccatgtccaggcatgatatgtttccctctgtgaaggccgttctctgccctttgcccactcagtgtgagtgcatctcagtccacgtggggcaggccggtgtgcagttggcaatgcctgctgggagctctactgcctggaacataggattcagtctgatgggcagatgcccagtgacaagaccatcaggggaggggatgactccttcaacaccttttttagtgaaactggggctgggaaacatgtgccccaggcggtgtttgtggatctggagcccgctgtgatgatcagtcccagccacaaccttgtccctgggtaccacagcaagtcctactccataactgcagagcatggtgtctgtggtatagcttcccaggtgctgcagccaattagaactccacatgtacagaatcactgttactcagctcctgagtctgtaggccactccacatccctttccttattgaaaaacacatccaagcagcacaaacacatccaagcaggtaatagcagcagcctgaatgcagaacctgggacccggtgaccccactcccttcaggtcccctggggctccagcagctggattgcaaagggaggtggggcccaaaactctgcccactgcagatgaactttgaacaggcacataccgccagatcttccatccagagcagctcatcacaggcaaggaagatgctgccaataactatgcctggggccactacaccattgggaaggagttcatcgacctgctactggaccggattcggaagctggtgaggaaaggactgagggctggggcagggggaatgaatctggattcctgttgtgaggtagtctggacaccagattggggaaggacagcttcagcctctgggagaaacacacaggatcaggaccaatgaggagaggccctgcactctgatyggggggccaactgtaggttccagcctggagctggtgtcccctgtatctccgaagtggctggcctgatgctaggcagggtgtccattaaggcaaacatgttgatgggctgcctggccaagctgtggggttccataagcgttcccagaataccaccttgtgttacaaggatgtgggcagaagtccctgtgaaaggcagggattcaaagaatgtcagcccaaagcctctgtgattggctttggcttctacgaaggatggggatgaggttcctggattgttgttcttagtagagaaaccctctagaaacatccaaagttaaatcagcggggcatgggtgtgatggtgggtggagttggcaagttatgacgacaagatgagggagccctggagtcctgtgcactggtcagcctagacagccaactccacccaccatcatacccctcttttccagcatacaacagagctctgtgttaagggcctcaggagatttcagaggaagagggacagggaggagaaagggtgggccctggacccactctatgaggatctcttttgtgctcttggaaaagtcttccaaggagttcatgaaacttttgggaatttaaaacagcacaagttggttctttcctgtccatcagctgtgctccatgccccacatttcccctccccttccctgtctaggctgaccagtgcacaggacttcagggcttcctggtgttccacagccttggtcggggcactggctctgacgtcacctcattcctgatggagtggctttctgttaactatggcaagaaatccaagctggrattctccatctacccagccccccaggtgtctacagccatggtcmagccctacaactctatcctgaccacccacaccaccctggagcactcagactgtgccttcatggtggacaacaaagcaatctatgacatctgccrccgcaacctagacatcgagcrcccaacctacaccaacctcaatcgcctcattagccaaattgtctcctccatcacagcttctctgygctttgacggggccctcaatgtggacctgacagagttccagaccaacctggtgtcctacctcrcatccacttccccctggccacctatgcaccagtcatctctgcagaaaargtataccaygagcagctgtyggtggcagagattaccaatgcctgctttgagcctgccaaccagatggtgaagtgtgatccccggcacggcaagtacatggcctgctgcctgctataccatggagatgtggtgcccaaggatgtcaacgctgccattgctgccatcaagaccaagtgcagcattcagtttgtggactggtgccccacaggctttaaggttgatatcaatcaccagcctcccactgtggtgcctgggagtgacctggtaaagtgcaacgtgccatgtgcatgctgagcaacatgacagccatcactatggcctgggcccgcctggaccacaagtttgacctgatgtatgccaagagggcgtttgggcactgatatgtgggtgagggcatggaggagggtgagttctccaaggcccatgaggatatgactgccctggagaaggattacaaggaggtgggcatggatagtgtggagtgkggggaagaaaagataggggggatgaatactaggggaatactgtgtgtctgtcctacataaagtgctgtggccttattgtctcacgaatgtctttttctctgggggaaaaccatggggggagggcttcttctccatgagagataggaacgctggtgtcttagcctctattccccagaaagcagatctgattttagatttcattatagagtgcaattacagcaaatagaatgggggccaagggaagtaaggcacagaaggaggaaaaattcaccctagagaaaatgcagctgaataaatggcatctcagaaccatccttgggtgagtgggcaggtgagggctgggggtggggtttatgcactggctctattcttccactagttaaacttttgccccatcaagcattaattcccctgcactggtggattgcacacacttgggctgtagagtcatcaggaaaccctgggcgaggaggaggtgctattaagttgcacatatgtgaagtcagtggaaccccacatggagctgcaacaagagcccggtgaggccaggaggatccgaagtgatccttaaagtaatctagtgcccactagcccatcctgcgatctggaggcttgtcttctccaggcaggaggttggggtaatagagagccctgacactggagttggttgaggcagaagagtggtgcagtggctgccacacagggagaatggcttgtaagggtaggaggcttacctcccagtaatctctgtcaacactcaccacttttttttttttttttgatggagttttgctcttgttgtccaggctggagtgcaatggcacgatctcggctcactgcaacccccgcctcctgggttcaagctattctcctgcctcagcctcccaagtagctgagattacaggcatgcaccaccaggcctggctaattttatgtttttagtcgagacagggtttcaccatgttggtcargctggtctccaactcctgaccttgggtgatccaccagcctcagcctcccaaagtgctgggattacaggggtgagtcaccatgcccagccctgacactcaccactttttgataaagacagttgaccttttaacagtcctgtggcatcatgcacacacagcttcccacccccacttccaaacagatggcaaattttaaatcctgagactgagtgaggcaggagaatcgcttgagaccaggaggcagaatttgcagtgagctgagatagtgccactgtactccagcctaggtgacagagccagaytccatctcaaaaaaataaacataaataaataaaaaaatacaatacaataatatttttgtaaggacaggatctcactatgttgccctggctggtctcgaactcctgggctcaagtaattctcccaccttggcctcccaaagtgttgagattacaagcatgagccaccatgccttgctaaaagggctgacttttaaatctccatatatttgacttatgcgtctttccatcaactggtttcaaacttgggaagggaaaaggtgttactctgggagcccttcacaccccaagaaatagccgtcatttagtgagcatctactatgtgctaggtcctgtatccataagatcttgtttaattctgaggttaatacagttattacacccactggaacagaagctctcagacaggccttggactgtttttcattgttctactctcaacaccccagtgttgcccggcatattagatgattaacatttgttggatgaacttgttcaatgaacacctattttatagatgtggagactgagactcaaagactcgcccaaggtggtaaatggaggagttgggattcaaacccaggttagcctgcaccaaatcatatgttgctcccccacctttttcttaggtgccctcacttcctgctcacagtggttccaggcagccctccagacaccacctcttctcagcctgccaggtcccgagtgcccagacagtgactcaggtgcctcaggggcagggagtgggtgacgcttcacaatgccctgcccaggctctgggaaggagggcatcgatgtagaggggagagtcccagcttctgggtctgaatgggggtagaggcttctttggggccagattttggggctatcagtgccctttggaaaacatcccccaacatctcctaggaggtggtgagggcctgggagaggccaggattgggggtggggagggaggtgagctcttcacctgccaagacggctagggatcgagagaggcagctcgtctcccttcctgtctgctgaaccagccagcccaccctgggcagctatatagccatctccctgaggtcttcctgctagtaatactctgctggcaggccctggcaggcctgggttggactgggtatggctgtggagaggtggcaacccagacctcctgaggcagctaggagcaccacccagcctggctcctggggactccctcagtgcaggggaaatgctttcatccctgatgattctgagccaaagtacaattgcctccttcaggcagacaaaagagacaggtttccaagctcagattctacccaacaaatttattccctgggctctgatgtgtcaggaacacgcctggcttcaaagctgtgttgtcaccattctctccttctggaacgccacctccccctgcttgtctcaatgttgccattccttccagcttaggtcacagccatccagaacctacccagccccagggagctctccctcttctgaattctttcagcacctacctcggtctctatttttcatttggcacttggtgtgggctgccttgtatgatatcacttggcttcttgtcaatgtcttatttccccaactcaatttttaacaattagtatgaatttgaacagttattaggtgcatatgcttcagaattcaaaaagtatcagagagatttaggaacaagaaaaataagtctctttcattttgttcccctcttggcagccaccactgttaatgtttttgttagtgtttccttccagagatgtctacatatatataggttgaatatcccttatcggaaatgcttgggaacagaagtgtttaggatttcagattttttcagattttgaaatattcgcatatacataatgaaatatcttggggctgaaacccaagtctaaatacgaaatttacttatgtttcatatacacctgatacacattgcatgaagggaatgttgtataatgttttaaataatttttttgttttgttttgttttgttttttgagatggagtttcactattgttgcccaggctggagtgcaatagcgtgatcttggcttactgcacctccaccttccaagttcaagtgattctcctgcctcagcctcccaggtagctgggattacacgtgcctaccaccatgccagctaatttttgtatttttagtagagacagggtttcaccatgttggccaggctggtctcaaactcctgacctcaggtgatcctccagacttcaggtgatcctcccrcctcggcctcccaaagtgctgggattataggcctgagccattgagcccagcctatgttttaaataattttgtgcatgaaacagtttgtgtatataaggtcaggtatggaattttccacttgtggcatcatgtcaggtactcaaaaagttttgaatttttgaacatttcacattttgggtttttggagtagggatgctccatctgtactaccatgcttgtatgcacatttagtatacactttgttctacaccttgttttttcagttaataataaatctggaagatggtccatatgaatactgttagctatgcctcattctatttggtcacaatataatattccatcgtatagcataccaacacttgttttaccagtctgctattaacgggtatttagattgtttccaatcttttgctattaaaaagaatgctrcaacccttgtatgtattttttttgcacatatatatgaccatacattcttagaattgagatttctgggtcaaagattatgcattttaaatcttgctctctttaaaagtcacaccaggccgggcacggcggctcacgcctgcaatcccagctacttgggaggctgaggcaggagaactgcttgaacccgggaggcagaggttgccgtgagccaagattgcaccattgcactccagcctgggcaataagagtgaaactctgcctcaaaaaaaaaaaaaaaaaaaaagtcacatcaaattacccaccctcccactaccaatctataagaatgcctgtgccctcagccttgcccatacaatgtattcaacttttttcttttttttgtctttgtcaatcatccaataagtgaaacaaagtattttgttagggccatgtgcccgggtgcagtggctctggcctatagtcccagcactttgggaggctgaggcaggaggatcatctgaggccaggagtttgagaccagtctggccaacatggtgaaaccccatctctacaaaaaatacaaaaattagccaggggtggtggcacatgcctgtaatcccagctacttgggaggctgaggcaggggaattgcttgaacctgggaggttgcagtgagccaagatagtgccactgcactggagcctggatgacagagcaagactccatctcaaaaaacaaaaccccaaagtattttgttgtagctttattattattattcttttaaaaattattattatttgagatggagtttcactcttgttgcccaggctggagtgcaatggcacgatcttggctcactgcaacctccgcctcccgggttcaagtgattttcccgtctcagcctgccgagtagctgggattacaggcatgtgccaccacgcctggctactttttgtatttttggtagagacagggtttcaccatattggccaggctgatctgaaactcctgacctcaggtgatctacccgccttggcctcccaaagtgctgggattacaggcatgagccaccatgcctggcctgttgtagctttagtttacagtttttttgtgaatgagattgagcatcttttcatttgtttaaaagccagtatttcctcttctgtgagctgcctgtccctttgtccttttaaaaatgtcattgtctttcattagttggcatttctttgtggacaaaggaaattaaacctttgtctgctagatgtgctccatataatttccctcagttgtcatttgtctatgtcctatccccttgagcacagagattggaatttaaacttttttatattctttttcttaatataacaagacatacacggtaggtgctagacaaatgtctgttggcacagcagagtaagaagaaaaaggcagagatctggaaaatttggagtgacttaacccaaccactccttcctcttataccaagtctaacccttagtctttgtgtcagtcaggactcttataaacagcagaagctaactggcaaattgtttcaagtcccctgcccccaacaattatagagatatcggatagcacacagaatcaatgcaagggccagcaaacaagggtcagcaatcagacaggcacctagggaagctgggcagccagtaccacagtcaaggttgggcacaggacagcctgtgtaggagactcctgtcccctccaccctccgcagtgatcctcctactctcgtccctcacctgcggcagtagcgctgacacttcctcctccagacactagaggccgctgttggccccatcgcctccaccgccgccgcagaaatgaattcctaaaccagccttgctattccgtgacttgctccagattcaaagtcccagttggagcatccgattggcggagctcatgtcttctgcctgcaaccccagagccgagtcagggagagcaagcattggggctttgtggcaaatggtggcctgctttccattagggcccttgcgatgggaattccccaaatgtaggcaggaggttctgatggtgggcagccaggaaaccaggacactcacaccaccttcttctctcacgtccgcctcaaacccttctcgttggcgaagtattcctgggtcccccagcctaaagcacttttctggactcacataaccattattgcttgagccaatcacgatgccagcaggaccgcagtaacacctaattcgtaccatgtctcatttgactttcaaacaaccctaggcactacctatatttagtgagaaaaaaagagtgctcagagattttcccaagtctcacagtaatgccaggttgtactctgtttccaaagcctcgggtttcccagcgggctacactgatgggctggtatcttatcaagttcaagctctgcaaaggcagggcttgggccacattcttctttatacggcctggcagcatcttgaatgcagaaaaatgctcagctaacgcctttggattggcctggatgggatcaagcaggagccagttctggaaggtttcctaactctccaatgaggcctgaacccagggagcattttgaagtggaataggcctactcaggatcagtttgggaagacttgaacctggggaattccgttgtacggccccctttacctcacctcccccaaatgtgtcaaaactgtcaacaagaggtttgcaggtgttcattatttattcatcccacgggtagttttgaacccctacgactgctctaatagaccagtgagaaaaaacacacaattcctgtcctgtgaaatcgacattctagtgggggaggtgaatggtaataaaaaataatcaaaccaataaatgctaatttgtggctctaacaagcctgatgaaggaaatgccacgagatgctgtaaaaggcagttctgacctactcaggaaagccagggcagcctgctgggggacctggggctggagctgggagctgaagaagggggaggagttagaaccgtggtggggggagggagggaagagtctgagtcctcgaggtgggtgagtaagcatggatcatcgctcatgtttataagaaagtgacagaggaacctgggggccgagcggcttgtttgtgggctgccccagcctccgtgcgagcgcttctcgcttggatggaggcggggccgcagtctcccaggtcccagctggggctgacgtcgtcctggtgtgtgcccaaaatagccggctccgccctcttctcccggcagcccctgcaggcccccacccccccaggggacaggcggagccggccttctccccgtctctagtagtttccgcaccgctgacgcatgcctgcgcgcacagctgggccgggcgcgtcctacgcagcagccgcgagccgggctgcgggtgccagacggttcccggcggggggcaggggcggggcgccgcaggaggccgggactcctggcggaggaggtgcggccgggggcccgggtcaggctgggggccctggatcggactgctggagttggggggccccgatagggctcctgggcctgggcgtcgagatagctcttggccccggcctgcgggggcagataaggctgccggagggagcctagtcaccggccgcaagcagagcccggtgtgctccgcttccaactgggagcgccttccgccacccggggagggggactgctgcagccacagggtggggctcttggttctttccgcctgactccttctcttctgcagccccaaggaggcccgcctgacgactgaccagttgccatggcatcctactacgagatcctagacgtgccgcgaagtgcgtccgctgatgacatcaagaaggcgtaagtgcctccgtatgcaacagaagacctctcaccctccacccgccaccaccatggggcacttcagagtgacacctgtaggtgtctgagggaaccaggtcgttagaaagcactggggtgcttcttccgagtgacacctgcagggaggaaagagacccctggtagagtacaaggagaacgtccagagagtgaagtagttagttcctctgggagctgcactgtgttatgggttgttctccagttgatcttcccctcctcctcctcctcctcctcctttcccctcccctcccccttccccctagatttgggcattctcaggctgcagtgcaaagatgcagtgcaaagaggctctatgaggaggaggggccggtgtccctgtactcttcgaggccacatgtgccccaacctttgcagccccagtccagtgagccctagggaggggctagggaccctggcattgtatccgcttgtacatgtggtcccagcactggtggcggaggagagagggtggaacttgatgaaaatatcacagcagcggcagccctagcagctggggtggactgggacccgggggtgaaaggacagtgataggctaatgggaaaacaggtcgttcggttcctgggtgggaagtgcctgcatttgtcccccgactctctcctctgcatccactttctgcaggtatcggcgcaaggctctccagtggcacccagacaaaaacccagataataaagagtttgctgagaagaaatttaaggaggtggccgaggcatatgaagtgctgtctgacagtaagggccggggtcaggcaggacccagcacatcaccccctacttcatgccccagctcacattttcttaaagcaatgtctctgccacctagtttcctctgtgcctttttccagcctgacatttaagctcccccctcccacagggacagctcagtgtctgctccccagagtctggtaggagtggctggcatgagacctgaaaggggaaggaagcagggcaggtaactcatgtgagctgagcctcctgcgtgccaggcattggtgggtgtcatctccatgagttctcacagccgtcctatgaggcaggttctatcacccctattttacaggcaaggaaactgaggctgagagaggtgaagtaacttgctcaaggccacgcagagctggaatatgaatccaggtctgcctttttattgattcattcgaaaagtaattcagtgaatggtgacagtgtccggcactcgctgggtgctggggaaactggaggacaagcaggcactgtctttgcccagaggggcagggaagaccaacacctaccaggcacacacacagacacagttacagcttgtgaagagtattccgagggaagaaacagggcaggtggagtgctagggaataatgtgcacttgctttagttctggtggttgtagaaggcctctccgagaaggtgacatttaggctaagccctggtgaataataatgtagtaatcattagctaacatttattgaacactttctatgtgtcaggcactggtaggcagtttacgtggatggtctcatttgatctgtgcaacaaccctgtgcggtaggtgttgtgatgacagccattttccagatgagaagaggccagctgtgtgaaaggctgagttgctgcctaaacctatagcccgtgtcccctgggtcccctgctgtgcctgctttcccccgccaagtgtcagagtgtcagtctctggacaatcctttgaacgtcctagcctgggaggggagcccatcccagagggagggtgaaatgatctggtctctttttgcagagcacaagcgggagatttacgaccgctatggccgggaagggctgacagggacaggtaggtggagtggtgaggcccaggaatggaggtggggcagggaggagaggggcagggcagattcttgcaatggaggctctctcaggctcctggctgtgccttaggtgaggtcccccggctcagggcaggatgcatgccctaagctctctcctcatcctgcctttccaggaactggcccatctcgggcagaagctggcagtggtgggcctggcttcaccttcaccttccgcagccccgaggaggtcttccgggaattctttgggagtggagacccttttgcagagctctttggtgagtggactctggaagcctctgaatggctcaacttccccctccaggcctgtccttccatcagctgggaggccctgaggtggaaggctgagaggggacgggaatgccacggacagaagattttgtggagctgggtccagtgagagccgggacagaacctcacgtgtgccagaacccccgtaatccaacagtgacacttcacagactcaccttattaaattacaacaataatacattgttagacttctatagtaacagccatgaaagcaagactcaaagcatcttgtgacaatattgttattattacctataaaacagatagtggtattttttaatgatagatatgtgccaaatattttacatttcgtaagtctctagtgaaccctgacaggtgggcaattttctccccatttgcagatgagaaaactgaggcacagttaatagcccagagtcacataacacatggcagagctggactcctagctgtgtctgcctgtcatcgcgtcatgatgatttgcctgtactgaaagagccatctgtcctccatccctcttccccctccttccttcctttattctttattgtggacagaattaaccagtgagtgttttcgaattcaacattaaaaaggaatttataaataagcccaactaaaaagcggaaaagaaaaaccctacccagttgcttagtggtttatacttccagacttgggctcacacacttttgaggggaaatgtcattaccagatgactgctaatctgtttacttgttgcagatgacctgggccccttctcagagcttcagaaccggggttcccgacactcaggccccttctttaccttctcttcctccttccctgggcactccggtaagttctgccccttcccacgtttgcaagctccgattcctggaacccctggcttgagcttgttgcttttccaagcctgtctcctgtgttgggagccctgcctccagcagccctgcgaggcggcctggagcctcggtgaccacaacaggcagcgcagtcttcttctaaccacctctcctcctcctcccttgtcccgatgccagatttctcctcctcatctttctccttcagtcctggggctggtgcttttcgctctgtttctacatctaccacctttgtccaaggacgccgcatcaccacacgcaggtgagagctccttctggggccatagaggggtgagaggtctgctggggagctgtgttcaaatagaaagttggctccttgagggcagggcccagtctgcgctctctactgcggtggccagaactgggaccagcgcctgcaggattctgtcactgctcgttgcctgaactgtgctgtctcccacagaatcatggagaacgggcaggagcgggtggaagtggaggaggatgggcagctgaagtcagtcacaatcaatggtgaggagcagctcccctacccagcccctggcaggaagccccagccccaacctcagcagcctcctccccaaactgctgctctctgaactcacttagggcttgggagggagtggcaacaggccagactggtaggatcagagatggcaatgtcgggaagggggtgaaggagtctcacgaagccatcgccgtcactgtgagtggggtgccttacatttgcaaagcactttactatttttaaagcacttccagatatacgatatcctctgtattcttcaagcatctgggggagtacacagggcagatggtatccacttagttttaatttggggagcctgagctgcagcatagttaaatgaccctaacttccaagtagcccaggcccaagactctttccttccaagtaaggagtagagccaggagtcaaactcaggacgcacgattcccggagcagaactgcccctgcaacaccatgctgtgcagggccgtcaccacagctaacctttcacgcctgctgactcccagcactgcgtaccaagccctttacatgggctgacatatttaatcattggaacaatttgagtatgaaggcactatcatcattcccattttcttttttttctttttttgaaacagggtcgtgctcagcccagcacgattatggctcactacagcctcgacctcctcggctcaagcagtcctcccacttcagccccctgtgtagctgggactaca

SEQ ID NO: 97157 - DNA, 162510 bp, Homo sapiens
aaaagagtatcttttcagactggataaagaaaatgtggtacatatacaccatggaatactatgcagccatataaaagatgagatgtccattgcatgtccattggagggacatggatggagctggaggccattatccttagctaactcaggaacagaaaaccaaataccgcatgttctcacttataagtgggagctaaatgatgagaaaacatgaatacatagaggggaacaacacacactggggccttttggaggatggagggtgggaggagggagaggatcaggaaaaacaactaatggatactaggcttaatacctggctgatgaaacaatctggacacaaacccccatgacacaagtttacctatgtaacatacctgcatttgtacccctgaacttaaaatgtttaaaaagaagaagaaataaaactttttcagggcaaatttgtaaaaatagcaaaagaaataaagggcatccacattggaaaggaagaagtccaccaaaaaaactactaaaactgataaattcagtaagttgcaggatacaaaatcaacatacaaaaatcagtagcatttctatatgccaacagcatacaatctagagaagaaatcaagaaagtaaaaccatttacaatagctacaagtaaaataaaagattaacttatccacctgatgaagttgtagaattgttgagagggactcaggaaagtcaccttaaaggctctgtttgctttcccgctcttctttcttcctgctgcctgggaaatggatagttatgattggggttccaccagccatctgggaccatgagattgctttgaaaatggaagccagggctgagaatggagaagataaaataatagaaaggagcctgggtctctggtgactttgtggagctgttataacagttctggaataattaatctgtagactaattttactgcattttattgattcttaagatgcactatttatgtatcattaaaaaaacactgccaatcaaactcatacaatactttcttattgcatgaactgtgaagttattctgatctctgaaatgttaaagtgtggaaaaaaggtgtcttagaatcaataaaatatgttaaaggattaacccttctgttttaaagctatcattattttgagttttctcatacattatacacaacctattttcctagtttttaattttagactgagaacttcttgaggtttcttagtccactttcattagggagttcccattttaagtatattttgatgagttttgacaaatgcatgcacccatttgacttccaccatggtcaagatatagaacttttttgtcaccctttaatcccatcccagtcaattctccccaccccaaccctaagaaaccactgatctgttttctgtcattattggttagatttgtctttctctagagctttatataaatggaatcatccaatatttatgattctgtgtctggcttctttcactcagcatactgtttgagactcatccttgttgttttatatatcagtagtttcttctttttatttctgagtggtattctattataccactataatagaatacaaagaaaaatgtaccataatttctttaccctttcatttttttttttttttttgagatggagttttgctcttgctgcccaggctggagtgcaatggcatgatctccactcactgcaacctctgccccctgggttcaagtgattatcgtgcctcagcctcccaagtagctgggattacaggcatgtgccatcatgcccgggtaattctgtatttttagtagagatggggtttcaccatgttggtcaggctgatctggaaatcctgacttcaggtgatctgcccgcctcggcctcccaaagtgttgggattacaggcgtgagccaccgtgcccagctctttatcctttcaaaggtgatggatcttagggctgtttccagtttgaggctgttgtgaataaaagtgccatggatattcatatacacagggaatcattttgttcccctgtagtcatgggccagttctgttctctgttatacttagccctggttcgaagattcttataggtcttgctacctacctctaccttttgtctgcttgtttatagatactggttagttaaagctaaatctgtcctgagtagggattatcatgtttagccgttctgcttctatttccctctctaaacctgatcataaaagaagaattaaatatactggaatataacagtgggggacagtttctcagggcatagaaatgtggagaaataaataggacaacctcgaatagagtagggtagggtagggtagggtagggtggggtggggtggggtggggtggcgtggcgtggcgtggcgtggcgtggcgtggcgtggaatggaatggaatagaatagaatagaatagaatagaatagaatagaatagaatagaataggataggatagaatagaatagaataggatagaatagaatagaatagaataggctttctattctgtgagaggtagtgaggaaagaactctggctttggacccagtcaggtctgtcttcgaaatgggccatttattagcataagaatctaggtacattaatctcactgagcttcatatttttttcacctggaaaatgaatataacattcactttctgggatgtgaaaattaatttatccagacattaaatatgcattgagaatccacatgtgtcaggccctgtcctaggctctagggatacagcaatgagcgaaccagcaaaagtgcctgacttcatggagcttatggtctaatttagggcgatagactacaaaagtaaaaaaatcaaaatctatgttacattacatgctgataagtgcaatggagaaaaacaaagtaacgaagggggatagaaaagccccttcttggctgtgagttgcttgaaattaaagattgatctttctcctttatctctagcatttatcacagtgtcagctatactaagtgttgcatgaatgtttcttgagtgaaaggaatgactgaataaaaaccagtgttgaagagagaagtttatctcatgaaatcattgtaatactgcttacctggacattttttaaagcttccagataggtaattattatgtcagcaagaatggtgccctttacttctccttgttcttgctggattttaaagtgttctattcttaccactgttatattttttcttggaaatcagaatgcttttaatgtaccttctaaatgatatgtccttgattttaaaaaaacattaactacatgcacttttcaggctgttgctgagtaatatagaaaataatttgacaaatgattcagtatatcaatttttgtaataaggagaactgatattctatagtgtctggaaaactcgcatgtatatgctacaaataataaaatcatgctttagaacaatattcagtgtcaagggatagtgtgcttaacatgtagctaaatgggataaaaaaccagtatgcacagtgtcatacatataaaatacaacagactttgcatatgattgtggttttcttctttgtgctttcctatatattttatatcaaacctgtattattttgttaatcatctccccacattcctattaaaccgaatataaaatagggaaaatgtacatgtatgatagcttgatagattgaaatatttatttaaggtctgtaacatttagcaggcggcagggctgactagaagataaaagaattaatctggagcggccgggtgttgtggctcacgcctgtaatcccagcattttgggaggccgaggcgggcagatcaccaggtcaggagatctagaccatcctggctaacatagtgaaactccgtctctactaaaaatacaaaaaaaaaaaaaaaaaaattagccggtcttggtggcgggcgcctgtagtcccagctactcgggaggctgaggcaggagaatggcatgaacccgggaggcggagcttgcagtgaggcgagatcgcaccactgcactccagcctgggagacagtgtgagactccgtctcaaaaaaaaaaaaaaaaattaatctagagtattggaaacagcctacctcccacggctatgtgatgaacaaattacataatatatgtagaaatgctgtatgaatcactatttgtgtagttacaaagcttaatccctttgtcatcctctataaactccatgaggacagggaatttgtttactaatatatcttcattagccatcacaaaacatgtgttcaataaacatttggcaaatatataaatattttgtttggtagcaaaaaattatttcacaggagaaaactaccattaaatgatttgatgtctctacagttccttcaggttaaaatctgaattcctgtcattcaagatttactcaatctagttgacaatgtacttttctgccccccaaatattcacacaacatctcctcaaaccacccaaggacactatctcctgaactattgatgccttcctcctctctcttaagtcttttaaacgtccaactcaaatccagaatcttcctttgatctatcttaacacatgcttattagatgtctcaaactgctaattaaaaaaacaaaactttaaaaaatactttattcatttttgcatttctgtccccagggactaggacagtcctttgaatatggtaaatatccaataaatacttactgatttaattatttttcacaacacatcattagcttacaatttttattacaatgaaagtaaatcaatttcctaaaattcttcccttgccccatatcgaggtgcaattattcagtaattaaaaaaatatagctccaataaatgcagctggtcataaaaattatttcagtaatatcacaatctactagaagaaccaggaacgagcagctaattttccaattccagttatctatgttacggattacgctttgttatgactgcaattccttggatttctcccctcttccgcccccgggatcttatccaattgataaggttaaaataatggctattatccttctggcttaaaaagcctagtgctcttcgttccttaaatcatttcatgtgtaaattcggtgcttaggaaagactgtgatacaacatctaagaagctacatttagagttcagttttaaaaaaatcgagttcttggctggggaagtgcccaggtgcaggtttgttttgtggtgagcggttcgcggggccaggtgcaagacgctcagaagtgtttttgggtgtcgctggccaactatctccacataaactccgtttgtttatttgacagcgttactgcagaggggagttaggtccagcgccactcaaaccagatttgtagagacttaaaactgctttgtctgttttttttttttttaatcataaaaccacccagttggatccaaggcaaatttgtcacctacttcagggcccctctgagggtcagaaagaattatgagcggatttgaacgcacggcccaaataaaagcaaacgcacggagacttgcggacttgacaattgtgagaaatctcttaaaactcgcctgtggagcggcgggcgaaagccgcggacgccagcagtagtcgaggccccggcgcggacggcagggaatgaagtcgcctgacttttcctcagggttttgtttttctgtcacggaggtacaaaaatagcaaagcaggggtgggaagtctcctggccgtgtttttttttttccccctcgccagggatggcactgggaaagagaagggaggaagcaggagctgcacggaacccgtcccgagggagccgaggtaaaccctgcaccagagttaagggagtcgtgctcctgccacttccagaacactccgagccgcttctgcaggccccgccccctgccggggtttccccgccacccgcttcatttgcatggcgctgcccctcccccgttgccattggctagcgccgggccccgcccactgctcccagaccgcggcagggttccgtccccccgagccgcacggagctgcgggcagcgggcggactgttaaaccgcggcggcggcggcggcggcggcggcggcggccggggcgggagcggggcgcgctctggagacgagtcagcggcgccccgggtgggggaggcgggcgggcagctagagatcacctcagcagcccccaccacggccggaccgaaggtgcggcggcggaggggagccagggcgccccagcaggcgagtggccggcgtctcagcggcgggatgacgggggtgggtcttccctcttggggacggcggcagcgcggggaggggagaagactgccgggtggacttgcgggtcaggcgaccgaccggcagccccttcgccccccgaatcctctgggctgctggactctggtctcggcacgggatcgcgctctagggcgggggtctgaccgcagccaaatttaaacggctaaacctaacagccttggcagctggggagggaaggggtctagggaggggtgggggcggacctggacgccggtcacgtggggggtggggcttggcagacctcccttttgttttggctggcgcgtgcgcagaaggcagaacacgtggtttcctggacccgcctcttgcctcatcggctgagcctcacccattgggggtgtggtgacggctcttttgaggcggctctgaggcggagcccactggatttgatgagacccctattttatttatttcacactttctttcaggaaaacgtagatttgggctttagagttagatgggatagagcagaatctaggggatttttgagggacggtgcttccaagtttgtgtcaccggtgtgctgaggaagggaccggtcttgctggaaaaagtcagattgcgtggtgtttggtagcaagaaataccaggcggtatcctggccgtttcagaaaccacaggaaaggaaagaggctggctttgcagtcgggagggcaggcactggatggacgttcttgtaatgttttcttactctgggagagtccgtttttgtttgtttttttgtttgaactgtggtaagcacattccgtttttgattccccaaacttcaggacattcatgttctggcgaggtttaggagacaaacttccttcgtctttagccagtttgcttaacttcatctgagtttgggtcagtaataattttaaatattgctggatggggcaggtttgttagccacaaaacctaagtgaagtgagcactgcagacaaaactggcaatttctgactaggaaaaaatgactctaaaaataattcagtattgagaaagaggcttaacagtgagtggtctctgcctttcccgttcttaataactagccatttctttgggttagtcacctctctgatgtcaaacttgtttcgtttttgtaaagtttcataatatggtctctgtcttaagagattgtaagaaagaagaaatgccttgtattaggaaaagtgattcctaatctctaccaattgccaagtagtgttatttttataacaaaagtgaattttttaaaagcccacatgttggggaaatataaacaatgaattaatcatgaaatagaatatatttgagtatctttaaaatctgttgtaaccattatctttggttctccctcagtttccacctacttagatcagtgtcagcgtctgcaaccatttcctcatggttttaatctacatagattattctctcccgcaaactgtctggagtaattttttatgtgaaacttcttaatccaggccaattctctcacattgacttttaacatttacattttaattttgtttcatgatgcgcctttgcaaataacaatcgattattttgttaaatcttattattataaagtaattggaaaatagatgagtgcaaataagaaaactataaatattttgtactttaaatatttctgtctgcatatatgtgtatttttcctaaaactgagaccacatggtattttcatttaactcagacattcgcatatcattattctttgaaaaatatttttaatagctgcttaacatttcgccatgtaactatcatattttaaattttttctgttggcacgtatgtgggatgtttctggttttgctagtgtatatttcactacagacaatatccttttacataaacctttgaaatttcccccccttagatttgtagaagaggaattactgggccaaagagtctgtttttgttgtttgtttgtgtgtgtgttttttaaggctcttatgtcatcaccaaattacagaatgttgtattgatttacagtgatctagtggtatgtgtgtgcctcccattatgtctttgtttatcacctagtattaggctttaaaactaaaaaccttgctttaatttgcattttaaattttttcactctaatctgtgatgtatcttttattttttaacttattgtaaagtgcttgagagaaagaaatatatttcatgtttgacatgctgcagatcacttagtgggtgctcaataaatacttgccagtgggctaatatttatcttttttatctatggaagatcaggaaattgtcttttgctttttgttttactcagtttactagtacattgttagtaatatactattattgttggattcataacttttactactttttcattcaggtgaggcctcagtgatctgatcacagttgtctaccagaaggtcaattaacttctcatagcccaactgctgcattatccaagaacttcatccaattttgatgccatttatcatgataccttagattatttcatttcctttactcattcatctgtcttctatgaaattaacgtagaggtttcactgatcaatgtagtttcacttgtagcttttactgtgtttgacaaaaaatgatgcctgctatctgaagttcctttattattgagatggttcttggtagctaacttcttattgcctataggatcctttatgccctttaatctaccacataaatcttataaataatatgtaatccttgttttcatgatgtttttcatgtattcagataatctctccatacccttattttgtctatatagtattagatggtagttgaaggaggcagagagctgctttcttcaggtatagaattatgcttagggttgtttactgattgggttcatcaagatacaaacagaaaggaatggggctgcttgcagcaggagtgacatttattggacaattagcaactaatttactaattttaaagcatatctctcatatcgctatccttaaagctgatactgcattatagtactttaatggaataatttacatcatgatgaccctgaatcataaatacaatcttacattacttttagtatgttccatttagaaaggcaaggaagatatataatttccaagagatttctacctttctttttcttttaaatgttgttttatggggacttttcactgaattgtactccttattccctaatcatgtgggataaacacccagcaaatgttaataaaaacggtactattaaacttgccagtagatagtctataataaaaatccaaagactattcataatggaaattttaaatacttgatgttatttttaggttcttagaaacatttctgtatggacgtgaaaattcattaataatattgagactttgttaatattctaaaaatatttatgaactgtttattttatataatattgaggctttgtttccagtccaagacaattctcaagtgtgttgtttttatttaaacaaatttttattcagcagtaggtcattaatcagtgtttattcatgtgaagttaaattgaagctaaagtatatagactgagcaaatgtgatagtgtacttctacatgtagatttttggatccaaatcgatatacacagaaaaaaatgactatgagtcatgcacttacaagtgaaaagtaataattctgcttgaagtatgatctgtttgatgtgttatgtagccacccaagtggctttatctttaattaaattcctttagtcttcaaagagaattcctttttaggcatagttttcaaagtggaagaagttcttgcttataaaacatcattgaatataaagtactgagctgactgaatcctagttatgccagttattgcagtgtttactgcagtaaattgagaattcctgtaaagtggcatgaagaaatcttgaaaacaacactgtattttgtattcctactttccattaattcctgtatttttgaggaataaaactgtaccagtgtgagctcattctttttttgtttgtttaattggacttttccctgctacaattcagtaactttgaatcctcatatattttttatttatttatttttaaatttttgtagagacagtgtctctctgtcacccaggctgaaatgcagtggcacgactgtactcctctagtctccttatagtctagagataatgtttaaaaacttctcatattttgctaaaagaatttgtcttttttctactctttctttctgtaattggcctaggttagctatatgaaacatttaggtcacaagtgtggaaataatttattatttgaccctacttcagggttctcccctctctcaaaatactgttggtagtcttttcactttatttaagcatcaagtataaatctgctgtctttctgataatgttttcctagtttgtttctttgctctgcatttaagagagctgggattatccagattccagttaaaagaataaatttaatgttcaggggcagatttggataggatattttccatggcatatatggaatatatgtatgcattctagaatataaatcagaatctggagcagtattttaggggataggaattcagatttggcctttaatctttaatgcacattctcaggaggaagagtggttcttatatagattatcagtttcaactctgagcgttgagattagattagcaaattttttatttttctttagaaagtttgtcaaaaattttttgaaatatgtgacctatgtattaatttgtaaaggtctgattattaactgtctggaccaactcagtaactattgacttggtaattatctcactgtgtacatgcaccttttgaggatgatggcttttactgtatttcatgatgtccaagggatcagattgcatttaattaatgctaaattcataaatatgtatggtttagaaatcttaaaaaatatagattaaactcctaatggaaagtctggagacaacagggcaagaccttttatttgtagtacagtagtccatctttatttttggggtatatgtttcagatccccagtggtacctgaaatcgcagacagtacttaaccctatatatactttatttttttctaaccatacatacatatgatcaagttgaatttatgaattaggcatagtaaaagattagcaacaacagtagtagaacagttataactatacataaaagttatgtgaatgtgctcttcttgctcgctctcaaaatatcttaccttactgtactcacctgtttttggactgcagttgaccacaggttactcgaaccatggaagtgaaacagctgataaggggagactactgttacacaatttcagaacaactaatagtaactcatgctttccttaattcacaatgaacgttctttggattaaattgtagacccaaaattagaatttatggtatagatttaactttacagtctacctattgtttttatcagattaacttaattttatttataataatttcagagcaactaatagcaactaatgccttaattcacagtgattgttctttggattaaattgtagtctaaaaattagaatttatggtgtagatttaactttacaatccccccttgtttttattagattaattttatttataacaaatttaatataaccaaaaacaaaaaaattgattctttctagttttaaaaaatgtttattatttaaaaacataagctttgtcttgtcttactgaaattctctctggtgttttttaataagacttcttaaaaaaaccggagatacactgagtttggaattgcttactggaggattatttacttgatagactatctgtaacagttttataacagactggtttttgttttgttttgccatccataacatttctgggctgctgatgtgctaaggaattttttttgttttttgttttttgtttttttttttagtaaaattggaatgtaagttgaaaattctgttgtaaaaacgtaaaagtatgccagtgctttggtgggcagatcacgaggtcaggagttcgagaccagcctggccaacatggtgaaaccccatctctactaaagatacaaaaaattagctgggcatggtggcatgcatctgtaatcccagctacttgggaggctggggcaggagaatcgcttgaacccaggaagcggaagttgcagtgagctgagattgtgccattgcactccagcctaggtggcggggcgagactccatctcaaaacaaaaaaaaacaaaaaaaaaaaaacagaaaaaataaaagtaaaatttatacccaagaaacatagttggtttttggattatctagaactgttacctattgacagaatcaagattatgtatctagttgctttctttgaaagaggactgatatattttcataacttagttttgcttcttaaattctgtaagtttgatattttcatttctgtgtgttgtgacaaaaagtttaattcttttttccagttttcttccttctaggttcttcgaagttctgcatcattagactaaattcttttagaaaagggacctcttgttcctaagtatcttgggtgtatatgaaagaaataatcatcaaagatgatggtggtgcctagagtaatataataaagtattttagtagttgtaaagacatttcttagatttagcaaggatccaaatactcctgcccaattatgtgtataattggaaacctaaataattagaaactgagtatttataggaagatccaggtgctttttagaaagctatttgaggatttattttccataaactttccataaagcctagaatactataggtgcctaaaaatattaaacaatagatttggccaaaaaattgggggactgaaatatagtagtcgatagttgatccctggttacaagacttggcacacatacagaggaatagaaaatagcttatcaagatgtttatgtattgattacatgttgatatatgatactttatatatatgatgacattaaatttaatttttcatgtttcttttaaaaatatgtctagtagtagcaagtttaaaattacatatgtagccacttcatatttctattggacagttacattctatactaatgtttcctaatttttttgccttgagactccttcacaataaaatatatctcatgaaccttcttccttgaaattttaaaataattttaccattttggatagtatttgttcaagaaatatttattatgagcctgctatgtgccataaaatattctagaatacgatgatgagtgaacacataacacctgccttcatgtagcttttgatctatttggggaaaatatgtgatgaagtaatttctagtaaaaatttttaaatggatcatttgttataagtatactattgtatataaaatttcatgtaatataattttatatatttcttcatttattaagtgatagtttggtgttctctgagcttcctggatatgtggtttggtgtctgacattaatttggagaaattcttagtcattattgtttcaattttcttttctttttctcttctccttctggtattcccattatgcatatgttacaccatttgtaattgtcccacagttcttggttggatagtctcttcttcctcaaaccccctgccatctttgttctctttcctttttagttttggaggtttctattgctgtatcttcaagcttagtgctactttcttccaccacatccagtctgctactaagcccatcaaagacattatttttgttgcagtgtttttgatttctagcatttcatttttattctctttttagaatttccatctctcttcttacattacctgtcatttgttgcatgttgtctgttttttccattagaggccttagcatattaatcatagttgttttaaattcctggtctagtaattccatcattcttgccatatctaaatctggttctgatgcttgctgtctcttcaaactatgttgtttgccctttagtgtgccttgtcgttttctcttgaaagctgaacatgatgtgctgagtaaaaggaactctagtaaataggcttttaataagatgtaaggatagaaaagatgttctgtattccagtgataaggtctgtctttcaatgagcctgtgccctgggctgtgaacttcactagtgcttctcagtttttccctgcttaggtaggatagaatggctagaggctgctggagttggatatttagttaatatgtaaccttttaaaagcaatacattccttaaaaagtaatatcggctttgctatcttcatctgcttgacctgtttagcatttgacagaactgaccatgttatacacttctaaacacgttggtatcttgatttcatacacttctggatttcctcctatctcaatgatgatcttttcagttttcttttagcgtccttcctcttttatagctcctcttcctttgctcaagtaaatgtgagtaaacccccacgttttgtcctgggctcctttctctttgcttatacccactccctagggtaaatactatttatatgccagtgactctgcaaaataatctctctaattatgaattcttgcttgaactccagacttgtttttatagctgtttccacttgaatgtttaaaagacacttaaaaagtaacatatccaaaacagaaatttttatttttttcttcttcaactttcttcctccccaagtctgctcccttaggtcagaaaatagcaccactgaccacccagttgctcaagctaaaaacctaggagtcatccttgattccttcctttcccttaattcctgttaagtctttgtcaagcattgttgactctgtcttgaaacaagttctttaattttttaatttttattgatatacatatatatatatatatatatatatatatatatacctgaaccactaaatttgggggtaatatattagacagtaataaataatgaatacacttggatatgaagaccaattcttcatatcagctggatacgtccaattagttttggataaaaatatatgtgtgtgtgtgtatatatatatatatattttttttttaaatagagacagggtctcaccatattacgcaggctggtctcaaactcctgggctcaagtgatcctcccgccttggcctcccaaaatactaggatcacaggcatgagccaccatgcatacccatcatctaccccataaatatatacaccatctttgtacccacaaactttaaaataaaaattttaaaaaatttttatgcttttcaaatcagtattcctccttactcattttgccttgaacaaattgtttactatctgtataaatgaaataatacctaaaaaaataaataaaatttaaagctatgtcatggtcaaaaccactattcagcattaatctgaatgataaactcagtgactttcagtaatatgtacatctaatttctacgaactcttgaacacattatcttctgaatatatatgtcagaggttcccaacagttctattttaaataattattttaaaaagtttatttagtatttaatttttaggaagtccaatttagcaactttttgtgaataatgcttttggtgtcatatctaaaaaaagctttgcctaaagcagtgtcacaaacattttttctagaagttgtatagttacaggttttacatttaggctcatgattcattctgataggtctgaccatttttatataaggtatgaaatacgtattcagtttcatttttttttccctatggatgtccaattagtttagaatgatatgatttaagaaacaaggtttctacatttaattgccttgctatctttgtcaaaataatcaggccaggcgcagtggctcacccctgtaatcctagcactttgggaggctgaggtaggcagatcacctgaggtcaggagtttaagaccagcctggccaacatggtgaaaccccatctctacaaaaatacaaaaattagccgggcatgatggcgggtacctgtaatcccagctacttgggaggctgaggcgggagaatcacttcaacctgggaggcggaggttgcggtgagccgagatcacgccattgcactccagcctgggcgacagagtgaaactccgtctcaaaaaaaaaaaaaaaaaaaaattggccgtatgtgcgtgggtctgttcctgagctctgtttttttccatatatgtgttcatccttttgctaatgccacactgtcttgtctactagaaattggtaagttgtgtgaatccttcaactttgttcttttccaaattgttttggctattctggttcctttaactttcatataaatctttgaattagcttgtagatatcagcaaaatgtcctgccaagattttgtatctaaacttataaatcagtttgaggagaattagcatcataacaatattgaatagttttatctgtgaacatagtgtaatgcactatttaggtcttgatatttttatgggtgttttgtatttttcagtataaagaccatgtgcatcatcttgtgtttagatttataccaaagcatttttgcaggtgttggaattattactgtttaaaaatttctatttctagttttttatttctagcatatagaaatataaatgagttttgtaggttgaccttgtgtttgctgccttattaaattcattagtcgaggagttcaatcccttgggattttctatgtagaaaatcacgtcatctgtgaatagagacagttttacttactttctaatctgtgctttttatttcttttttttttcttgctctacagcactaactaggtcctccagtacaacattgagtatgagtggtgagaaatgtctaccttgcctcattcccagtcttagggcagaaacattcagtctttcaccattaattatgatgtgagctataggcatttgtgtacatgctttttatcagattaaagacattccctctccttcctaatttgctgagtttttctcatgaatggatattgaattttgtcaaatgctttttctccatttattgacatcatatggtttctctttagtctattgatatggtgaattttagttattgttttcttttttttgagacggagtctcgctctgtcacccaggctggagtgcagtggcgtgatctcggctcactgcaagctccacctcccgggttcacaccattctcctgcctcagcctcccgaatagctgggactacaggtgcccaccgccacacccagctattttttttgtatttttagtagagacggggtttcaccattttagtcaggatggtctcgatccgcctgccttggcctcccaaagtgctgggattataggcgtgagccaccgcgcccggcctgttgttttctttaatgttgaaccagtcttgtattcatgaaataagccatacttgaacatagtatcctttctatattttgttgttttgtacaattaaaaaatagtaattgaaataggtgttgttactacttgtgagtaccaaaatcctgaaatgcctttaaatatcatgatcaattaatttatgaatttagtcaacaaatacatgataattactgtgtgccaggcattattctagtgctggagattagatcattgagttcttgcacttaaactacattctttcctagaatgtaatacaatgtcaggtggcaatagtgctatgaagagcaataaagcagtgtaagggaatggagagtcatgaaccaagaggctgaagctatttaaaatatattggtcagggaaggactctgatgaggtgaccttagagcagaagtaaatgaagtgagggagccagccatcttatttgtaaaaaattgtttcaggctgagagaatagcaaacacaaagtcactgtgtcaagagacttgcttggtgtgtttcaaatacagcatagaggccggtgtttctggagtgcagtaattcatggaaagagttgtagaaggcaaagtagtcaggaacctgataataccaattttgtaggctatcgtaaggacaactttggattttaaatatactggcaaccactcattttctcaccaggttatttgttgcgcatcttctgtatgtcaaatagatttgcatgttgaggatacagtagttaacaaaactgttcaaaaatccaagcctttaatagagcttagaagtgttagtgataagtgtagttgtttatataatatggaggtcgtcagaagtggtagtttagaatattcagttgggaaacattgttatgtaaaatgattatatatctagataatttaaataattggaagaaatgtacttatattttgtgctaaaactatactgaacataatttaatcttttttatttataggagacatagctattttcattagtttcttttggttgcaaagtagagagacttacttaggctaggtttttttttttttttataaggatacacttgggaatagaatacagaaggacttaatggaaatccctgaataagagctatgatatgtcccggactttcatagactagagcttaaaagtcttcatatccaagtgtattcattatttattactgtgtaatatattacccccaaatttagtggcttaaattacgtgttatttcataattgctgtgggtcaagaatgtaggcatgtaagcttagctgggtgcctctggctcaaggtctctcataaggctgttgttaatcaaggtgttggctagggcaacagtcatctaaaggcattactgggaaggatctgtttctcagatcactcacatggctgttagcaggcctcagattctttgctatatgttggttggagacatcatttctataccatgtgggtctttctagctcataacatggcagctggcttccctgaataagagagggtggccagatggaagccacagtctctttgttacctaatctcagaagtcatcttatcacctctgctacattttcattaaaagtgagttactaaatccagtccctgttctaggagaggattaaacaagggcatgaatacgaagagggtggggattattaaggttattttggaagctacctgtcctaccggtaagccctagagatctcacccagagattttgtatatatgttttattctagttctctaccataaatgggccttagccacttttaatctttgcattttttccctttctctttttgctacgaattgtatttcttaaatactaatctgctttctttttttttgacagggtcttgctctgtcactcaagctggagtgcaatggcactatcatttttttgcagagcctggatttcatcatgttgcccaggctggtctggaagtcctgggctcaaacgatccacctcttaggcctcccagagtgctgggattataggcatgagccactgtgcccagccatgtgtatctttttttttttttttttttttttttttttctgtgacagtgttttgctctgttgctcaggctggagggcagtggtgcaatcacagctcactgcagcttcaacgtccaggctcaagtgatcttcctgccttagcctctcaagtagctgggaccactggcacatgtcgccacacctaggacattttttagtatttgtagagaagtctccttatgttgcccaggctggtctcgaactccagggctccagcaatccttcaccttgacttcccaaagtgcttgtattacaggcatgagccactgcacccacgtcttttctctacttgttatatttagcttttccgtatctttatccagagactaagatgaattttcctgccttgtgatatttcaccttctgtctctgctgctcgctagtttggttatattcatagtacgctgttcagatttttgagagggacaggtgtgtggtgtgggagataaagtttagtatcttttgaggagtgctgtaacatcaacaagaagcgtgattaaagcagtttccctcagagaacaatgtagacactaaatactattgtgggtgtttattgattagaagacataggtctttgagttggtcaagtaacaacttgaatcttggaagaaatttcctaatgctagcttgttttagaattgtttttctatttccataaaagagtataaactgaaaaaaaccatcttttttttctttttttttttgcatttaggataaatgggaatctatttgcttatttttgaggcattatataaaagtgtataaattttgagacatacagaaactcatatagaaattacattttgagacattatacaataaagtgtatacataaaaaggcaaacatctataatttttttcactcagtattaaccattaacatttattcattttgcatttagtcttttcccctcaagtaataagattttgtagttaaaatgcaaatccccttgaactatcacttttagttctgtttcatggaacttaacttgatgcaactactagtacaagtttggtaggtatttttctggttcactttttattcttgcaaacagacacaaatgtatacgtatatatggtatggttttgtgtttgtgttatatttatatggtactatactatatatatattttacagtgttcttttttatttttaacttgatactgtttttaaggtctttctgtattgatactttaagtcattcctttttaatggcaatatagtattccatcacattttattctctgttttgttattgttagacatctagattgttttgaaaggatgttttgccattatgaacattaccctttggtaaaaatgtgtttgacaaacacattttctacattgtggtcaaattactgaaccaatttatgatcccaatagatatgagaagtcttacatctcatgatatgtatgtgatgttttcagaaaaaaaaaatttttatcagtttggtgattggaaaactaggctcttgttttgttaatctatattcctctcattactagtatgattaagtctgtgtttaatgaccatttggatgtcatcatctgtgaagtacctgactgctctatcttttgctcatttgtaggaattcctcctatagtctagataactaatatttgtctgatatatatgttgcaaatattttctcctagtctgtcattttgctagtaaccgtttttttaattacatagaaattgttgtgcttttattttcttcttgatcatttttgttggactttgtaaagaatcagcttttggttttgtgtttttaagtaggaataaaggaagtagagttataactagcacctggggacatacactatgagagtgtgccatttaaatgactatcaactattatgtgttgaaacaaaaattttggcatatcaggttacaaaatactaggtatctttaaaagcttataattgttaatgacataaaattattttacaaactattcagccttcataatgtttaagggtactgggttgcctttttctgagaatcaatatatggatttatacttttgataatatgcaatgaaatttgtttaattatgggataaatctttagcggttatctgacactgtctccgctattttctaggcaggagtaaatgcatattctgatgcatattcatttgtgaaaagggtaaaattgcagatacgtttagaggagacattgcattaggcaagtttttactatcacatatttttaacagctgtgaagttatatgtttttagttctgttcacttaggtcatctttttcttttctttgagacagagtcttactctgtcatgcaggctggagtgcattggcgtgatctctgcttactgcaacctctgcctcctgggttgaagtgattctcctgcctcagcctcctaagtagctgggattacagttgcccaccaccatgcccggctaatttttatatttttagtagagacagagtttcaccatgttggccatgctgatctcgaactcctgatctcaggtgatccgcctacctcggcaccccaaagtactgggattacaggtgtgagccaccacgtccggcctcacttaggtcttcttacacattatttattatattttagttcttgttattaataccgttcaggctgtgatgattaatttcaggaatagaagtttagataaatttattatattttataaagataagcaattcttatttttggctgaaagtacacaattgagtcacattttctattgttattaccagattataggctggatttttttttttcttttgactgtaattaaatgttgtcaaaaaatagaattctgagatgtaattacatccacaaatatttgttgaacacctattatgtgctagcaatgtgtagctttaattggggttttagctattaggcccccagtcagagggaagaatagcttaatctttgttgaaataatgttgggagttgggagatgaaggaggagttttgttccttcatgttctaatcagaaacattgaacatgttgcccttagaaaaaagtataagcataaaatttttttctagatatttgaccatttatttttacattattgtaggtttccaatacttatctacaggaatcgccatgaccccagctctgagggaggcaacagcaaagggtatcagcttttcatctttgccaagtaccatggagtctgacaagatgctctacatggaaagtcccagaactgtagatgaaaagctaaagggagacaccttttctcagatgcttggatttccaactcctgaacctactcttaatactaattttgtgaatttaaaacattttggctcccctcagtcttcaaaacattaccagactgtttttttaatgagatctaattctacattaaataaacacaatgagaattataaacaaaagaaattaggggagcccagttgcaataagctgaaaaacatactgtataatggcagcaacattcagctcagtaaaatctgtctttctcattctgaagagttcatcaaaaaggagcctctatcagataccacgagccagtgcatgaaagatgtacaaattattctggattcaaatataaccaaagacactaatgtagataaagtacaactacaaaactgtaaatggtatcaagagaatgcacttttggataaagttactgatgctgagattaaaaagggtttattgcactgtactcaaaagaaaattgtacctggccactcaaatgtgcctgttagttcttcagctgctgaaaaagaggaggaagtacatgctcgtttacttcattgtgtaagcaaacagaaaattttacttagccaggctagaagaactcagaaacatttgcagatgctcctggcaaagcatgttgttaagcactatggtcagcagatgaaattgtctatgaaacatcaactccccaaaatgaagacatttcatgaacctaccacaattttgggtaatagtttacctaaatgcactgaaattaagccagaagttaacacattgactgcagagaataaattgtgggatgatgcaaaaaatggctttgcacggtgtacagctgcggaaatccaaagatttgcattttctgctacagggctgttgtctcatgttgaagagggtttggattccgatgcaactgatagcagctctgatgacgatttggatgaatatacccttagaaaaaatgtggcagtgtaagtgcaaaattattattagactattttctgttccatatatagcagcaattatcttagtttccaggtatgttgacaagaaatagattttctaaaatcttaatgctataatctttttttttttttttaatttttatttttgagacagagtctcgctctgtcgcccaggctggagtgtagtggtgcaatcctggctcactgcaacctccgcctcccgggttcaaacaattttcctgctttagcttcctgagtagctgggattacaggtgtgtgccaccacacccagctaatttttgtatttttcgtagaggcaaggtttcaccatgttggtcaggctggtctcgaactcctgaccttgtgatccacccgcctcggcctcccaaagtgctgggattagaggcgtgagccaccacatccagccaccataatcttttatgttataaaacttttgttgaatttttttaatgttttgtttgttaaattattgtgtgtgagtatatacatactatttaaaaataaatttactcaacttttctatctaggaaaaacccatacaggaataatgaaattattgagctataaataagcatattttctattcttgaataggctgtggacaaggcctaatctttgtttaagtgatctagttaatatgtgtatctaactaaaaaactttagtctgcacatagggagccctcattgtctttgggagtgtatcagttgagagtacatgtaagttgacttactactttttttccttaactctctactcgtactcatagctttcagaactgacctttaacaattcagttagtttttgctagcttagtataactaaaacaaaactataatgtcagctgtaagatatctattgaatgcttattatgtgctagacactaagattcagttgtgagcaacatattcacaacctctgccttttggggcatgtacttgagagagaggtatctcgatattgaataataaaaagcagagaaaaatagtttcagttatcacaccgtgataacactacagaccaactctgtccaatagaaacttctgagatgttggaaatcttttatgtctatgccatctaataggcactagacttatgtggatattaaacacttaagatttggccagtgatactaaggaaatgagattttaattttatttaattgactaaattttagttgaaatggtcagataaagcataatttttaatttagttttcaggggatctattactgtccccaaattgatgtgaattattgtttgtatatatagcattttgggggaaagaagtctgtcacacatggatacatacaggggcacaacactcactggggctttttaaagggtgcagggtgggaggagggagaggatcaggaaaaataactaatgggcactaggcttaaaacctgggtgatgaaataatctgtataacaaacctgcatgacacagatttatctatgtaacaaacctgcacttgtacccctgaacttaaaagttaaaaataaactttttcaaattctcaaaaataaatgagaattacagaattagaagccaaacacattgatatttactatgaaatagaagatcagtatattagtttttatagtgagaaataaaatataaagcaaagtaagcattcgggtcttctagtgttctgatatcactgtaattgaaatttgtttgcatgtggaatttatagtagttaataagcgcagattatttttctggctggcattgtgctagttatttaacatatgatatctcatttaattctttcaacaaccctagcaggtagttgttatccttatttcacttaagaagaaacagactcagcatgggttaaataatttaccaatggttaaaaagccaagtaaggggcagaaacaggattttgctcatatatatgactctaaacacatacttattctcttgtaatatgctgttttctcaacattgcatcactgatacttagagctacaagaattattaggtacatgtgttctgaaagaagtctgaaaatttaccaatttttgtatatacaatgcttgtgaagtatttaaataaaatgtagtgggcacattcagtaaatttttttgttgttgagaagagctaatggaaagatttgtcttttttaagctagaaacaagaataagaaacttttgggcagggcttggtggctcacgcctgtaatcccagcactttcggaggcccaggtggccagattgcttgaacccagaagttcgagaccagcctgggcaacatggcaaaacctcatctatacaaaaaatataatacaaaaattagcccggcatggtggtgtgcacctgtagtcccagctacctgggaggctaaggcaggagaattgcttgaacccaggaggtggaggttgcagtgagcccgtatcacccccttgcactccagtctgtgtgacgggagtaaaactcatatcaaaaaaaggaagaaaattttgtcttttcagactgttttgaactatgttattttcattagtagtctcttcattgatttcctataatgcttagtctgccatacagtttgtcattaaattgtgttttgtcctatgcagttggctaatatatctgttagtcttaaccaaccaacccctattaagggtagataccacactttgcactttctgataatttctttttttctttttcttttttctttttttttttttttaagatggagttttgctcttgttgcccacgctggagtgcaatggcacgatctcggctcactgcaacctccacgtcctgggttcaagcgattctcctgcttcagcctcccaagtagctgggattacaggtgtgcaccaccacgcccagctaattttgtatttttagtagagatagggtttctccatgttggtcaagctggtctcaagctcttgacctcaggtaatctgctgaccttggcctcccaaagtgctgggattacaggcatgagccaccgcacccagccaactttctgataatttcttctcaaaggcatgtcaattttgatttttcaaaacattttaagatttacatttatttcttgaatttagtgaggaaacactaagtttagaaatttgtgtaaaacatatacagaaatggtgaaattcaaatgatagaaaaaaaatttttttttactaaataacgtacctcctatttttcaccaactctgccagtttattgaggtaaactgaaggaaagtaacctggaaaaaattgggttctggtttgaaaagtttatttctcctgctgtctttctttttcccataatcagctagaggggattcagagactgtagacataaattttaagaaaataatgtatctaagaaatttaatatcagttcattaaggtaggcttctggcctcttgcattattggcctcttaatattatgattaatgccttggttattaaagccccacctgaattttagaggtcacataaactttgttttaaggttaaactcatctgatctatacaaatcaataatactaaatttatgtaacagctctttatattttttatttcactgaattatttgataattgttttggtttttttttttggtttttctttaatacttgaaatctattcaacatttcttgatttcatatatcttcccatacattaaatacaaaatgttgttttgaatatttttgctaacactaatagatttcttgtgggaaagactgtactcaacattatattaattttgaaattgactaaatattgagagcaaatgacataactttatttgtatcttttggtgtgaatataaaaacagtttctgctttttaaaattagaattaatcagttctatcttaggtcattaaatacatttttaaatttaaaatatccttataagtttattttaagtttatttttgttattttcttctctacgtttgtgaaaagatttttcaaatctagatgagtatttttaatgtataaagttcagagtgaaactttaaacataaaataccaaataaacagatgcattttttggttctaaatttttaataagtgctaacacaaattttcattgtctttattgaatatgttgatttcttaccttaaattataagtccagagtagtaaatactaaagttgacttcaacttaattttaagcaacatgagtattagtgtactactcttttatcgtataggctagtattgtcttctgtttaatgattgcttggcatttgttgagtgagtgaatgactatttctgtgtttgtatatgtagttgtaaagacataaacattgaggctagcaatctgaaatttctctcttctatatatggtttttaaaaatttcattgtggagttgcattgtgtttacttgatgttttttccattccttcctttgtttctaatattaaatgggccacaagatgtatcttgtacgtcatagaccccctccccccatgaatgttcaatgactgaataaatgaaatataccaaaatatggacatttaaaagtaatgattttattataattttcagtgtttgtaatttttaaagttgataagtaaaatgcattatatttaccttaaaattttagattatattaatattatatgccttctatttttctttgagttagtagccctgataggaaaaattgatcaggaagttagctgtgaaggaatataattgttttagaaaattggaaagtattcacattagtcattacaattaccattcttgttttaaatatatatttcgcttgactttgttacttttcctccaaaaatgtagtaggcaataaattagttcataatgatattactaattgactttaattcataatgatattactaacggactttaataataacttttggttgagaggctagtatgcatttgaagtaaaagaaagtcacttttcctttggaaagcataatagagggactttatgttttttgtagatttaagatatagtccttccactgtaagatgaatggatttttgcctccaatgttctttttatttggtgaaggagcccagtcaggtccatgaacactgaactggttaaatgtgaggggatgtgggtgagtcgctgacaaaagttggctacagttacgttatttctcatctggtggtagagccatagaattctagcatttcttttcttcttttcctggggaatgatgatcagttacatttttccaggctgcattttggggaaacacagattttgacacagacatgttttaattctccaagggttgtggaaaaggaagaaataatgctgcttgtcttattccaggaaacctaccaatatcttccagatcacacaattgtttcaaatgttggggaaaaaaaatcccactatttccctaaattggtcagcatatattcaaattttctttaagtttttacttagatatgtaaataagcagacttgattaagggaattcttttcaacagattaaggcattcaccaaagaaaaaaggggaattgttgatgtttagtaagggctgttgggtgactccagattaaaaaatagaaaataattaagtttttgcagacccatagaaatgaatactcatggttttgtgcttgctttcctgctttgccaatggaaaggaaaagaactgaaaagcaaggtgatccagtatttccctttgaggaactggataaataggagtagaaactcagtgccaagattcaaagggcaaagagactgaaaacatttcattattaattgcaaacaagagtaacttaatatttgtataatgtggagtttgcaggttgtttttctatttgttatctttttttattccctgcatgtctgacatagatgagagaagttgaattttgttttgtttataaggaaaacaaaaagttgagtgaattctagggaatttgcaaattatacttaaatgaagaaccttttcctttctgtgggagaagtggaacggaagtaaagggcagaaattcaaaagtgtaattgtgaacagactagtagctaaaaatggtaaagaaatattttatttttatttttatttttagggaaaaggtctcactctgttgcccaggctggagtacagtggcatagtcatagctcactgcagtctgaactcttcagctcaagggatccttcctgcctgagtagctaggactacagatatgtgccatcatgtttggctaagtattaaaatttttttgtagagacaaggtttagctatgttgcccaggatggtcttgaattcctggccttaagctatcttcctgccttggcctcccaaattgctggtatcacagcatgagcgaccatgcccaagcaagaaatattgtctactgtggcatgtggacatctttgagggaagtagtacttcaattaaaataagctcatttgtttttaaaaaggcttttttttgagcaacgtgatgtttaaaagactatgtgtttactagattttctctcagtgttgttagttaatggcaaagctgggattttagcccagatcctttaactcccatttaagctgtacttctatatctacagactttagctggcttaggccaaagttaaattgactgagtcattttcaacatccacgtaacgaaaagaaaaaaaagctgttttgttttcaaaggaaaaattaagatattattataaagttgaagtttttaatgaaaaaagcatcagattgcttgtatatgtatgaatttctttaaatcttgctataaatcagtgaatcacaatcctctcttcttcaccccaacacatctgaggatgatcaagtaaataactgttttgattgccttgattctcacagaatcaggtggagaaactcatcctcttggaccatattgcttagaaaactctacaggtgatcataacataattttcttcgagacttctatataatatgtgtcacttaaaagttctacataacctttatttaaaaataaaccaccttcatagatgaaacaaactggcatttatgtcctatatggagaaaccagaatagtaaagcccttttgcagaagttatgcaagtgttaattgtatttatcatcggaaacgatcacctttgttttcctaattttgacaagaaagcacagctaagctgagtgatagaagcaagatagtcgagtaggagataccagtcttcactcccgaacaaaaaacaagaactagatatctttccatgaatgaaagtagccttgggagggctcaaatgtttaagtatgaatctgtagcaacatagtggagtgaacaaacaaaaatccagaggataactgcacagaaaggatagctggggagactggcatacctgagacatctggagatggctagaaacaaagaagggtgggggctaccggtatcaggcaaatggtaggtgctaccatagtcaccactgaccacaacatcagtatcttttgccattgaggtgatcaacagtcatcaccactgtggatccccaaagaggaggatgtggttgcaccctctacccccaccaccaccaccaagaaggagctgcctttccaggactgggaccaccaccctcccaatcctgacatgagccccagactccagagcttccactgccccatacatgtccacacaccaggccttggctccatggccgcatacccacattgcagactctgtcccactatgcatactctcacctcaaacacaagaaccatcatggctgtggactagcctcaaccgaagccttggagcccaggttgctttgctatgaacattggctgcattgccactctttcaacatctgtgcctcagacatctgacatctgacatcttcacaatatactagaccactccttggaccccagaacctttgtaattccctgtgtgcccatgcctcagaaacaagaaccactgcctttatggaataatctgtatcctgcgccctggagctgtggtttctgtgtctatgaaactacttctaccacagtgagtgagtccatgcctcagaccccagaaacattgtagctgtgtgtgtgctgctgctttggatctcagccccctggctgatctaaaagcagtcacatcttgcacattgttactaacatgggaatggtggaacctgcactctgaatatgggtgccacctcagccctagaccctggagccatggttcctacacatgctcatgctccagaacccaaattgttggctgtttcatggatgcctcatatgagataccattgctgccaccactgcaaatgcacctgcaagtcagacccagtgccaagagggattccactggccacaactttcctggcaggagaaaaagagatgaggaggaccgaccccaccagtcttcgtgactggagcacccaataacccttgccgctgctgtggacagtggctgctgaggatccttgtaatctttgacagtgctaacatcagttgatagagctgtacagagattatgctgctatgcccttactggagtcagaactgtcacactgcacccagctggtgtcctcacacccacctgaaggagaagtttttttctccactgaaaccagtatatgaagtcagaaggaggtgactgcttcatcaactatgcagacattaatgcaaagtaacaagcaacgtgaaaagccaaagaatcataaaaccaccaaagaacatgatacttttccaggaactaatcctaaagaaatagaagatctatgaatatcttggcagataattcaaaatgattcttttaaggtggctcagtaaactaccagagaacacagaggggcaattcaacaaaatcaggaaaacaatacacaaataaaatgaggagtttaacagaatgattgaaattatttaaaaaaaggtaactaggcagaaattctggagctgaatataaactgaacaaagtgaaaaatggcaatagagagcatcagagcagaattgatcaaacagaagaaagaatctgtgaactcaaatacaggttatttgaaaatatccagtcagagaaggaaaaataatgaaaaggagtgaagaaagcctgtgtgatttatgggatatcctcaacagagctaatgttcacattatagcaattaaggaagtagaagagagaaggggtagaaagtatttttaaagaaataatgattgaaaacgtcacaaatctggggagagatagtcacatcggggtaaaggagagtcaaagttctccagtcattttcaaaccaaagaccacactacaacatattatagtcaaactgtcaaaaatcacagagagactattgaaaacagcaagagaaaatcttcacatacaagggaaccctcaggaagttatctgcacatttctaagcagaaacttagtaggccaggaaagtgtgggatgatatattcaaagtgctgaaaataagaaagaaacctgccaaccaaaaaaccaaacccagcaaaactgtccttcagaaagggagagagaagacttttccagacatacaaaatctgagaaagttcatcatcactagatctgccttacaagaaatggtaaagggaattcttcaggctgaaaagaaaaagaatgctaattaggaacatgaaaacatatgaaagtgtaaaactcactggtaatagtcaattcagaatactctaataatggtggtgtataaatcacttgtttttattataattaaaagacaaagctattaaaataatagctacaataatttgtcataggatgtacaatatgaaaagatgtaaattgtgatatcaaaagcatagaataggaggaataaaagtatagagagtttgtatatgagattgaagttattatcagcttgaaatagactcctaataactatgaattgttctttcttaagcctaatggtaaccacaaagcaaaaacctatagtagatatacaaaagatgaagagaaaggaatccaggcatataattacagaaaatcaccaaatcacaaaggaagacagcaagagaggaagaaaggaacaaaggatctgcattaaaaacaaaacgaaaacagaaaacagtgaacacaaaggcaataataaacctttacctatcaacaattgcctcggatataaatggattaaattatccaatttaaaaacatatatagtcagtgaatggattttttttaagacccagctagctgtatgtgccctgtgagagactcacttccagtataaggacacacacagactaaaagtgaaggaataaaatatggtattccatgcaaatggaaaccaaaagagagcaggggtagctacatgtatatcagaaaaaaaatgcactttaggccaaaacatgtaaaaaaagacaaaaaggtaagtatataattgataaagaggccagtttattaagaggatactacattataaacatatgtaaccaatatcagagaatctaaatatataaagcaaatattaatagatgtgaaggaaaaaatagactgcaatacaataatagtaggggactttaataccccactttcaataatggataaatcatccagacaaaatcaaaaggaagcattgggctggaactatagtttaggccaaatggacctaacagagatatatagaacattccatccaacattgtaatacacattgttttcaagtgtaagggaacattcttcaggattgatcatatgttaggccacatgacaaatcttaaccaaaatgattgaaatcatatcaagtattttttccagccaaaatcatatgaaattagaaatcagtaacaggaggaattttggaaaattcacaaatatgtggaaatcaagaaaagccaatggattaatgactaaatttaaagagaaattttaaaatatcttgagagaaatgaaaatggaaacacagtttacaaaactatggggtgcagcaaaaggagttctaataaggaaattttgtaacaataaacacctacattgaaaaagtcatctcaaacaacattatacttcaaggaagcagaaaaagaacaaactaatcccaaaattagtacaagaaaggaaataatgaagatcaaagcagaagatattagaaaaacaatagaaaagattgatgaaaccaagagttggtttttttgaaaagataagcagaattgacaaaccttagctagattaagaaatgaaaaaagacccaaatatataacatcagaaatgaaaaaggagacattacagctgataccacagaaatataatggatcataagagactattatgcaacatctctatgccaacaaattggataacctaaaaatgtataaattcctagacacatagaatctaacatgaatcatgaagaaatagaaaattggaactaaccaatagcaagtaaagagattaaaacagtaataaagtcccccatcaaaggaaagcccagcacctgatgacttcactgtactcaaactcttaaaaaaaaaattgaagaggaggagggaatactttcaaactcattttatgagaccagcattactctgataccaaagccagagaaggacactataagaaaaaaaaaaaaaaagattataggccaatgtcctttgtcactatccttgccaaaatactaacaaactgaattaactacacattaaaaggatcattcaccacagtcaagtggaatttatccctgggatgcaaggatggttccacatatacaaatcaataagtaggatacaccacattaacagaatgaaggacaaaaaacattcttaatacatttgcagaagaaggatttgacagaattcagactctcaacagattaggtatcgaaggaatgtacctctaccaataaaggccatatatgataagctcacagttaacatccaatttagtggcaaaaacttgataccttttcctcgaccatttcatctgcttgggctattgtaagaaaataccttagactcagtaacttattaacaacagaaattattttacagtctggaggctgggaagtccaaggccaagttgtcagcggattcagtgttaggtgagggcttgttctttccttcatgttggcatcttctacctctgttctcacatggtagatagggagaacaagcttcctcaggcctcttttataagagtattaatctcatgataaaggtggagcctaatcacctaatcatctccaaaggctcaccctcttaaggccatcacattgggaattaggttttaacatatgaattttgaggacacagtgttcagatgataccacctactctgaccaatctattcaacatatactggaattgctagccaggttcattaggcataaaaataaataaataaaagagaaaaaggaaagaaaagaaaaaagaaaaagagaaagggagagaaagaaaagaaaagagagaggagtggggaagggaagggaggaaggaaggagggagtgaggggaagagaggaaagaaaagaaattttaaaaaagtatccaaatcagggaaagaagttaaattttctttgctgatgacatcttagagataagaaaagtgtaaagaccccatcaaaacaatgttagaaataaattaattagcgtttcaggatataaaatcaatctacaaagatctgtattatttctatacactaatattaagctgtccaaaagaaaaccatcctacttaaaatgctaacatacttaggaataaatttaaccatggtggtgaaagatatgtacaccaacaactaaacatgaatgaaaaaatggaaaaagaaacaaatggaaaaacatcctgtgttcacggattggaagagttgttaaaatgtccatacaacccaaagcaatctacaaattccatatcattgttatcaaaattccactggcattttccatagaaatgggaaaaaattcaaaaatttatgtaaaaccaagcaagaccccatgagccaaagcaatcttgagcaaaaagaacaaagctggaggcaccacattacctgacttcaaaatacattgagaaaactataatagtcaaaacagcatgccactggaattaaaaacacacatatgcctatgaaacagaatagagagcctagaaataaatccatgcatttatggccaattattctttaataaagatgccacgggcacacaatgaggaagggatagtcttttcaacagtgttgggaaaatgggttatctacatatcaaaggatgaaattggacccttatcttactccttattcccacatcaacttaaggtgattaaagacttcaacataagacctgaataaaacagaaaaagcttctcgacattgatgttggcaaatattttttggatatgcactccaaagcacaggtaacaaaagcaaaaatagacaaatgaaattgcatcaaactaaaaaggtttgacacagcaaaagaaacagcagagtgaagagacaacctatgaaatgggagaaaatatttgcaaactatacgtctgaaaagggaggatttccaaagtacatatggaagttaaattactcaatagtaagaaaacaaataacctgattaaaaaatgggcaaagtggccaaggaggtgtagcccggtggatcgcttgagctcaggaatttgagaccagcttgggtaacatgtcaaaaccttgtctttacaaaaaaatacaaaagttagccaggcatggtggtgtgcacctgcagttccagccactcaggagactgagatgggaagatcactcgagcccaggaggttgaggttgcagtgagccaagattgcgcctctgcactccagccttggtgacagaaagagaccctgtctcaaaaaaaaaaaaaaaaaggaaatgggcaaaggacctgaatagacaatttctttttccaaagaagatatacaaatggccaacacatagatgagaaagtgctcaacatcactaatcatcagggaaataccaattaaaactataatgagataccgtctcacacctgttaaaatggctattacaagaaaaagaataacaaatgttggagaggatacagataaaaggaaactcttgtacactgtgggaatgtaaacaagcacagatattacagaaaatagtaaggaggtttctctggaaatttaaaatagaattaccatatgacccaataatcctacttctgggtatatgtcaaaaggaaattaaatcagtatgttgagttgatacctgcactctcatgttgatactcatttacagtggccaaagtatgcaatcaaactgaccattgacagatgaatggataaggaaaatgtagtgtgtgtaggtatggatgtcagttaggaggaataagttctggagatggtcagcatagtgactgtagttaataataacataccgtgttgagtccctgacttatgatggctcaacttacaatttttcaactttaaggtgagtttattgagacataattgaatgcatttctttttgttttgttttgttttgttttgagatggagtcttgctttgttgcccaggctggagtgcagtggtgcgatcttggctccctgcaacctctacctcccaggttcgagcaatcctcctgcctcagcctccccagtagctgggattacagacacctgccaccacacctggctattttttgtatttttagtagaggcggggtttcgccatgttgtccaggctggtcttgaactcctgaccttaggtgatccatctgcctcagcctcccaaagtgatgggaatacaggtgtgagccactgcacctggccaattcaatgcatttcgacttatgatattttcaatgttgttaccataaaaaatgttaaatgttcccaccatagaaaaagtatatgagatgatggatatgttaattagcatggtttaatcttatacaatgtgtacatataggacagcattgtgttaatatataaatatgtacaccataaatatgtaatatttttgtcatttgaatcttaataaagctaaaaaagatttttaaaaagcgtaagtcccaatgttaagcttccttagacaaatctaaacactgcaaatattatttctaaaagttttttttatagaattgatatcattaactttttttaacactgccatcttttattttagatttacagggtatgtatgcaggcttgttacatgtgtatattccatgatactgaagtttggggtctgattgatcccattgtccaggtagtgagcataatatacaatagttagcttttcaacccttacccacccccttcctctcccctccattagtccccagtgtctatcgttgccatctttatgtctatgtttacccaatatttagcccccacttataagtgagaacatgcagtatttggttttctgtttctgtgattagcactgtttttaaaaataaaataaattttcatagttgtaaaaaaaaaatcacagctcatgaaaatttgtactttcgatgtaacatgcttcttggattccaaaatgcacatttttatcacattttaatgtttctaatagatgtaccttatatagatatgtacaattttttttttgagtcagagtcttgctctgttgcccagggtggagtgcagtggcacaatgatggctcattgcagcctcaacctcctgggctcaagtgattttcttaactcagcctcccaagtatctgggactacaggtatgcaccaccatgcctggctaatttttctgttttttgtagagacaggtttttgctgtgctgcttagtctggtctcaaactcctcagctcaaatgatctgcctgcctcggcctaccaaagtgctggtattacaggcatgagccactgtgcctggccagatgtatagaattaatattatattattttcccaccccagggaattatgttatgaaattgattgtatttaaattttatggcatctttagcactgaggaaatgcaatatttcaaatttatgcatgtaagcatcaggatcatttaaaataatatgttgcataatatatttaagattgtcagaaatatttttcatttaatgtctagtaatattttaaaaatgtatgtaattcattctgttacagcattttaaaatgtaaatttgtgacgtatttggcatttaggggaatgatgtcaatataatgtagatttttacacactttgtgtgtgtatccacaatgtgggttgtttccagattacttcaaacttgttagcattttgaaatgatcaaggtcaagcttttctcaactaaagaggaattcttagcagtagctgaagatctaaacaaaatgctaaaagtcctatagaaatatcctcctgtagctcagtaagttgctggtttattggctatacatttttctgtgttgactaagctttaaagatattttgcttgtgttaaaaagaaattgactaatgaaaaatgctgtctctagaagatatttttaatttttattaaactggtttctattagaactaatgtcttcaaggatgcacatcaaaaaaagaagagacccaggatatgaagctttaaatgtggactgctttattttaggtacaaatgccagtggaaactttccatttttataataatcattattgttttgttagggctcagatttaaaagttccttaggtattgtgtggtctggcactatcttcacaataagtctaactatttttattttgcagaacatgaggttatacagaagtgcatatattgtgttagagcaggaatgcctgtacttgattctggcttagtggtagtcatttttttgattaataaaggtagttttaatttttatcctatttcttttcagggcccattatagtgtttcgcaggcccattactaactcatttgtgtgcattaggaaaagattttccttccactgagcagatgtaggtttgtaattgcagggtttggagtacagaactcttgctggattttacttgcatcttcatccaggcccgtgtacagttcagtttgaaaacattacatggttgcctggcttcctgaacaaaagtgagacatgcacacacatacacacaatgcttattgaacagtgaaattgtttctttagcaaataaatgttttgattagtttaacatttatttacagtatttcccttttaaaaatatgtccttatttgtcaatgtttgatgttacacaaagattttacaaacatatttaagactattttacaggctataactttgaaaattctttccatacaagagaagaggcgtggtagcgatagaatgcataaatatttcccaatctctccttttttttcttttttttctttgaggggtgggaggatagataataagagaagaagactaaatttgcccatcccatatatgaattatttttaattaatactgaaattttcagtttaggcagttgacattaggttctgccagagttctaggcagaattgcataagatctcaagatgtgtttactccatttattcttcctttttggaaccctttttaagttccaacctcagatagtccttggacatcctaaactgcactttttaatgtggtttatcttcatgccagaatttctagaggtcacaactgtatatttatttttttgtttttgtttgttgtttacttcatgaatgtgtgcatatatgtgtctatattgtgtgtgtacaacttgatgatagagtatgtaagttattaacttgtatgtcagtaaggctcatcttaaagacaatgaacattttaaatgagaacttgttagcccaaatgatcctaatagcatgaaatattttcgagggaggaatatgttatttaaggtatatgttaagcttttataacaaggagaagtcaacataaatatatagaatttatttttctctcatttaacggtcaagaattagatatgctttacagggtttagcagagaccttttagctttgctgttccttaggatgctgcccttgcctgcattgttgagagtcactggtacttcatttcatttccatattcagtcatttttaatgataaacccaatcatttataatggccagacctagaagttgtgcacataattttggctcacgttttattttcaaggactttgttgtatagtcagacctaactgcaagtaaggctgggaaataaggtctctaagctgagctgctgagggctcagctgaaacccaaggagctctattatccaaaaagtataggaggatggatattaggggaaaacaagaagtctattcagtttgcctctttggctacccaaatgtccatgtacctctttctcattcataaaacataccatcttctcaaggatgataacccaaagtcacattcattgggtaaagtcctctatatcgggtttctgtgtggttcatcatgatgtggtgaccaataaactaagagacaaatttcctaattttcttgacctcttgcttcttgtatgatggtataaaggacaaggaaaattcccaatgggaaaaaaaagaatgggccatatatgatagttcctgttccttacaataatagacttcttgctctggcagtggagtaaggtcttgctaggaccttaattttgctttctgagataagctcccttgtcatttgtccttcatagtccctgaccttgctctttgggaattactcttggtctatgattctttgtgactgtatctaacatgggtgttagtgtactcttattggagacaccactgcattctcaccctgctttctattggtgcagatttggctcccagggatagtctttgttaggcttatggtagtatttcctagtcgagttccctccgaaatgtaggtttccattctctttttcttcctgtcagttatatgtgaaaataccacagccaaagatctcattttgtcatagttgttaagcctatgcacttattaatttactagttattttcctcagactatccacctctccctcaatttgataactgccttagtgtagtggctactctacacatgctctaacaaagctttaaagtaagctgaaatttatgaagttgaacagcaagtaatataataacctgtcagaacagaattcatcactctttaaggaagaccacaaaatccacacattaacaacataatcatagtacccttaaaatatgtatttatataaaacctactagacatgtgtgtatgtatgtgcacatgtgtgtattcaactattaggcatgcaaagaagcggagaaaaattattaatggaaactgatgtggaaatgataatgatcatgaaagtagttggcaaagagcttaaaatatctattgtaaatatgctcaaggacttaaaaggaaaatgtgaacataatgaaagaaattgaacatataaagaaccattgaacgttcagaagctaaaaatatctgaaatgtaaaacgacttcagctaacaagggaatagtcattcagaagaagtggttaataaataaaaatcactgctaacttctcactagaaggtatgtaagccagaaaaatggaatgatatatttaaagtgctgaaaggtggggaaaaaaagtcagtctaaaattctctgcccagtgaaacattttaaaaaacagagacaaaatgacatttccagataagcaaaaatagagagaagttgtcagtatacacgcactaaagaaattttaaaagatgatcttcaggctgaaggaaaatcatactgggtaaaaacagatttacataaaggaaaaaagaaatgttaagaaatggtaaatatgtgggtctgaaatatgtagaaattaaatcacacatttccaaataactcgtggatgaagaagtcacaagagaaactataaaatgttttgaactgaataatattagaaacatgacatatcagaatttgagggatgcagctactaaattactgaagcaatgctgtatggctatacatgtttgtattaggaaaggagaatagtgtagtctgtggtctaagtctcctacttaaaaagcaataaaaataatactaaattaaacccaaagcaaatagaaggaaaaggtgatgataaagaggggatattcacagaatataaaacatgaaaacaatggagagaattataaacttctagcaagattatttagaagaatactaatagcaggaagaaggaaaaatatcactatagatgttctggcattgtggaataattgggggatacaaaccattctctgtattcccaggttctgtatctgtgtatcaactaactataaatggaaatagccaagaaaaatataaaataatgcaataataaaaaatatgaattaaaaagagtataataactttgtattatgtattataagcaatatttacattgtattagatattataagcaatctagaaattaaagtatacaatggagtgtatgtagcttatatgcacatgtacatcattttatataagggacttgaccatttccgcagattttggtatcctcagggggtcctggaaccaatccttatactaagagatgactgtattatgaacaagtacatgtcaataaattcaacaatttaagctaaataggctaatcgcttaaaagacacaaatgaccaaactgacacaatgagaaatagaaaacctgaaaaaccttacgttaaaaagaaaaattaataattataaactttcccacatagaaaacttgtggctcagatggcttcactgattaatttcattgaaactcaaggaataaaccattccagtcctacataaattccttcagaaaatcaaggaggagagaagacttctcgttttatgagggtagcattagcttgattccaaaaccaaatatgacaagagaacagcagatccatatcttctttgactatagatgcaaagaaaaatcctaaatgaaataacaaatagggtctagcaaacagtaaaaattcatcatgaccaaatgagttcataccaggaggtcaaaacaaagatgtaagtttgtgatgttgacaattagtaccaagagaaattgcattcaaaaccacttaagtttaaacagcttgtactcatttcttttagcaaaagttaagtggtggctgcaagcaagcaaggatgggaattgaagtcataatgctacctttctggggaatgagtgatctctgtcactgtccaggtggtctccactcaccaatgtctttgatctttactagagatagggaacccacattatggtcagcatgtggtggtctgtgatcagttttgcacactctagaaagattcagggagtcagtggcagaccaggcttatatgctaactggggagttgggacactctgagtatgctggtgcattagttatatgctatttggttacactgtaagttatgtaaaccattaacattgattatataagttgtttacataaaatgtttgactttggggtataacatgttgatcttgtttgagcaagttagccatatatttatctgtaacatcttaattattaacaatcttattttttttagaaaaacatgttttctaggaagcaaacatttttgtttaccacttataagcatagcaaacatgttttattcactcctgttaaaatgtaggataagttaccctctacagaaaatttatttcaggccgggctttctggcttatgcctgtaatcccagcactttgggaggccgaggcgggtagatcacttgaggaaaggagttgaagcccagcttagccaacgtagtgaaaccccgtgtctactaaaaatacaattaactgggtgtggtggtacatgcctgtaatcccagctactcaggaggctgagggacaagaatccgttgaacctgggaggtggaggttgcaatgaggagagatcgcaccgctgcactccagcctggacgacacagcaaaactaaaaaaaaaaaaaaagaaaatttatttcatatatcacaaagcgtccgatgcgatttggtttacttaaatttaatctggtattgctatttttctatattagtataatttagtctagtatatgaacatcataacaatgatttttgtaatcctaacttgagtatcagaatatctttaccagaagtacaataatatgagttctatggcatttttttctgttatatttcattattcactaatcatcaatattatagccaaaccaaattgcatattataggggaattttccaactggagcaaaacttaaagaatgtttaagatcatctttgattgccctaagctcacttctatgccatacttctgcaagtcctatcaactttaaaatgaaccttgaatccattcttttatctacatatctttgtctcccctctccttcccagtcaaagccatttttatattcagtgttttagtcagaataggctatatttagagttacaaattagcatcctaatctcaatggtttcacacagcagaggtgtactgcggcttacataaagtccagtgtgatctgggctattctcctcctccatcttgtagctatactctctgcactactggttttgaagatcctcaggtgaactggaaatgacaatgtcacttttgcttacagcgcatttgctcagaactagtcaaatggctccaacataaatgcataagcctgggaagtgtagggcggtacgtgaaatatttagagatcacaatgatctgtactacacccagattattacagataacatcttagttgttttcctgacttttttttcatttcctactgcagtgctttctccacctagtagccaaagttcttgaaaaaaaaaaaaaattgttaccaccttgccagtagtttccactttgttttaaaatccaaacattttatcctcacctgtgtaaaatgctacgcgctagcatgcttgccttctctgattttgtgattggcatttagtgttgctaactgttaactatgaatagtatattttgaataggtattttattttgtccacagttaggaaaatgtgatttttaagtgtcaaatttatgaaaccacagtaatgactataaacaataaataataataccaagagaaatcctaaatcatatggtgtctttaatcacattgtatgcagttagaatccttaaaaacagtggcctttcagaaacattgatataatgtaaaatcctgttataatgaataaattctatatagcaaagccataataattgtgttctgtttatctgacagcaaatgatctcttagaataaatattttctctgtttaaagattatttgaaagatattccattatggtccagtgcattttaaaaaattaataaactattttttagagcagttttaggttcacagcaaaactgaatggaaagtacaaagagttcccacatatcccctgttcctacatgctacaaatgcataacctttcccagtgttaatatcccacaacagagtggtgtatttgttacaattgatgaacctacattaacacgtcattgtcacccagagatcatcatttacattagggttcactcttggcgttctacagtcagcgggttttgacaataaatgaatttttagataagttttttataaagtttacatgttgtcattaagtcattgttgtcctacagttatatcttcagtttctgtcagtttttttttttttttgcaatctgcatctcctaattaaatatcacacacatataccacccgtaatccccaataatttttctctagctgtagtgctcttgccaaatgacaagaggtactaggaggagctaggaatcaacccttatttttaaatatgcatgaaagaaaggctttatgtaaattctttgtgatctgtaggttgtgaatcctaggaatcaggtttttaaggaacagtttatcttaaatattttaaggtctatatatttggtatgcttatttgaaatgtagcagagcatttatattttttataatttttgatagcttttaaaaaatgatttaaataattagctaataacgatgcctattttaacaaataaaaattacttatagtaaaatcgaatatgctacagtttattacatggatttagatttagcaccattcaaatggattgtctggtacttgacatctacttacgtataaaagttttatgtaacagtttttacatggtgtttgcattgtcattcatgtttccttttctttgctggtttatctctgtttaagaccttctgcactgataaagaattgaatagcagaggaattatcctactacagggtatgtaatatttaatgaaaacaggtatttgtggggtggaaaggtaggaaaattatatctttttctttgataagaagtcaatctgccattctctcttcctgtaattacatgttgtagaaaggaaatttgcttttatgatgggagttaaggaagttattaagcagtgtttgtgaaacttgattgcctttgtgctttgagtaacagtgtttgttttgttcacagtaactgtagtactgaatggaagtggcttgtagacagagcacgagttggcagccgatggacttggcttcaagctcagatttcagacctagaatgcaaaatccaacaactaacagacattcacaggcaaattcgtgcctccaaggtattgtctgtctgtgttcttctacttttgttaaaaattgttaatgttttcattccttctcatttgatcacaaaaataattgttacaaggttttataaaaatgtagccagtttatgttaaaatttttgatatattattataaattgaagctatttttgtaatgcctttttgtattttaagatcattttatcatactttttgagcaattcagaacttccttattggattccagttaatataagtgataaacgtgttttcaaatttctaaatcataaaatacataaaaaccttaacatcttaaccatttttgagtgtatagttgtgttattaaatacatttgtaatgttgtgcatctgtcgctatccatctccataactctttttaccttttataactgaagctctaaacccattaaataataactgtccactttcctctctcctcaacccctggcaactatgtctgtctcttatgattttgactattttaagtacctcatatgagcagaatcataagtttttgtctttttgtggctagcttatttcactagcataatgttctcaagtttcataaatattgtagcatattagaatttctttcctttttaagactaataatttattgtatgtatataccacattttgtttattcattcatccgttgatggacacttgggttgcttccagtttttagctattgtgagtatgctatgaacatggatataaaaatatctctttgagaccctgttttcaattctttggggtaaacacccacaagttgaattgctggatcatatgggaactttatttttaatttttttgtggatctaccatactgtttttcacagtggctataccagttaacattcccaccagcagtacacaaggttcagatttctccagattctcgctaacatttattttctgtttattttatagtaacctccctaatgagtgtgagatggtatcttattttagttttgatttgcatttgcctaatgattaatgatgttgaacatcatttcatgtgctactggcttggcttttggatatcttctttggagaagtacttattcaagtcctttgcccatttttgaattgggttgcttgcttgtttttttcttgttgcgttttaattcaatatatagtagatattaatttcttatcagatatatgatttataaatattttttcctattctatgtgttgctttttttttttttttttttttttgaggcagagtcttgttctgtcacccaggctggagtgcagtagtgtgatcactgctcactgcagccttgacctcccgggctcaagcaatccttccacctcagactcccaagtagctgagactagaggctcgtgccaccatgcctggctaagtttttgattttttgtagagatgggatctccctctattgcccaggctggtctcgaactcctagacttaaatgatcccctgatcttggcctctcaaaaagtgctggtatgacaaatgtgagcccctgtgctcagccttgttcattgcatttttactctgttgatattatcttttcctgcccaaattttcaaaatttttctgaagtcccatttgtctactttttcttttattacctgtgcctttggtgtcatagctaagaaatcattgctaaatctaatgtcatgaagcacttaccctatatttcttcttagagttttatagttttaggttttacattgagagctttgatccgttttgtgttaatttttgtgtgtggtgttaggtaagggtccagtttcatttgttttcattcagatattcagttttacctggttgaaaagactgtttttccattgaatggccttgaaaagtttgtcaaaaaacatttgaccatatatgttagggtttatttctgggttctctattctatcccattggaatataggtctgtctttatgccagtaccacattgggtttttttgtttttgtttttaatttcttttcttctttttttttaaaaagagacagagtttcactatattcaagaccaggctggtcttgaactcctgggctcaagccatcctctcacctcagcctcccaaagtgctaggattataggcatgagccactatgcctggccagtatcacattattttgatttctgtagttttgtaataatttttgaaatcaggacgtgagtcttccagatttgttatttatttatatatatttttgagacagagtctcagtatgttgccaaggctggagtgcaatggcacgatatcagctcactgcaacctccaccttccaggctcaagtgattctcatgcctcagcctcctgagtagctgggattacaggcatgtgccaccaagcccagctaaaatttttgtatttttagtagagacgggattttgccatgttggccaggttagtcttgaactcctggcctcagagtgatctgcctgccttggcttcccaaaatgctgggattacaggtgtgggccaccgagcccaactctagatttgtgtttttttagagattgtgttggctttgaggtctcatgagattttgtatgacctttaggataagttttttttctgtctataaaaagagttgtggagatttagatagggatgcactgaaactctagatttctttgagtagttttgatagcttaacaacattaagtcttccaatccatgaatatgggatttgtttccatttatttatatcttctttaatttctttcagcaatgttttgtagtttatacaagtctatcaactccttggttatctatctattatattctgaagtgttttattctttttgatgctgttgtaagtggaattgtttttgtgactttctttgcagattgttcattgttggtgtataaaaaacgcacctgacttctgtgtgatcttgctactctgctgaatttattaatttgaacatatttttgaaggaatttttagtgttttctacatataagattatatcatcttaaaacaaatcatttaacttcttttacagtttggatgccatttatttctttttcttgcttaattgctttgtctagaacttccaatactgtgttgaatagaagtggtgaaagtgagcatttttgccttgttcctgatcttaagaggagaaatggttcagtctttaacccttgagtgtgattttcagggggttttcatatgtggcttttattatgtttaggtagttttctttgattcctaccttgctgactgtttttatcatgaaaagatgtacaattttttcaaatgccttttcttcaattaaaatgatgatagggttttctttctccttcattctgttaatgttgtgtattacattaatcggttttaatactgaaccatcctttcattctaagaataaatctcacttggaataaatctcactcagtcatggattgtaaacctgttaatatggtgatgaatttggcttgctaatttttggttgatcacttctgtatcagtatttacaagggatattgatctgtagtttattttcttatagtgtctttgcctggctttggcatcaggataatgctggcctcacagaatgaattaagaagtgttccttcctctttgattttttggaaaagtttgagaaggattgctatttggtcttctttaaaaatttagtagaattcagcattgaagtcatcagattcagggctttactttatcaagagatttttgattactaatttaatttccttactagttatataggcctattcaaattttcttttcttttcttttcttttgagttggagttttgctcttgttgcccaggctggagtgccgtggcgcaatctcggctcactgcaacctctgcctcctgggttcaggcaattctcctgcctcagccccctgagtagctgggattacaggcacccgccaccacatccagctaatttttgtatttttagtagagacgggatttcaccatgttgtccaggctggtctcaaactcctgacctcaggtgttccacttgccttggcctccctaagtgctgggattacagatgtgagccaccacacccagcccaaattttctatttctttgagatttagtcttcttaagttgtgttgtgtttctaggaatttgttcatgtaatctaggttatttaatttgttggtatagtattattaataatactctcttgtcatctgttttatttctttagattcagcaataacatccccagctttatttctgattttagtattttgagtcttttttctttgttttcttagttcatctagctaaaggtttgtcgattttgttgatgctttcaaagaatccacttttagttttgataatttttctagtttttctatcctcatattcgttttagctctaccctaatctttattatttcctttcttctgctagcttttggtttaaattgttcttctttttctagtttcttaatttgtaaaattaggttgttatttcgagatcttttttgttttttttaaatgtcaagcatttataactataaactccccccttagcactgccttcactgcatctcataaattttggtatgttttgttttcattttcgtttatttctaactgttttctaatttttcttgtaatttctactttgatctattggttgttttaaaatgtgttaatatacacaaatttgtgcattttccagttttctgttaatgatttctcacttcatttcattgtggttggaaaagataatttttatatctttctttttatatctgttgagatataatatttggcctaacatatggtccatctgggaaaatgctccatgtacacttgagaaaaatttgtatgtggttgttgttgggtagaatgttctttagatatctgttaaatctagttggtttattgtgtagtttaagttgtctgtttccttacttatcttccatctagttgttgtgtcccttaacaagagtgagttatagaagtatccaactattattttagaattattgatttttctttgcaattctatcagattttgcttcatatgttttaattgtctcttattagatgtgtaaatgttgcctgatgcattagaaaccaatactatgacactgagttttttgaaagaagaaaagctttatattgcaagttgactgacaaggagactggagggtcaagctctaatactgtctccttgtgctttttttttttaacttaaaaaatatttttgtgggtacatagtggatgtatatatttatggggtacgtgagatattttgacacaggaatacaatgcataataatcagatcagggtaaatgggacatccatcacctcaaacacttattctttctttgtgttataaactgtccaattatactcttaattatttttaaatgtacaataagttattgttgactgtagtcaccctgttgtgctatcaaatactagatcttatttattctctctaattatatttttgtacccattagccatccccattctcccccacccttcccaacctctagtaatcatcattctactatctccatgagttcaattgttttaattttttaagctcctacaaacaagtgagaacatgcacaatttgtctttctgtgcctggcttatttcacttaacataatgaccttcagttccatccacgttgttgcaaatgacaggatctcagtcttttttatcactgtatagtactccattttgtatatgtacaacattttctttatccatttgtctgttgatggacacttaggttttcaaatcttggttattgtgaatactgctgccataaacataagggtgcagatacctgttcaatatactgatatcctttctttgggtatatgcctaggagtaagattggatcataggatagttctagttttagtttttcaaggaagctccaagcttttctctgaagtggttgggaatatacattcccaccaccagtgtggttcctttttctctacaactttgccagcatgttttattccctgacctttggatagaagctattttaactggggtgagatgatagctcattgtagttttgatttgcatttctctgatgataaacaatgttgagcaccttttcatatacctgttttccatttgtatgtcttcttttgagaaaggtctattcatatgttttccctatttttcaatcagattattagatttttttttctattgatttgtttgagcaccttatgtattctggttattaatcccttgtcagacagatagtttgcaaatatttttgcccattctgtgggttgtgtcttcactttgttgattatttcttttgctatgcagaggctttttaacatgatgtgttaacgtgttaatttgatttgtccattttttctttggttgcctgtgcttgtggggtattacttaagaaatctttgcccagtccaatgtcctggagagtttttccaatgttttcttttagtagtttcatagtttgaggtcttagatttaagtctttaatatattttgatttgatttttgtatatggcaagaaatgggggtctagttttattcttctgcatatggatagacagtctttccagcaccatttactggagactgttttttccccaagttcttggcaactttgttgaaaatgagttaactgtatatgtatggatttgtttctgggttctccgtactgttttgttggtctgtgtgtctatttttatgccagtactgtgccgttttgattaatacagctctgtagtataatttgaagtcagttaatgtgattcttccaattttgttctttatgctcaggacagctttagctattctgggtcttttgtggttccatataaattttagggttgttttttctatttatgtgaagaatgtcagtggtactttgatagagattgcattgaatctgtagatttcgttgggtactatggatattttaacaatattaattcttctaattcacaaaaatggaatatctcctttttgtgtgtatcctcttcagtttctttcatcaatgttttataggtttcatagttgagaactttcagttctttggttaattcctaggtattctgttttatttgtatctactgtaaatgagttgactttcttgatttcttctctagattgtatgctgttggcatatagaaatgctactgttttttgtatgttgattttgtatcctgcaacttactgaatttatttatcagttttaatagttttttagtggagtctgtagatttttccaaacaagatcatatcacgtgcaaacaaggataatttgacttcttcctttctgatgtggatgccctttatttctttttcttttttaaaaaatttgccccccaaaaagttttatttcttcttctttttaaacttttattttaagttcaggggtacaagtgcgggtgtgttacatgggtaaacttgtgtcttaggggtttgttgttcagattatttcatcagccaggtattaagcctagtacccattagttgtttttcctgatcctctccctcctcgcaccctccattctccaaaaggccccagtgtgtgttattcccctctatgtgttcatgttctctcatcatttagctcccacttataagtgagaacatgcgatatttggttttctgttcctgagttagtttgctaaggataatggcctccagcttcattcgtgtttctgcaaaggacatgatctcattgttttttatggctgcatagtattccatggtgtatgtgtaccacatttgctttatgcagtctaccattgatgggcattcgggttgattctatgcctttgctattgtgcatagtgctgcaataaacgtacacatgtgtgtatctttataatagaatgatatatattcctttgggtgtatactcagtaatgggattgctgggtcaaatggtatatctgtctttaggtctttgaggaattgccacactgtcttccacaatggctgaactaatttcactctcaccagtggtgtaaaagcattcctttttctccacaaccttgccaacatctgttattttttgactttttaatagtagccatctgactggagttagatggtatctcattgtggttttgatttgcatttctctaatgatcaatgatgttgagctttttttcatatgatttttggccgcatgtatgtcttctgttgaaaagtgtcttttcatgtcctttgcccacttttttatggggttgtttgtttatttcttgtaaatttgtttaagttccttttagatgctgaatattagacctttgtcagatgcatagtttgcaaaaattttctcccattctttagattgtctgtttactctgttgatagtttctttctctgtgcagaaactctctagtttagttagtatacatttgtcaatttttgcttttgttgcagttgcttttggcatctttgtcatgaaatcgttgcctgtgcctatgtcctggatggtattgcttaggttgtcttccagcatttttataattttgggttttacatttaaggctttaatccatcttgaattaatttttgtatgtggtgtaaggagggggtccagtttcaatctttgcatatggctagccagttatcccagcaccacttttttatttttatttttttctttggagacggagtctcaccctgtcacccaagctggagtacagtggcgtgatctccgctcactgcaacctccgcctcctggcttctagcaattctcctgcctcagcctcctgagtcgctgggactacaggcacatgccaccatgcctggctaattttttttgtattttagtagagatggggtttcactgtgttgcccaggctggtctcgaactcctgagctgaggcagtccacctgcctgagcctcccatggtgctaggattacaggtgtgagccaccgtgcctggccagcaccacttactgaatagggaattctttccccattgcttatttctttcaggtttgttgaagatcagacagttgtaggtgtgtggtctcatttctgggttcccttttctgttctgttggtctttgtgtctgttcttgttcgagtaccatgctgttttggttacaatagccctgtagtatagtttgaagttgggtagcctgatgccttctgctttgttctttttgcttaggattgccttggttattcagggttgccttctatttctttctcttgtctaattgctctacctacaactttccagtattatattgaatgacagtggtaaaagtgggcatccttgttacgttctagatttcagttttctctcccattcattaagatactagctgtgggtctatcatatatggcttttattgtgttgaggtaagttcctttatacccaatttattgaaggtttttatcatgaaggatgttgaattttcttaaacactgtttcagcatcaattgaaatgaccatatggattttgtccttctttctgttgatatgatctatcagattgattaatttgcgtgtgttgaaccatctttgcgcccctggaatgcatcctacttgattatgacaaatgatatttttaatatgttgttatttggtttgctaattttttgttaaggacttctgcatcaatataatcagggatatttgcctatagttttctcttttttaaaaatgtggttttggctagttttaatatcacagtaatactgtccttgtagaatgactttgaaagtatttccttcccctctatttttcagactagttagagtaggattgatactacttcttctttaagtgtttggtaaaattcagcagtgaagccattgggtcctgggcttttctttttttttcttttttttcttttttttcgagacggagcctcgctctgtcaccaggctggagtgcagtggtgcgatcttggctcactgcaacctccgcctcccaggttcaagagattctcctgcctcagcctcctgagtagctgcaactacaggtgcgcgccaccatgcccagctaatttttgtatttttagtagagacagagtttcatcatgttagggtttcaccatgttggccaggatagtctcaatctcttgacctcgtgatctgcctgcctcgtcctccctaagtgttgggattacaggcatgagccaccacacccagctctgggcttttctttaatagaggactttttttttttttttctcttgagacagggtcttactctgttgcccaacctggagtggagtggcacaatttcgactcactgcagcctcaacctcctgggctcaagcagtccttccacctcagccttagtaactgggaccacaggcacacaccaccacatgtggctaaattttgtattttctgtagagatgggggttttgccatgtacccaagctggactcaaactcctgagctcaagcagtctgcctgccctggccttccaaagtgctgggattacaggtacgagccaccatgcttggtataatggaagacttattagtgatttaatctccttactcatttttggtttgttaaaattttctattttttcttctgttttttttttttttttttgagttggagtatggagtttcttgttgcccaggctggagtgcaatggtgcgatctgagctcacagtgcgacctccacctcccgattcaagcaactatcctgcctcagcctcccgagtagctgggattactggcatgtaccaccatgcctggctaattttatatttttagtagagacaaggtttctccatgttggtcaggctggtcttgaactcctgacctcaagtgatccacccgcctcggcctcccaaagtgctgggattacaggcataagccaccgcacccgcccccctccttttttttttttttgagatggagtttcgcttttgttgcccaggctggagtacaatggcgtgatctcacctcactgcaacctctgcctcctgggttcaagtgattctcctgcctcagcctcctgagtagctgggattacaggcatgcgccatcacacccggctaatttttttgtatttttagtagagacggggtttctccatgttggtcaggctagtctcaaactcccaacctcaggtgatccacctgtctcggcctcccaaagtgctgagattacgggcatgagccgtcgtgcctggccaaaattttctatttttttataatacagtcttgctaggctgtatgaatcaagagatttgtttattgattttagattgttcagcttgttggtttatactttttcataatagtctcttataatcctttgtatttctgttgtatccattgtaatgtctccttttttatttgcaattttatttgaatcttccctgttttttttcttagtctagtgaaaagttcatcttgaaggatatatttgctggatatactattctaggataaaagtttttttctttcagcactttaaatatgtcatgccactcactcctcacctgtaaggtttcccctgagaagtctgctaccagacatattggagctcctttgtatgttgtttcttttctcttgctgctttttgaatcctttctttattccctccctttgggtgtttgattattaaatgtcttgaggtacttttctttggattaaattttcttggtgccctataaccttcttgtacttgaatattggcatcttactgtagatttgggaagttctctgttattatccatttgaatatactttctacgctgatctctttctcttcctccccttaaaggccagtatcttaggtttgcccttttgaggctatttttttgatctggtaggtgtgctttattactttttattcttttttcttttgtctcttctgaggtatattttcacatagcctgtcttcaagctcagtaattttcttctttttgattaatcctgctgttaagagactctatcttgtgcattcttcataatgtcagttgcatttttcagctccagaatttctgcttgtttctttttaactgtttcaatttcttcattaaatttatctgataggattctgaattccttcttgtgttaccttagatttcattgagctttctcaaaacagctattttcagttctgcgtctgaaaggtcacatccctgtctctctggcattggtctttggtgccctatttagtccatttggtgaggccatgtgttcctgggtgttctttatactcatagatgttcgtctgtgtctggacattgaaaagttagttatttattagtctttgcatctgcactaatttgtaccagtccttcttgagaatgctttctagatattgaaacacccttgggtgttgtgatctaattcattggtcactgcagtcatatccccaactttagtaacactgcatcttttgtggactcatagaggtatgacctcagtagtctcgggtaagatccaaaagcattctctggattaccagtcagagactcctgttctcttcccttactttcccccagggaaacacagtctcaccctctgtactgagctgcttggagctaggagaggcgtgacacaaggaccactgggactgcacagggtcagatccgaagacagcacagcactggtctcacctaaggccagcagtgaccactacctggctatcgtctgtgtctcctcaaggcccaaaagttctatcatcagcaggtggcaaatccacccaggcttgtgtccttcccttaagggtggcaagttttctccccagccccgggtgggtctagagatgccatcttgggactccacctggtgctgtgttctactgcagctgaccaagtcacaagacaaagtcctccctacccttccttcctctttcctcaagcagagcagtcccttcccatggccaccactgccccagggccacagcaagtactgcctgtctacggccaatgtttactaaaggcccaaggcttcttcagtcagcttttggtgaatgctgccagtcctgagtctctcccttcaggacagtgggctcccctctggaccagggtaggtccagaaatgcttggtgctttaccccactgtggccaagctggtaaccaatctgacttttagctcttataaagatgctgttttatgtggatagtgttcaatctggtgttcctatgttgggaggtagtgggggtacaattgctggaggcttctattcagccgtcttgttctgcctcccctctctcatgctatttttatggtaacatttttattagaatagatttgggggtagatattgggattaacaggtgattggtagaaggaaaggaaagttttggaaagttcttgggcatgtgcagttattgcttcatgctaactcatggattgcatgtgcaaattcagggggagttaatatgaaacatgcagtgtaaatttaggctgtgatgtcagtaaggtcatctgtgcaaacttctgtcagccattttggttttaactgatttttgccagtttactcttgttctcacaaggttagagagttttggcgtctcagtgggttatgtctttaattatctgctatcctacaaactcaagaatttttgctagttactgacttcttactccttgggttatagtttgagtttcagtatctcaacaagttgtttattttcttatctgttatcctataaacataggaatttagactggttttcttaactctttgtggcatggtttcataaatgtttataattgttatatcttgttatagagtcttattaatatataatgtccttatctctcgtaaccttttttaatttaaaatctgttttgtctgatattgtatataatttttaaaaatccttccactttcaacttacttgtgtcgttggacttaagttgaatctcttgtagacagtatagagttggattctgtgtttttatccattctaatttctgtgttttggggagtttaatccatttacacttaacgtaattactaagaaggatagacttacttctgtcattttgctattttctatatatcttataccttttttgtttttcatttcctgcactactgtcttctgttatgtttagttgattattttttgacactgaaatgtttaaatttctttctcatttccttttatatatattctgtagatattttctttgtggttgcctatggggattacatttaacctcataaagttattacattataatttgaatttattccagtttaactttagtaacatataaaaactcatttcctttacagctttgttcccaccccttttggttgttgatgtcacaaaattatatccttatactaatgtgtcccaaagcatacattaataattattttaaatatattagtttcttaaattatgtagaaaacaaaatgtggagctgcaaaccaaagttaccacaagtctagctttggatctattatatttttttaatgtactagttatttaaatcatgtagaaagcaaggagttacaaactagtgttacaataatactagctgttataattatgcatgtatttaacttcattgagatttttctttcatcatacagctttaagttactatctacgtctttcatttcaccttgcatgacttctttaagtattttctgcagagtaggtctactggtaaatgactctctcagcttttgtttacttgagagtgtcttaattttttttacctttgaaggacaattttcccgaatagaataggattttgggttggccagggtttgttgttgttgttgttgttattttgtcttgttttcttttgtttgttttttgctttgaatatgttgacctaactgcctttggacctccaaagtttatcataagaggctactgatagtattacggaggatcccttgcatgtgcttctctcttgccgctttcaagattctttctttttgtcattcagtagtttgattataatatgtttctttgtagtactctttggattcatcttatttggagctcattcagcttttgatatttgtaatcatgtctttcatcatatctgggaagtttttagccattatttcttcaaatattctctctgcctgtctttctcttctttttctggaactcccacatttatatgttgggccacttaatagtgttccacgtgtcccttagactttgttcacttttctttaatctgttttctttttatgctttgcacttgattatttttactgtcctggcttcaagttcattgatgtttttcctgcctgttcacatttgcctttgaatacctctagtgaatttttcatttcagttattatacttttcagctctagaatttctgtttggtttcttttcaggttttctatctccatattgatgtttgcattttgttcataacatctttttcttgactttttcacatcatttttttagccttttgtgcatctttaagacagttgttttaaagtctttgtctaatagatcttccatcctgttttcagggacagtttctgtttattcttttttttcctttgaatgctccatttttcctgtttcattgtatgctttttgttttttttgttgtttttggaaactggacatttgactctaataatggaaatcagattctttccctttctgcaggacttttaaaatcatttttgtttattattttgtttttctctattgttgtaggttgtcggtgtggcaagaataagcctgaagtgtatagttaaaatcttattttttctgagcctgcacgttttcttggaaatgcccagttgctttctaattttccccattggtgcagttgttttaaaatgtcctgcttttaatgtctggctcccaaaaggggaaaagagaaaaatgaagagaggatttttttttaaagggtgctggccctttaaatccccaggaaggccttctgccagaggaggagggaattgcaataaaaggagggaggtactacaacaatggttgcctctttgtctgtacctctgtgatcaaaggttgcaatcagtgatcagaacacagatccctaatatttgcagaacagggtccttttcccctaccctgacttatgcaggctgtatatagattgcttcagaaatgtatgaatggctgcctgccatgggactaggtgtggggatgggtagctgctattgtgctaagagctaaaattgatgaaaattaactgcacatttactgtccaagcctgccctttgaacttgcaagtcttcagtaaactccagatttttgaagtaatgacattagacagattctgccaatgcaggtggtgtctaggtggggtgacagattcctggtggttcctgttccaacacatagaaacgataaatatttgtggtgatggatatgctaattaccctgatctgatcactatacatcatatgtattgaaatatcattatatataccataaatatatacaattattatttgtcaattaaaaaataaagtagaaagaaataagagacatgcactgaaaggagtttttgacatttgggtctctggacacttaaactttgtgtctttgtacatctcagaatatcttcattttaccctcactcttaaatggtattttactttggtgttaaattctagtttgacagttatttttctttagcactttaaagatgtgttttattgttttgtttgatactgaggagaagtctactgtcaatgtgattatttttcttttctgggtactgtcttttctatctggtacctttaagatgttcttgttgtataaggtgtaaggaagggatccagtttcagttttctacatatggctagccagttttcccagcaccatttattaaagagggaatcctttccccattgctgtttttgttaggttgctgctatgaagacacatgtacatgtatgtttatagcggcactattcacaatagcaaagacttggaaccaacctaaatgtccaacaacgatagtctggattaagaaaatgtgacacatatacaccatggaatactatgcagccataaaaaatgatgagttcatgtcctttgtagggacatggatgaagctggaaaccatcattctcagcaaactatcacaaggacaaaaaaccaaacaccgcatgttctcactcataggtgggaattgaacaatgagaacacatgaacacaggaaggggaacatcacacaccagggactgttgtggggtggggggagggggcagcgagagctttaggaggtatacctaatgctaaatgatgagttaatgggtgcagcacaccaacatggcgcatgtatacatatgtaacaaacctgcacgttgtgcacatgtaccctaaaacttaaagtataataataataaaattttttaaaaaaagttaaaaaaaagaaaaaaaaagatgttcttgtttatttgatgttctgcattcttactaacaggtatcaaaggattgtctttatgttgcttagtactcagagtacacatttttaactatacagttcactgaattttgacaaatatctactcttgtaaccatcactatgatcataatgtaggacatttctataaccttcaaaaatgtcattccttcctctttgcggtcaatctctttccttcaggctcttttctctggcaaccactaatctgttttctattgctatagttttgccttttctagaatttcatataagtcaaataataaaacattaatctctattttgctctttcacttagcataatgcttttaggttcatctttgttgctgtatatataagtaattttttcttttttattgttgagcagtattccattgtaggattgtactataatttgtttatctgtttcctaggtcatggaaatttaggttgttttagtttttggctattatgaataatgctgctatatatattcatctataagttttagtgtagacatgtttttttttttcagagtccacattcatttgttttaatttcttttatatttttgagacagggccttgctctgttggccaggctggagtgcagtggcatgattacggctcactgcagccttgacctcccaggctcaagcgatcctcccgcctcagcttcctgggtagatgggactacaagaatgcaccagcgcacctggctaatttttgtatttttggtgggtttggggtttcgccatgttgcccaggctggtctcaagctcctgggctcaagctatccacctgcctcagcctcttagcctcagcctcttaaagtgctgagattacaggtataagccactgcacccagcccagagtccatgtttagtccaaggtgttacatctttcttcaagtctagcatattctctgctactatcatccaaatattgtatgtttgtcaatttttttctcttccatttttgtgaaattctcatagattgagaggttcaaacaaatttttcatgtctcttaaccactctttaattttttaatctcatttgtctctctgtaccacaaggaattctttactgtcttttaatttgctaattctgtctttgaccatattctgcttagactttgtcctgtatattggcttttacattggcttttactttgtgataatgctttttattgataatttctaattaggtcattttcaaacctgtttaaaaacataaatgaaaaggaataggtttctagaaattcaaggccttacgaagttagcaaaactgcctctctctacactttatatgataagagataggattgagaaaacctttgaataataaaggaccaaagtgatttggagctaaatatcagactaaggataccatcctctgcaaaacctttgagctggataaaattacacttagtgcagtggaggaagattaagaatgtggattttccatcagaacttaatagcttatgagaatccccacaaggaagcagagaaagaggaacgggagaaaggagtatgtaggtaggtataggggttagagggtgaaagaaatatcctttgagaatgcatcagagaactgtgggtgtgattgtcagtacatggaactgcctgaaaacagagagatgggaagccttctgagtttctgagtgagttctaccaaagaaattacaagcttggcctataaaaagccttttactggccaagacttaaaccagtccttaggacgccaaccttctatgaacaagaagcaggttaagagctttgcagttcctaaagaagtcaaaaacatttactgatattgccaaggaaggtaatataaaagaaagaagctttatatttatatttatattaccaatataaattttaaatttatattaccaaggaaggtaatataaaagaaagaagcaggctgattcaggagccatagagaacagtgaatagaaagaaccctttaataggaagcacaaattagggcctaattaagccatacacctagggtaagaagctctcacaatattggtccagcagaatgttagcattaatatagaccaatagctgacatatattctttattctttacatttccaagtgggaatgttcattgtgatctatttttcccaaagaatcagcgatacaaatgagttcttatgcaatctaaatattgctaaatatttatttgtaaccttgtttttgtgggaaacagtattctatatggtcatactgtagacatcctggagataatctaatattgaaggttgatagggataggtctgaaaaggaaaaagctgagaagggaagggatcagagtccttgaaccatgtagtttgcctagcctctcctaggggtctgcacatccacaaagattaataaattttaggctctatctatcatgagtttatattctggtaagggagataaaacctataatcgtttcaatatatgtaatatattcggtaatacctgtttttttaaaaaattatactttaagtagaatacctgtttttctaagatatttgaagggccatagagagaatacttatgggtcagagggtcagagaaaacattaagagaagaaagtgacatctcagtatgactttgggggatgaacagtaattttttgatgaaccaatggaactagaaaaaggcgttttttacaggtttgaaggtgtgaaacaacatgatcattttcaggaatgacaaagtagtatggtatttaaaggagcagaaagtatgtgttatacaagaaaaggaacaaaagctaggaagtgatgaagtatgtttaatacttggtagcaattagtggtggtgtctataggaaggtaggaagaaggatagacataaaaccttaggcttactagttctgtgagatttgagggaaccacattcactaagtgtttcctgatgaaagtttattagttactttttctcattgttcactgttatctttacaggagccttcagtttacaattacccagtcgtttcaagatcaccgcataatctctcctctttgatcattttccataaaggatataatttcacacgttttttatagcaaatagagttctaagaatgagtcaagtataaaacaatttagatatttcaaagaaagtgggtttgcagttacattgatgaataagatttatatttcaatctagacagtctgattcataatcctttaacttaagaaaggatattttaatattctatattttctaagcagtactgtatacttcttgtttaaactcttttaaaagcttgattgcaacatctactggaataaattgttttaaggaaagacgtataaacttccctgtaataacttatatgaccttacctttttcttaattcaggataaatgtgtatctggccctttgttcctttaagaatatcattatgtttattttatggaacatgccacaaaattaggttattagaatacaatgtttttgttattttagtagtttctcattacatttattaggaattaatcaaagtgtttagttgtttatatgcaacttagttgaaatgttattatataagaaaaacatcactttccttgctcttatagcttcttgagttattgtaagaaaaaaattgagaaggatggccagtactgtcttgaaatagaactttctgtttaatgtattttaaatgtaaaaaaaattgttctcacttaagttagagataaagggaaaggaaagagattgagagatgctgttttgtaaatatcctgtttcaataagtgctagtttgtgccttaagtcagaaaacacatcatttgcccctttaccattcttcttatggtctaaactttgcttaaattttcagaggagaaggccaggcatggtggctcaagcctgtaatcccagcactttgggaggccgaggcaggcgaattacaaggtcaggagattgagaccatcctggctaacacggtgaaaccccatctctactaaaaatattttttaaaaaattagccgggcgtggtggcgggcacctgtagtcccagctactcggaaggctgaggcaggagaatggcgtgaacccgggaggcagagcttgcagtgagtcaagattgcgccactgcactccagcctgggcaatagaacaagactctgtctcaaaaaaaaaatatatatatatatattttttttttttgaggagaagaaagcagttattagcaacatcctttggtggttcttgcgacagctttgtcaacatattacagattcctatatttcctcttctccctgcttcaaactttctaataagacaacagattcttctcaccctcagaaaaaaattgaaatatttttcttgggagaacactggctatatcaaatggtttctctcttagatttcttttgttatcctgcagtaggggcttccacattttaaattgtaccttttgtgtgttttaaattttttatttaaagttttacttaaaattaactttagtgaatttatgtgaataatagagatgttgctgaggcagttcttttttcacacagtgttttctctgtgaagaccctgcattgtcaggatttctcttctcagaaacagttgatttgctttcatcttatgctagagttttgacttgtttcagttgttgtaactcgtttttctaaaaatattttttgtctttcttatctatgttgttttacatatcagaatatccttttactaatttttttaagaacagaaactctctgctgtgtccccagaggattaaatataaatattcaaccctttcctctccattcttggcagtggtggatcagaatgggccactctcctcacactccaacagttttgtccagggtagtagtttatggaggaaaaaacagattatgaagttgactatgacggtctccctggttgaattttaatttttttttttttttttgacagagtctctgtcacccaggctggagtgcagtggtgcgatctcggctcactgcaacctcctcctcctgggttcaagcaattcttttgcctcagcctcccaagtatctgggaccaaaggcatgtgccatgatgcccagccaatttttgtactgttagtagagacagggttttgctatgttggccaggctggtgttgaactcctggcctcaagtgatccacctgcctcaccctcccaaagtgctaggattacaggcgtaaaccaccatgccctgcctccctggttgaattttaaaaatataattctttattaaactaactatagcaggctttgtacttatagaaaggtagtattctaaaggtttggaaatagaactttgaaattcagagtagagttttcccatagatgcagatttataaatatggattctgaaatcagactaatctatacagactgatatcagactaatctatacagactggcccatactataaactggaatcaaaccaaagacaattgcagttaaattgataaggtggaacttgtgtttctttgacatgcaggtacttgtggagaaacctagtgagagtaggtttgaaatttcctcttctccctgcttcaaactttctaataagacaacagattcttctcaccttcagaaaaaaattgaaatatttttcttgggagaacactggctatatcaaatggtttctctcttagatttcttttgttatcctgcagtaggggcttccacattttaaattgtaccttttgtgtgtagacttgtagaaattttgaatggatactctcaagagcttttcagactaatgataccatatctattatatctaatttatttttttaaataccaaatgaaataagaacttttgagcatgtttcttcagatttcttgacggccatatttgttcattctaagaaaacagtaattgggatcaagtggctccccttctccttggaaaagtcagcatgttagcactattcaaaatgtagatttttttaaaaagcgcatttactacttttaccaaaaattttactacaaaataataaaatatacatttaataccataactgaatatgtgcattctaaagttatatattctctaaattacatagtgtaaactaaaactcatatataacacattattatctataggcaatttccatcttataaataagacttatgcatgatgtaggtggcccacagcaatcatttaattcattccatttttgaaataatgcacactaatattaatgttagtttattttttattacaataatatagtattttagccacattaggagtgtaataattttccaactagcctataggaatttattagcatttttcaaatatatatatatatattttttttcaaatatatatatatatttatatatgtaaaacctgtgtgtgtatataatatataatatatgtaatatcagtatatatataacataatatctgtgtatgtgtaatatatatatggtatatattactgtattattttcaggaggaagggtggtagaatagataggaaggaaagaaattttacagtgggaactgattatgaaaccattaagatcatgcctttgcactccttttttctctttctctgttgtctccattgcctctgaggaacctaaagttgagaacagttggagtgaggaagctggggaatggaggagaaagccgagcaaaccagttgaggaataagtatgtttgtgagtaggaggcagagagtacagagacaacttgatccctattcattcccccagttccttacatttcagaatataccccatcaaagttgaaagcttgtgtctttattattaacacagctaccctgaaagcagtgggaactttgattggcctagagagtactttttctcagtggtgcagtcctatccctggttgctggctgacagcaacaggggcagggctccttagggtgctctgaaaggagttaggatagagttagattgttgtttggatgtttgtaaatttggtgttttaatttataaaattgggagtgctcaaatgtaaagcacaaatagcaatgctagtgatgaaaatatcaggagattctatcaggaaatattctagatttcaatctgaaatgtccatgttctgtgtataatatgcctttttttattttaatatgtcatgcttttaatgccaataattaaaaccaattagaaaaaaactgcatgtatttaagttaagaaaatattttacaagtccaacctatcaaccatacatgttattttagctacatgtgttttaaaccagccagttctttacagagttaaactatcaagtttatattttctgaattccaagagataagtggaagcatagattcaagtgcattgtagcattaaaggtggcttaataataagtttgttttcatttcaactttctcattgttttttgtctaggggatagtggtcctagaagaatgtcagcttccaaaagatattttgaaaaaacaaatgcaatttgcagaccaagcagcttcactaaacattctagggaatcctcaggttccccaggagtgtcaagatcctgtaccggaacaagattttgaaatgtcaccaagcagccctactttacttcttcgaaacatcgaaaaacaggtaaagtcaaagtaaggatatcagtggtatgaaatgacttttcattgattttgtaaactattcaaataaacatcattatatgtgtatcttcctggcatatgtgttattaaactaggccatctggcattaaatacarttaaaatatttgacatatgaccagtctccattataataccaatataatttaaattatttaaatataatatgtaaagtaatggaattggtatggctataggatgataatttatttttacagggattagaaaatcctttttctaacaaaattgtttatcattggatttttttcaaggagagagaacaattgtaccagttaatatgtctgaatggttgtttgactaatttattgaacaagatttttagtgaaagataatattggaatatggatttgttcataaaaaatgattatgtaaatggaaagtcaagaaagctcctaacaattactttgattccaaagccttccttggtatctaaattctattgtggataactccacaagcttaattattctggccagtctatcctgtatctgtccttggaaatccaacaatttattttgatttagactttagtggctcttaaacaaactcagtttctaggacttttttttattattattatactttaagttctagggtacatgtgcacaacgtgcaggtttgttacatatgtatacatgtgccatgttggtgtgctgcacccattaactcgtcatttacattaggtctatctcctaatgctatccctccccccttcccccaccccatgacaggccccggtgtgtgatgtcccccttcctgtgtccaagtgttcttctcattgttcatttcccacctatgagtgagaatatgcggtgtttggtttttcgtccttgtgatagtttgctcagaatgatggttaccagcttcatccatgtccctacaaaggacatgaactcatccttttttatggctacatagtattccatggtgtatatatgtcacattttcttaatccagtctatcattgatggacatttgggttggttccaagtctttgctattgtgaatagtgcctcaataagcatacgtgtacatgtgtctttatagcagcatgatttataatcctttgggtatatacccagtaatgggatggctgggtcaaatggtatttctagttctagatcctcgaggaatcgccacactgtcttccacaatggttgaactagtttatagtcccaccagcagtgtaaaagtgttcctatttctccacatcctctctagcacctgttgtttcctgacttgttaatgatcaccattctaactggtgtgagatggtatctcattgtggttttgatatgcatttctctgatggccagtgatgatgagcattttttcacgtgtctgttggttgcataaatgtcttctcttgagaagtgtctattcatatccttcgcccacttgttgatggggttgtttgtttttttctcgtaaatttgtttgagttctttgtagattttggatattagccctttgtcagataggtagattgcaaaaattttctcccattctgtaggttgcctgttcactctgatggtagtttcttttgctgtgcagaagctctttagtttaattagatcccatttgtcaattttggcttttgttgccattgcttgtggtgttttagacatgaagtccttgcccatgcctatgtcctgaatggtattgcctaggttttcttctagggtttttatggttttaggtctaatatttaagtctttaatccatcttgaattaatttttgtataaggtgtaaggaagggatccagttaccacaaaagagcccgcattgccaagacagtcctaagccaaaagaacaaagctggaggcagtacgctacctgactttaaactatactacaaggctaaacagcatggtactggtaccaaaacagagatatagaccagtggaacagaacagagctctcagaaataataccacacatctacaaccatctgatctttgccaaacctgacaaaaacaagaaatggggaaaagatcccctatttaataagtggtgctgggaaaactggctagccatatgtagaaagctgaatctaggacttttttactttaaagctgagccattcttcaccatagttgcatcattacattgttcctctgggaaattatacagattcatgcctgcttgcatctaattttcctgagtttttctgacatacaaggaagtaactaaatacaggttactgtcttattcctgataaaccaaaatatggtataatttcttccaccctgtatttgttaaatttataattgcccagagtttttcttaattggaatgcataatcaaagcacttatgaatattttgcaatttagaaagctgtttggtaattatctgatgtcaaattataatgcacttgaccatataagcattgatttaaattagtttttgttatatttctatattcccactttcctctttcttttccctcccctcatcctataggatcaacccttgttcggtttgatcctagttgtttcacattctagagtaattcatttgcttacacagtcaaatctacttttaccatctttaggtcactacttattcattggaaattgtaatctgtttaaattaattctaagatattttcatttctaaaagagatttcttgtactttttcctttctccttgatatccccagtttttttaggttggacctgagatgacatcagaactgcctaatttgcagatcctagtgtaaaatgaagttgtggagccctttgttaaaaacagttatgaatttaaagacagtgacagcagagcactaagcaagcatagcctccatctgcgctcagcctggtgcacaggttacatgcccatgaagctggtcctgggtatcattttaggtctcattgctgatgaaactgtcagggcctttgrtagtatagggaaccaagagttgtgagagcagtaatggctctatgtaaagagagcagaagtaaaagatgcagaaagggcagcagcaattacttgtagaggttgttaataaattgcctatgaacaagtcatttgttcttgaaatgtggtaataatgctttttataggccaagttttaaaagcttaagttgtttttaaatacttggtggccgggcatggtagctcatgcctgtaatcccagcactttgggagaccaaggtgggcagattgcttgagcccaggagtttgagaccagcctgggcaacacagggagaccctgtctctacaaaaaatacaaaaagtagctggccttggtggcacacacctgtagtcctagctactcaggaggctgaggtggaaggatcacttgagcccaggtggcagagattgcagtgagccagatggcaccactgcactctagcctggatgacagaacgagacactgtctgaaacaaacaaaaaaacttgttgaggaagatagtctaggagtgagttaagtggtaggtatggcaagcccattattatgcatggttttcttaggataatctactgatatataactgttcactcataatcttttggcttgactaaagtagttttgttagagttggaagttaaaatataaaggcactattgagttgtagactatcatttaaaaaataacattgattcatagtattaataaatgcttgcattgttagataatatgtagttcataaattgaaaagtattaataccttgtttttagtactttaggtcagctgttcccaacgtgtttggcatgaggtactggttttgtagaagacaatttttccgcagggtggggatggggggatggttttgagatgaaactgttccacctcagatcatcaggcattagagtcttataaggagcagcaacctagatcccttgcaggtgcacttcacagtatggttcgygctgctatgagaatctaatgctgtgggtggtctgacaggaggcggagctcaggtggtaattcttgctggccctctgcccacctcctgctgtgcagcctggtttctaacaggccatggacaggtacccatcagcagcccgggggttggggacttctactttaggtgatttaaaatgaatttgctactggtgtatttacattataaatcttgttatgaatagctagtgttttaacttacagttgattagtttttgttttcagagttcaaattacgcttctcttaattttacttttcttattcacattttctctgtgacttttctattccccatatgactcgggtatgtgagattttatggggccagaataggctgattcttagggtaaagatagggattgtaatttcccccttcctggcccattattcacatatatccaattagcgacgtccagtggcttaaaagattttagatgatgttttttggaggtggaacaatgacaggaatgttttagtgtttccaaccggaagatgtgagatacttcagaatttatttgcatgactaatgattacttgctaaatggataaagaatccatttctattggtgattttaaaaatgagctttaatctaaaaactgagtaataatttttaaaatgacatcattaggtgcatactatcttcaaaataaatggtgaaaacatttcaaggtctttctcatgaaagattttttgaagggataaaatattaggcctaattttattctattatttagtctcacttctaatagcatgttattagtttcatacaaatgaagcattctaaaataattatttcatatacccctttatttcacaatagagtatcttgcagtattgaaaatgttgaactacgtctgtattttttaaaaagttggtcacactatattaagtgggaaaaccaggttttagaaaattgatgtagcataatttaattaaaagtatatgtgttcatgttgaatgtacactcatgcttacatatactcagaaaactcagtgtggaaggagaaatatatacctaaatgttagctctggttttctctttgaagtatgattacagatgactctcttttcatttttaaaatgtctctatattttccagttcttctatgatgaacgtggattacaggtgtaatgaaaatagttgtcattcttttgtagaaatgtactattcctttttatgtggcctttgcttattataattgtgattgttttgagaataatatttatacatattatataatttaatatttattacatatatttaagtctgggacaaatgtcagtgaaatcttaggtgctaaaaaaaaactctgatatttgtgaattaggaaaaatattgagaaacagtgtgttgttagatttaggcctgaatttgaatcctagttctatttcataccagctttatagcccttgatcaagctacttaatctttttttctttgctagaatttactcatctgttctgttattaataatagtgatgtcagtacctctaatattatcttctttgctggttagttgtaaagattgaaatattctatgtgtggtgcctaatataatgcctggcacatagtaggcacttaataaattgtatctgtgatttttaattattaattttcctgcctcaagggtaatattatataaaggctgttagctgggttcaaatgtgttagatgatgggatgggtagatgaaggaacaataataaaaaaaggatatggaaaagaatgggtacttaaagtatagatttatttgtaataaatggaaaaatcagttgtataaattgtctttgtcaaataaaacatttactaaaataaaaacatgtgtgtcatgagaagttaaggattaattggcactatgcatctgagctttaactcacatttcttgcttagcagtagtaaaaggttgactgtttccttgcagagtgcacagttgactgagatcatcaacagtttgattgcccctctcaacttgtccccaacttcatcacccctctcttccaaatcctgtagccataaatgtctggctaatggcatttacaggaggtaggtatcaatggaatagcttagcttttaaattcaactttgcctattttatcttattttgattttgttttgatattttaagtattatagctactttttttgtacattaggggctactagagtacaatcaatataccatggatgcattttttgataatattaaatttacacaattaaggtaatgataaatctaggaatgagggagagagatttctgggaagtttcataatgtttcttaaaaaaagaatagtggtgataacatttgctgtagaagtactgccttatttaatataccttccactttgtaccttttgtattcttgagctccatgctgtcgttgcagtgcattttgaggaaaaaagaccctagatatagtttaggcacagaacattggtagctatcacccattagattcagcttaagttttaatcattttgtattttagctttatataaggtaaattttttttactataattaataactcctataaacattaacaatttatctatattagcaaaaatatatacactatgaatcttagtccttttttgggaacagcatttgttgtgctttgtttccttttctcttagaacttttccttttgaagataaaattagaagacataccaatagaatatcattttatgtgtgcattgtctaatttttttcagataaaattggaatgttggcttctttgctttaattaccatagagaactaagtgtaattttgggaaatatttgtgttaaaaattatataatttattattttaataactttctaatatagcataaaatgaaaatttatagcatggtgaaaattatgctaagtagccatcaaattctttgtgaaattagtggatgtaaacaaagtcttaaaataaaaagctgaggtgggcagatttcatgagctcaggagttcgagatcagcctggccaacatggagaaaccccgtctctactaaaaatacaaaaaattagccgggcgtggtggtgtgctcctgtagtaccagctactcaagagcctgaggcacaagaatcacttgaacctgggagatggaggttgcagtgagccaagatcacaccactgcactccagcctgggcaacagagcaagactctgtctccaaaaaaataaataaataaataataaaaaataaaaagctgacatttgatttttatttctaattggttattttgaacatctaatctttaatacttttactattttatttatgttgagttatgtatccattgttctattgtgggaacagttctattggttttgctttattttttctcractttatattcattcctcatatcagtgataaaacatgttgaacgtaaagattcttacatattgtataggataactatgatattttcatttatgagaacgtatcctaattaggaaagtcataatgtaggtgaatgtattttaagctgccccataaaacacatcaaattggtgtataagcattgtgatttggggctaatcccattttagataatactttgtttacctaatcaagtactacacagttacacacatagttacatgtgtgtgttcatgtgtttgtgaattttcattttaatatacttgcctgtatttctggtcattcatttgcaaagcattgattgcataattatttattgtatgccacatagtcaagtcctagggacacaaatatgaagacagaagtcttcacttgtgaataactcacagtctggttggtgaaacatgtaactacttaataaaatattatgtaataaaaatggaattgtgtgtagttgtttgaatactggcttttaataactgttacacttgaaaaagatacctcataaagatatgtagatccaaatgaaagaaatggaaaattggccatgtttactaaattacattttttaattctgtctactagtagttcaaaggtttttgttggaatcagctactgaatactgtctttcctcatgtcaattagttgttgctacaacctaattgaaaaggtttgcttttgaaagtttttaacaagttcaaaacctatgaaaatgttttgatagatttaaaagcagacaaaaattttgttcttcacgttttttgaagtgtgctgatacgtgttttaattaattacatttttggcaacaatgaactctttttaaaatagttggtacataatgtgtgtttcaaaaagcatttattttcccatttgttgtcaaaatatcatattttccttgaaggaaaggtatttattttctaacatttgctagataatgtaatactttctctactttttatcaaagagaaagtgatcaaatttagaacagttgatagttatctaaaatgcataatttatctttaagtttaatagctctttataagtgctttgttaccagataaccagcaaactaccatgtaaaacaaacgattttgggggatactcctgactcctgatttcattaaaatgttttgtaaagattccacaatttgtgataatatgtattaaaaaatctataaatctatttaaccagaaacatagaaaccagactatattgcagataagaataataataacactgaaggaaaagtagcaaattttgaggaaacgtggtctattgtttcgtatgccaaagagagtactgaaaatatctgttggttttgtcagtaatgtgttgagactttggcaagagagactttgacaagagcatgatggagaaagaggtaagagtgaattagtaagagaattggagaagaagtagagagagggggtcaagattacccttcaaggccactgattttaaaggctataataaaagggacatacaaagtcacagaaaatattttgtttttaagatggaggaaatttaagcatctttattaaaataaagggaaaggaaggagctacaggtgagaaatgtagaaaacaccttatcacaaagttatggagggatcttattacaggaaaaaatatgcctgttccttaagagtagcatgaaatagattaagatatgtgtggatgcacttgtttctgaggtgattatagactggttaagattatagactagttaatctgaggtgattatagactagttaagactagttaaaggagcctgaggagctttgacaagtaaaacatttttccttttcccttattccttctcattttccctcccctcctctcctctcccctttgtttttggagcctgagtaatctacccctaggaaagggtgttagtggtttctaagaattttttttttttaatcccttaactataaatatgtttataatgaaaagtacttaattaatgcttataaaactagttaagaattgaacttttaaaatattctctaattgaactttctataaaataagtacatagtagtgaaattctacaaattttagttttttaatgttactcatgtttgagaatattactatagatttttaaaattaatcggagatacaattttatattatagcattatatgaaacagctttgattcaaagatatctggattgaagtaatgtgaaatggatctctatgagccttttgacactgggagtagaatatcaaatgaggcctaattttatttcttatatcttgctattttccaatacctttgttatttttccttcacatagttgtatatgaagaaaacatctttcagattcaaaggtttttaggagtaagggcttagtctatttaatggtatttcagacttgacacttaaaccacaaagcactttctgaagatgtccttgttaagcatataaatacttctcggaagcatataaatactatttatgtatttataataaatgggcaggtaagaaaactcataagtatttttcaaaattataaaacatacataacaaaaatttaccattttaactatttttaaatgtaagtttaatggcattaaatacaatcaaaatgttgtgtaatcatcatcaccatccatcttcagaattttttttattttctcaaactgaaactctatatccactaaacaatacttcccattcttccttgctttcagctcctggccactaccactttaccttctatatgaatttgactactctaggtaccgtataagtgggatcacatagtgtttgtccttttgtgacaaacttattgtacttagcataatatcaaaatttatctacattatagcctgtgtgttaaaattccctttttaaggctgaataatattctatttttatatagacaacatttgatctgtggatagatatttgattgcttctgtcccttggctattgtgaataaggctgctattaacatggatgaacaaatatctgtttgagtccctgcttttaattgttttgggtattctagaagtgaaattgctggattatgtgataattctatttttaaattttgtttatttcaaaaattagaaattagcaaatattaattgccaagccaaaagctgagagaaagccagagctcaaaaagtaagcaaagcacagcagtctgctttttttgaggctaaatttagacaaaattaaattgaagttttgatatcttttgggggaagggaggagagaaactaaaaccaaatccagcaaaatcaagctgaagatttaatagattgtggaatgataagaagataaatcaggccagttgagattcctcatgcctgtaatcccagcactttgggaggccgagatgggcaaatggcttgaggccacgagttcaagaccagcctggccaacgtggcaaaaccccgcctctactaaaaatacaaaaattagctgggtgtgatggtgcatgcctgtagtcccaactacttgggaggctgaggcacgagaatctcctgaatccaggaggctgaggttgcagtgagccaagatcgtgccactgcccttcagcctgggtgacagagtgagactctgtctcaaaaacaacaacaacaacaacagcaaaaatgaacataggtcaaagcccttggctctgcccatggcaggaagatgaaataaaatctttgtatttagtagagaccattctctttcagggcctatgccattacagtaaaggtacattggaagtaaaactgtttccctttccccaccactagggaccacagggagatttgccttggggctaagcagagcagaagattaaaaaaaaaaaacaaaaaacctatctttgagatgttctgatcatggtggagactttttacatggattttcaatccaagtttgcatcaatgagtgatccaagagatccctagttttaagtggttctggaatggcagaggcaaatgcagatttcctctggaggaaggcaccttttttagcctagggaaatcctcatgaataatttgccaagggcagggattaacaaacaggcaaatataatcaaacatataaggagacagagcaagaagagtaagaataaggagtgcacaacagacagcaaaaaaagatcataaagttttcagatattagaattaccaaacactgatgactttaaaatggtagcctgattatagaaataaaagataggcttaaaatgccagcagggaacaaactatatcaagttacataagcacatttggaaaaaggctaaataagacttctgaaaaatactgaatataataactaagtaagtggtttctgcagcaaactggacacagttgaagagagaatgtgtgacatagaagaagtattagaagaaaagttccaaaatgtagcaaaagatatgaaacaatggaaaatacagaagagtcattttaaaatgtagagaatatagtgtgaaggtctaatatgacacttagttggagatgtggaagaagcactatagaaagaaatagaagcaatatttgaagagagagtgactgaaaaattacttgaactgttgaaagacaccacattcaggaagccaaacacagattttggatcaggacaactaaaaagaaatctacctctggacatataggaaatgtgaaaaaacaaagataaatggaatgtccaaaagcaaccagaagtgggagaaagacataatcttaattgaaacatagttagacggatagctgacttctcaatagtaataacaggagccagagtacagtggaatggtaccattagtatgttgaaaggaaataactgtttacctagaaactctatacacagagaaatcatctttcaagtctgagtgtgaaggacaaacattttgagacaaaccaaggctgggagagtagactagtagactctaaacataaaggatatactttgggcagtagtatattatctggatggaaaattgggatgaagaagggttcaagaacaaataaaatggtaagtaaccatatgggcatgtgtaagtgaacagtagtaaaatatgttttgtggggctaaaaaaagtctataacagcaataacatagaggtcagaaggaggaaatcgattcagattgcactgaggtgcttgaattattcaggatctcagtaaaaaagtactgatttagctttcattattcctaaattaagtataatagaagagcttcacataagagggggcatttcctgagtgctaatgctctgtttcttgacctgtgagtggtggttatgggaaagtggaagagtaaggggagttattgcttcatatttacaagctaaacatgagataaatgctttaagtacttatgcatatgtatcttatatttcatttttttaaaaggttaagaaaataggatataaactatatacttcaaaaaggataaatagaaaatagtcacataggaggtcacatttgccttcatagttctgaaaaaatacttaaatgacattattcatcctaaacctatgaacaaaatttgactagtcccacaggaatgtgatatttagtttgttggtatggaaacaaaaagaattaaatcttatttcatgttaccttaaaatttggtgatgggtactgatctagttgttgagttaataatccttaccctttatctgtcaaatctgtcttaatctcagatgtctattctgtctttcctgataaaagtcatcttacatacttttagaaggcaatgaaaaatgtctaaaggaaaggaccaatagctacagttaattgtcctctgtgacctgaaaattagttgtgaattttgaggtacacactgagctgaaacgtgtaaattaatacaaacattagatattatagtagcaatataataataggaagttgcagaatgtttatagatataggtaaaaagatatatttaaaaataacacggctgggcatggtggctcatgcctgtaatcccaagactttgggaggctaaggcaggagaatggcttgagcccgggagtttgagaccagcctagacaatatagtgagaccccatctcttcaaaatttttttaaaattagctgggcatggtggtacacacctgtagtcccagctattcaggaagctgaggatctcttgagccaggacagttgaggctgcagtgagccatgatcatgccacttgccctccagccttggtgacagagtgagaccctgtctcaaaaaccccccaaaaacaacaaagcaggacatttggtaatttactgtgataatatatactttgttttacatgattttaaaaattattgtggtgcctaaatatttatattctctgttccaaaaaatttatagtcttaacccacatttgacaatcactcagtgtcccctctaatccaagttctacaataatattatcttaaagggtaaatgttgggcctgttaaaatgtagtatgctactcaacagatcactgaccaagagttcaaatgtatgtcttacagtaagcataccagatattgggagacagtatatggttgtgtgagaagtaaatgaaactcagaacttttataaaacatttataaaaactcagaacaaaacctggcacataagaaacagcctaataatgttagccattgatattgtaatgtgaggacataaagtatattaaacttttagatatagtcttatttatttcttatcttagatagtatactagtcgttgattcagctattcttactctttaaaaaaagtgctttagtgtggcctgaattaggataaggatttgagggcatttgtaggtatccctttgcacacaactgtgtagatggcacagtaggccagctgttactaaagacattcattatacagttactagaagtcaatgaggcactatttttccgtcatctcttgggaagttgttttctttcttgcctttggtctacttgcctttgggactccgtaactaaatcaagcactctaaaaattagcataaacacacctttgggttttattctcatacaaaaatctatctcctcaaaagaccatcttgggacatttaatctcccccatgcccctccccccaaaaagattttaactttttatttttaatcaattgtagtgtttttataatttagtggtttcagggcaaagtagttatgagaatacacaacttttatatattttgtttacttagacattttgtgacttgggcaggtgtgttaatctctttacacctcacttctttattttaaatttaatggaacgtattttctaaagtagttactagtgttaatattcttccattttaaatatttattttaaggaattctattttttcaaacaaatacacagtaaaaacataagggttccaatccaacctaatatgtatatctttataacatcactgttttgctcttttggatgtaataattttgttagcctaaatcaagagaactggtaaatagagagaaattactgtactcaatgtgtcttagtgacttcaaaccctamcctagaaactatatggaaagaggtatccgtgacagtaagatgattgtggattccacttaagttccaaaaactttttcaattaaactgtttgggaagaattgtttaaataaaatgtattacacattgccttctttgggtggtattgaacttaattttctccccaaaatgtatcagtcatttaatgagattctgcttaagaaatttaggacacccatttgtgagggtaaattccattcatcagggcaaacacagattgcaggtagccctggaactgaggaatagctttgattgttggtaacatttgcaggtccacagcttcctgatcaaccttacactactctgtaatttcatatgtctcttttttggtgttgaaaaccccaccttcctgatggctgggcttccacagctgctgcttcttaaagtaagcatcagtatgatgtttgaggatttcatattgctgagagcaatttttgtggaggtggcgatggcagatttctggtgtgttcctcgtagaggaactcgactgaggaccagagatccagttacaggtaacaagccaatgcccacctgcttcaggaaaatcaccttcttgcctctgtggcggccagtgaggatgatcagagtgctcctgggagctggcttgcagttttctcacatgctaactggcttgcagttatttgctgtggctcaacagctttcaaggcacgtcttccctaagataatatcaaggcaatttgtgaagtttaatcacctgggtaccactgttcttgtcaccgccaactgattttctaatggctgcaagaacctctttctgttttcaatcttggattcattgggtgagtatttccttttatgcatgtctttcctagaatacatagcagatcaggcatatctgccaattcttctgacaattgacaggatttyggcctttggatttttagccttgaagttaccccttttcaccttgccactagtgtcagccttcttgccttcaggcttcttctccttagtatccggcttctcaactttttcacctgccatcttgtaagatgggaaagagctgaacttaatttttttgataactcaggttcaccaccatgataacattctcaggggttactgagataaatagctgtatatctataaaacaattcactgaataattaactagtacctactgagtgacttctgtgtgccaggcatttggattggataccaggtatatgataatgaacaaaaccagatggaatttctatctttgtgatataaagtctagttgtgaaaaaaaaatgacaccacctaaatgatcacacaaatgtataattttaaaccttgatcaagtgctatgaagawaatttttattgttaagaatattactttggaattagatcacggttcaatcccaaattgaccaattggtagtattgatcctgcacggcaatctgaattagatagaatgagaacagcctgttttctgggttgtgttgtgaagatcaaatgaggtaacaaatgtgatgttattttgttaattttttacgtgcttattatctgtcttcctggacttgaacataagcttcaggagagtaagaattttttggtctatcttactgaactgttgttttccttagtacttggatcagagagtcacatcatgggcatgaattaatatttgttgaatgaatgaaatgttgttcatgatttcttgcccatactcagcattcataaggaatattttgtacttaacatattttttcttccctatagtcagattgatattctatttgttgctttcgtggctgtctcctgcagttctgcttctcttcctaatttgactctggactagaaaatcagataaccaatgtgatagatgacatagatgtctctgtaataagagatatttaaaaaaatctgtaagagagaaggcctctcttaaaagcaacaagaggatggccaggcatgatggctcatgcctgttaattccaataatttgagaggctgatgcaggaggatcaccagcagttcaaatccagcttgggcaacataggaagactccatgtctacaaaaattaaaaaagtgagccagatgtgttgatgcatgtggtctcagctgcttgggacgctgaggtgggaggattgcttggtcccaggaggtcagggctgcagtgagccrtgaccatgccactgcactccagcctaggtgacagagcaagatcctgtctcaaaaaaaawaaaataaaataaaaaataaaaaaaggaacaggagtgaactttcatgcataaacttactgagatctctttttgttatttaaaggccttttaaacatttcagctacattctatatatatagttgatgttgccagataaggaaactcataaatgaaatgttacagttcttctaataaagcatgcttattatagctttatatcacattatatcataattcttgtatataattaggttagaagaaatttaaatttttaatttttaaaggttagcctcattctatatactaatttttgtggatcatatagaacttttgtttgatataattctcttaagtatttaagtattaactcatacttaaatatgaattcttcataattttaagtattaatggtaatgatctgtcctcacagtgcatttaaagtaaacttacctggttaattatttcccagggcatgtttgcacacytgctatttattgattactaactcctatcttttatttaataacaatatcgcctagaaaagtgtcaagagttttttttttttttagctttattaatcttggcagtatggtctcagatgactcaccaggaactgtgcaactaagaagattgagtcttcaaacaaatgaagcattacattttattatcatagggatagtttttggttttcagatctcatactctaaaatgaagataaaatgttataaattaatccttgtttatcccatggggtattatctttgagaaagtgaattcctacttgaaatagtgtctagatttttgtcattgtttgttttgtttttgctttaatgagtcccagaatatgacatgaaattaaattccgatgaattattgccatgctatttatttctactaatgataattatctcatgtgacatgcaactatcctttcttaattggatatcataattgaaaaactgcagttaggctggcaaactaatcacataaaaagtaaattttttaccctcaatattttcaatagtcacttctcaattatgagaaaacattgtttgttagaagcatattctaagttgatgttttcagtataattttggattcctgtgaatgacaatattatatataataattattaataaatatttaattacaataaatatatacatagtttactttttcctttataactctaatataagcctaaaacctaatattatataagtgaatatattaataaattgtggtacaaccactagatctaatatcatgtaactatacaaaattatgtatgtagaaaatatataatcatatggaaacatgcttatattgaaatattaagtggaaaaatgcggacactaaaattatagtacagtatgattttatagaaaaaagatgtgaagggtataaatgaaaactatatttctgttgagaagatgggattttgaaaaatatttcagcttttattcaagtttttttgtatttttgttttccttaaaatataaaatagaaattatctgtaagtgcctcagatcagacaaatatttgacaaactttatgtctcaattatcaggtagaaaagtatggctatcatattggtttcctcgtctctttgcctttatgtgttaaaaagtcccactttaagttaagagccagagataagaatgacagatagttctgtaataattggtattttcccccatctactcttattgtggaaaacttcagacatatagaaagcatagtaaagtgaacccacatattytcagctttaacagttttcaaaattttgctaattcttttgttattccttttcctgacacactttctttttytaggcatttgtaaagcagtttctagtgattgttattttaactataaatagttctttatatttcattgataagccttttaacatacctaccactttattatcacatttaatactgttaaccataatttgttagtcttgaaattctctatccatattcaaatttctgcttgtctcaaaattatctttttatgattaatttgttaaaacctgtatccgaagtccataaattacatttggttattatgtctcctaagtctcttttattttcaatagccatttcaaaatgtattagacatcctaataaaagagaaaaaaaaaggctgggcatggtggcttatgcctgtaatcccagcactttgggaggccgagrcgggtggatcatgaggtcaagagatcgagaccatcctggccaacatggtgaaaccccatctctactaaaaacaaaaattacctcggcgtggtggcacatacctgtagtcccagctacttgggaggctgaggcaggagaattgcttgatcctgggagccggaggttgcagtgagccgagatcgtgccaatgcactccagcctggcgacaaagtgagactgtgtctcaaaaaagagagagaaaaaaaaaagaaatcactatattgctcagagtatattttcttgccatctttttaatatagtcttttcatagtttagatctattagaagtaattttatatctttttcagttaatattatatctgaagctttttatacttaaaatagttatttcccacttcagtacctacagtaagatggatcttaatttttctttctaagacggagtctcgctcttgttgcccagactggagtgcagtggtgcgatctcggctcactgcaacctccatttcctgggttcaagcgattttcctgcttcagcctcctgaacagctaggattacaggtgcccgccatcacacctggcaaatttttgtatttttagtagagacggggtttcaccatgctggccaggctggtctcgaactcctgacctcaggcaatctgcttgtgtcggcctcccaaagtgctgggattacaggcatgagccactgcgcccagccttaatttttttagatactacatcttatttttaaagaatgtcattttacagtgtactacaacacattttcttattgttagagttgaagagacttccatttttgagtaagagatgtagtttctctacttattacccagagtaagggaaatggtctaggaactgttttctctataccaggcaatgccagatcttgatctatttgatcatttgagagaggtatttacttttgccaattggaggataaataatcctcctattaagtttaagtcttattttttattagtttcttacttttttttttttttttttttgagatggagtctcactctgtcgcccagggctggagtgcagtggcatgatctcggctcactgcaagctctgcctcccgggttcatgccattttcctgcctcagcctcccaagtagctgggactacagatgcccaccacctcgcccggctaatttttttgtatgtttagtagagacggggtttcaccgtgttagccaggatggtctcgatctcctaacctcgtgatccacccaaatttgattactgccatcctaaatgccattgggttatctgaatatgtgatgcattcgtatctcccagtactatcaaggataaaggaggtaataaattcagatattggcaggactttgtgtagtagggaaagtatggaaaaggttgctgcctaccttagttacaataggttgaattcatcaaaggacttccaactggaaaaggagaaacttgaaatagagattacaagtcatgcaataactatgattcttaggtgcatatgtttatggatatattagtttcctagggccgctgtattttaagccactaattttgtggcttaaaataacaggtgtttcttattacacagttctggaggctagaagttcaaaattaaggtgtcaagatcatacttcctgtgaaggttctagggaatccttctttgcctcttcctagcttctggtggttgcctgcagttccttgactttccttgtaagacatacacacatcactccaaactctgcctctatctttacatggcattctttgtgtgtctcttcttgtaaggaaatcactgatttgatttagggctcatcctcatccagtgtgtcctcatcttaactaatcacatttgccaagtatttccaaataatgttacattctgaggttctgggtagacatgagctttgaggagacactattcaacccagtttagtgggtgtgggcatttgtgtatagttttatgggtggagggggacacctaggaaactatcataatctctgtgagaatgcacattctaattttcttcagagtttatttctacttttacttaagtagtttaatttgagaatggtgtgaatgtgggggaaatgttagaaaccactgacttaaaacaatagttttaaattgtatgttgaataagtccctatttgctgctattccttgaacttagtttccttggctccatagtgtattttgaagcaaagggcaggacatatgcaccatgaagtggtaatatgaaaagatggaggccattagtttagcatgtgctggtattcgtctatttttccataaagtatagctcttcagttaatcattgtcctggtatacaagggaaatttttaattatgaccttcttactatgagtaattcctggcttttgaggatatcttaaggatatggatctttcacactcctatgctgaagatctttgaattttcttttcctgtgcttgacatcgagtgctgaatgtagtttagtacatgtcttagattccaaatgtctaaaagcatttttatcacatatcattaagtagcagcawtttccaaagcagtcatctatcatgttgtaatctttctgattggatggtaaatgcatccttacaaattatcagcattacagtatttcatcaaaatggaatatgcactttgggaggctgagacggaaggatcgcttgagcccaggagttccaaaccatccaagaaatttgacgagactctgtctgtatggaacataaaaaattagccaggcatggtggcatgcacctgtagtcccagctactcagaggcctgaggcaggagcatcacttgagccaagaaggttgacactgctgtgagctgtgttcataccagatgcactccagcctgggagacagaatgagattctctctgaaaaacaaaaaaccctaactttgtaaaccaaagagtcagatttagaaggaaacttcaaggcagtggaaatatatatctttttttaaagttgtcttgtagccttctatttaatagagcttctttggctcttagactaaaatgtttaacatttacttattcaccaaactaattatttaggtgtagtgtgtgttatgcatatgctgtactaaacccagggctggaatgataaacctgacaacatatgtgtatgtacagtatttctccattccctcaacaaataatcatggtgtatctgctatatgtaaggcataatatcaggaatttctgatgcaaggataaacaaaatagacacagtctctgcactactgacagtctagaaaggaagacagattaatcagataatcatgcaaataaatataaaattatcactatgaaaatgctaggaaggagaggtgaacagtgagtgctcacctttcagagctcagggaatttgacctagtctttggagggagatcatgcaggagctagaaaacttccccaaggaactgactttggatctgagagttagatgattattggaaattatgtagtgaagaggatgtgtgaagattctaggaagcaaaaataacatgtagatcttatacagtatgaagtgtgaattatttataaagaaaggaagcagtatggttggaaatgtcaacctaaggaaagaaaatgaggcagaattaatatagagactttatttgggtcaaggttgaggactgcagcctgggaaacattgggaagtgctccatttggccttgttacaagcaggtgtttttttgtttgtttgttttgtttttctgagacacagtcttaccctgttgcccaggctggagtgcagtggcacagtcttggctcactgcaaccttcacctccctggttcacgcgattctcatgcctcaggctcccaagtagctgggactacaggcatgcaccaccacgcctggctgatttttgtatttttggtacagacagggtttcaccatgttggccaggctggtctcaaactcctggccccaagtgatccacctgcttcagcctcccaaagtgctgggattacaggcatgagccaccatgcccagccacaagcagataaggcaaaaagggacaagggactttgtctaagaccacaaaaggggctgatacaaatttatgtttgacatgaattcttactggtttacaaaagtaacattgattactaattggctatatgttgttgaactatagtttgttaaggtgtctagtgtatggtatgttttggctacttggtgtcagttagtctacagcccacatagcaagtggcttcaagagttaggtatttagctcaagcggggagcaagacatgactgctgtcacatttttgtttgtttattttttatttttgtagaaaaggtctcgctttgttgcccaggctggattcagactcctaggctcaagagatcctcctgcctcagcctgctgagtagccagaactataggcatgccatgtcacattttaatgcttctctgggcctggtaatttaaagggacttgaatttctcagattaaaaatttgttttctttctcagaacacagagaacaagggaaagcatcatgcaagatgagacaagggaaagcatcatgcaagatgaggcaagagaactatggaagaggccagacytatcagggccttttaaaagattaaggatttaagtctttcaagagcaatgggaggatgttggaagattttaagcagtgtgtgtgtgtgtgtgtgtgtgtgtgtgcacgcgtgtgtgtgtgttgtagggtggcagggcaggtatgacaggatcagattgttctttccaaataattggtatagaagggactagaggggaaaatgtggatgagggagaccastttcaaggctattgagtaaccctggtacaagatagcttggattagggaggaggccagggaaatatagaaaggtataagcctgaaacccactctcactacttccccatcctcaattatttaattccttttcagaacaagttatgttatatgcctgcaacccaaaggatctaaactacatcatttggaagatttttattattctccagcttccagttagaaatctaaaaaaaaaaaaaaggaatgtattgcttcagctggttctctcccacttgtaagcttgcttttttagaagtacaatgataaccatatatatatatatatatatatatatacacacatacatatatatatatatatacacacatacatatatatatatatatatatatatatatatatatatatatatatatatatatacacatacatattttttttttttgagacagagtctcactctgttgcccaggctacaggggctcaatctcagctcactgcaacctctgcctcccaggttcaagcgattctcctgcctcagcctccagagtagctaggattataggtatgggccaccagggccagctaatttttgtatttttagtagagatggggtttaattatgttggccaggctggtctcgaactcctgacctcaagtgatcctcccgccttggcctcccaaagtgctggaattacaggtgtgagccactgcgcccagccgataattatattttgataattattctacaacaatatttgatggtggcctgttgcatcctcagtttctagggtttcatagatacactttaatctcagtgggaacactaagctttatcatttattgaaatattctttttcttctggaccttctcctcttcttattatgactttaaaaaaattttttaaggactgtcatctaggcaggagttgtggtgcacacctgtagtcctagttactcagaaagctgaggcaggaggatcccttgagcccaggagtttgaggctgcagtgagctacaattgttctactgccttccagcctgggcaacagaaggaaaccctgtctgtaaaaaagaaagaaagatttttaaaaagagataaaccytatttttttttaaaagaatgtcgtgtgatgatggtttcttatattgatttattaatgatatccttgtcttacagatatcattaggttcctattttagtcaatacttaattacctgaatcatcatctcctggggaaaaagcattagattacagaggcacaggatcaggcttgtgttgtcttcctcaaaattttctcaggattttcctcatgttttgctttcaatgaggttaattgattgggccgtctcattattgttaatgtgtgaaataagtgaatttatcagtggtttacaataaccatttacaataaccttcatccattatttatggaaatgattttgtactacattagctttgatgagaatatgcagtttgcacattgattagtagtgaaataaacatatctcacatctttaaatttccatgtattcatttatttgaggatagatgttgatgatactttgcaagaattcttattaattagaaagtgttagaatctaaggataatttgcctgcagatgggaacataagaaaagaaataaaactgaactttttttcctctggtaatatgttagcccccttagaaatttaaaaattgtatactgtaatgcaccacataatgatgtttctagtcaacgaaggaccacatatacaacagtggtcccataagattataatgaagctgaaaaatttctattatctagtgacattgtaactatgataatgttgtagagcaatgcattactttttctatgtttagatacactaatacttaccatgtctatcatgttacagttgcctacagcattcagtatggtaacatgttttacaggtttgtagcctaggagcaagaggctataccatatagcctaggtgtgtaataggctttaccatctaggtttgtgtaagtacactcaatggtgttcacacaaataaaaaataacctaacgatgcatttctcagaaggtatccccattgttaagtgacacatgactgtataacatttagtgacacaaagataagctttccaattatctttaagccagcctatgagcctctagccagttcagaagttgtgtcctttcatttcataagatgagggctcatcttctttgggctaagccttccatggggaggggaaagctaacatctcattaacaactggagttgtaaatagtggtaaaagttagttaagtaggtctcaggctctggaataagcttttaattttccctagacacatccttgagcaatgtcttttaagagccagtgtaagttctgcctaaatgtgcttctgacttgctggacaaagaacctcttttggtgctggatctactcctaacttcctggatcctacatctcctgacttaactgcctctaatgccagctacctactgaaacctgtcttcttcttgacctcgactcacttctatgctagccacttagcctgttcagtgcctaacttcatattggctctcctgtatgccttctgctcccccttgatatgacagaaaataaaatctagctgtgagattggacctgttaatttgagagaagcattataccctaaatctttcctagccatcaacatgatgaaagatttttagaaccttttatttaccgagacttaaagcattcttgctagagctctctggagacttaatattttaaaagtgaggtagttgtcatcaactccttttttctatattggtctggccagtagtgcataatcaattacgtatttgttgaatgtatgatagtcaccaaatgccatatttaattattttatttagttttaccaacacaagccattcagacayctttatttctggtttcttattactatgtaaagcattcttgaattatttactttatccacaagctaatataatattttatagtagccataaatatgattcaaaaacaatactgctatagaaaaaccatattttatatttactggtaaacaccaattctacttgaaccaaatagcatatttagaacttatatattgaacagcagtatcacataatagcagattcatttgttaatattagaatactaaattgactagcttttgtctacataactaaggttaaaattggtaccttgtagggcctgaaaagcttaattattgtatatataatatgatagtataaatgaagttaaatttatgtggcaacgagggttatcatcctcctgatgttctgatattgtaaaatatttgaaatatttaaatataatttttaaaaaataatataaagaataaatataaaattatgctcttttcatgtgtagcttaggtgatctatttcattattttatagttgttgtttctgtaacattggaaatttttaaaaaatsctaaaatgtagtagggttacagctctgtttcaaaattcactgaaatgttattaatatgtagtgcttatataagagcaactaatagccaggtgcagtggctcatgcctgtaatcccagcactttgggaggccaagatgggcggatcacctgaggtcaggagttcaagaccagcctggccaacatggtgaaaccccatctctactaaaatatgaaaactagcaggtagcaggcatgatggcaggtgcctataatcttagatacttgggaagctgagacaggagaatcacttgaaaccaggagacgatggttgcagtgaaccgagatcgcaccactgcactccagcctgggcagctgagtgagactccatctcaaaaaaacaaaaaacaaaaaacaaaaaaaacagaaactaataatggagtgatgactttagttcttttaaaaacctgtaatctatgtattttcatcatacacaaaaagaattttgtgtaaatagttaaaatactgtaattgacatgaattattgttttacaatgagcaattacattacactagtaaactcatgagcattttctaacttatggtatatttgttttgcaggagaaaatagatgtaaagatggttttcacaacttgaatatgtaatttcccgttaatacaaaatattttaccaattgttaccacaaaattggttaaaattaatacttttctgtcataatagatcaaggcaatttacatttagttttctttgtcttttttgtttgttttgttttgttttattcccttcccacgccctaattatttcatggcatttcagtgcatcagagaatttagatgagctgtcttcctccagtagctggttacttaaccagaagcacagtaagaaaaagagaaaagacaggacaagactgaaatcttcatccttgactttcatgagtacatcagcccgaacaaggccacttcagagtttccacaaacgaaaactgtacagattgagccctactttttattggactccacaggtaaggctgcctttgggaagaaaacatgatcaaagattcaccatcagcatatttcatgcatgagaagatgtagattgttatttagcataacacttattttgaataattacatgtagaaaacttacaaatatagtttaaaaatgatatagtagatattaataatactaaagtgggctttagtaattttttaaacattgcaagcagtgtactctgaaacttctcacatccccagtttttttaaagatctattatgcctaaactaatttgagagaaaatgaaatgtcaagatgatttttaaaatgtactgtcaaagataagagggtaacacaaatgtactacatatttgtccataaatgtttgctcagaagaagaaaatctgcacagctgtcagttattttggaagaagtaacgttgctttcctttttaggtttgatatttattaatcttgttgagtgctccttttccttcttctagaacataagcaatacagttttagatgctcatgcttacaatttttacaaattaagtatacttcattagaaacattcattttgtaaaacatatttttcatgtgtgaacaaaataatgggtatacttcctttagtgtacttctaaaccagctgtgatgaaaagcaaaataagttatctctagttcttgctggatatgcttccccctgacaattaacgttagatttcttaatatatcaaaggaaagaaattattgatactactatttaatattgtttctgattatcattacgttatctatttaaatatgtttattaaaataaagatgctttgttttattaggaaacaattttaagctcttttatcagggtccagttataaataggaatgtggattctgacaaattagctttcattgaaagacttttcctgcccggcacggtggcttattcctgtaatcccagtactttgggaggccaargcagagggatcacttgaggtcaagagttcgagactggcctggccaacatggcgaaaccccatctctactaaaaatacaaaaattagcccagcgtgaaaaatacaaaaatttgcccagcgtggtggcggtgcctgtaatcccatccactagggaggctgaggcagtaaatctgattccaaagcccatgttctttttataaacatttatagcaacaaaaataaaccaaaccttttgtgagccagaagtcagtaaagacagtatatttcagggtttataaggttagaggtattaggaaatatatagaaaagatgggttttgaaagacaagcagagttttgaaggttatggtgaagagaaagaaaggattttaagtgaataattggaacaaagatgaaaaaagtgatggagaatagcaaattctgttaccctcagcttatctcccatattgtcaccccaataattatttacctttctaaacttaatttaaatgtcatttctctcaggaagccttccttgacatgcccagaatggtatatatattgttatagcaccctgttttaaccttgctgagctggaatttattatactattttataatcatttcttttctgacttttcagaaaaaagtrtgttatgttttcagagaataggggctgtatctttttatttccagatctgcagggccttgaagagtacctgtctgatagaatgtgctcartaaataattgtttaatgtgttaaagaattaacgaagtggaacataggaaaatatttaaaaggcaatagagaattggaactgtgtgtgtgtgtgtgtgtgtgtgtgtgtgtgtttgtgtgtttcctagatttgcctactgcagtggtctagaatagtgatattccatatcccatagaactttcttttttttctttatggaaagtcttgagaaccatagaactttctgtaatgattcaaatgctctataaatctatactgtccaatatggtagctcctagacacatgtagctattgagcacatgaaacatggcttatgtaattgaggaactgagttttttttttcttttccatttttttttttagacatctcgctatgttgcccaggctggtcttgaactcctgggctcaagtgatcctcctgccttagcmtcccaaagtgctgggattacaggtgtgagctactgtgcccatcctgaatatttaatttattttgtttttattttaatttaagtagccacacatgggtaattgctaccaaactggacagcacagatgtagactcagacttatcctgataagtaatcagtatgtctggaactcatattttgttttctaataccatttcctactaaaaggaatcggggatttctggagaaatggctggtctccagggctggggaagaaaaggtatgattatcctggaacatcgtaatgttaacagaaagcaaggaagtgtttaaaaaaatgataaagacatgttgaaagaacacagaagctagcttgaagaggcccctagtggccaaatctaggactatttggcatcaaaataaataaggacaatattgaaccattgaaaaaataggaactcatgagtccatactgatgatagataaattggtgaaaaggaaaacttttccatatgctaggatgctgattaataaatgtggaataaacagtcaaattagagaatcattttgcaatcatcatagtaaagattgattggacaagaatcattaatgggtataactctggggtcaggattgaggagaggtttgatgaggaacaagatttgcatgatcttaaagcaggggtccccagtcccctggtcacagaccagtactggtccgtggcatgttagaaataggtcacacagcaggaggtgagcagcagctgagcgagcattaccgcctgagctctgcctcctgtcagatcagtggcgggaactcacgggaactcaaaccctattgtgaactgtgcatctgaggtatgtaggttgtgtgctccttatgagaatctaaagcctgatgatttgaagtggaacagtttcatcctgaaaccatctccccatctcctacacccccaatctcctgtctgtggaaaaattgctttacatgaaactggtccctgttgccaaaaaagttggggactgctgtcttaaagtgcctcctgccagttgccagggggcatatagtaactatatatacagaaacaaacaatactttgcctgagtgatcaaaactactgtcacctgtgagggaggataacactgtgtagtattctgactagaaatgtataacctgaatttaatcatgagtaaatatcagacaaagccaaaatcagacatacagtattaaaaaacaactggccagtattcttttaaaaatgtcaatgtcatgaaagccaagaaaggctaaggacttgttttagattgaaagagacactaaaaagatacatgacaactaaatgaatatatgatctagagcagaattcttttcaagggaaaaaaaattattgggacaattgaggaaactagactattgrtggtagattagacaaaatattttattaatgttgaattccctgaatattattgtttttgcagttatgtaagaaaatatccttattctatgaaatacacattgaaatattaagggtaaaatggctaaggcatccattgtatataataaataaacttcccttctggaatggtaccagccatgtgcaaccaaaaagagaggggagtgaaatatttaaaatattgaaaagcaaaaacaaacgctgtagtgggcagaattgtgtctccccaccaccaccctgaaagatatgtctatgtcctaactcctggttcctaggaatgtaactgttatgggttgaactgtgtccctaagaactcttatattgacgttctaacagctagcaccttagaatatgacctaatttggaaattgggtcattaaagatgcaattagttaagatgaagtaatcagggtgggccctaatccaatatgactgatgtccttataaaaaggggtaactttggtcgggcatggcagctcatgcctgtaatcccaacactttgggaggccgaggggggtggatcacctgaggtcaggagtttgaaaccagcctggccaacatggcaaaatcccgtctctactaaaaaatacaaaaattagccaggcatcatggtttgtgcctgtagtcccagctacttaggaggctgaagcatgagaatcgcttgaacctgagacgcggaggttgcagcgagctgagatcatgccactgcactccagcctgggtgacagagtgagactctgtctctaaataaataattaaaaaaataaaaatgaaaagggggaatttagacacagatgcatgcatacaggatgaatgccacataaacatgaaagttgaggtcagaatgacacttctacaagccaaggaacaccaaagattggtgttactctgttgcccaggctggagtgcactggcacaatctcagctcactgcaacctccgcctcccgggttcaagcagttttcctgcctcagcctcccaagtagctgggattacaggtgcccgccaccacacccggctaattttggtatttttagtagagatgaggtttcaccatgttggccaggctggtctcaaacttctgacctcgtgatccacccgcctcagcctcccaaagtgctgggattacaggcgtgagccactgcacccggctacatatgttttatttaaaaaaatttttattgtggtaaaatacatattacatatacatataacagagcaaacaccagaagatagaggataggcctagcagagtcttcctcttagtccttaaaagaaaccaatcctgctgacatcttgatttgacttccagcctccagaactgttatttcagccactcagttgtggcattttgttatgacacacctagcaaactaatacagtggacatttttgttagtaaggtctttgtagttgcaattaaggatcctgaaatgagatcattttgaatttagaatgggtcctaaatccagtgattggcgtccttataagagaaaggagagggctgggcgcagtggctcacgcctgtaatcccagcactttgggaggccgaggcgggcggatcacgaggtcaggagatctagaccatcctggctaacatggtgaaaccccatctctactaaaaaatacaaaaaattagctgggcgttgtggcgggcgcctgtagtcccagctrctcgggggctgaggcaggagaatggcatgaacccgggaggcggagcttgcagtgagcggagatcgcgccactgcactccagcctgggtgacagattgagactccatctcaaaaaaaaaaaaaaaaaaaaaaaaagaacggagaaagagatttgagacacagagaaggctatatgaagatgaaggcagagatttgagttatgcttccacaagttaaagaatgtcaggggccaagcagacacagtggctcacrcctgtaatctcagcactttgggaggctgaggaaggcggatcatttgaggtcaggagttccaaaccagcctgaccaacatggtgaaaccctgtctctactaaaaatacaaaagttagccgggtgtggtggcaggtgcctgtaatcccagctactcgggaggctgagacaggagaattgcttgaacccagaaagcagaggttaccgtgagcagagatcctaccactgcactccagcctgggtgacagagtgagactctgtctcaaaaaaaaaaaaaaaaaaaaaaaaaaaaaagaatgtcaggggcaataaataaataagttaaaatcaaggtgttggcagaaaaagtaaaatttaaatttaatttaattttaaaaaaagaatgccaggagccacagaaactgaatgagtcaaggaaggattctcccctagagccatcagagggagtgtagccctgccaacacatcaatttcatacttgtccttcacaactatgagagaattaatttctgttgctttaaatcactcaccttatggtaatttattatggcagtcctaggaaacttatacagagtttggtgccaggaagtaaggtgctgatgtaacaaatacttaatggtggaagtggctttggaactgggtaatgagcaaaggctggaagaattttaaggtccatgatagggaaaagcctaggttttgtgagagctcagaaggaaatgaggaaaatgaaagacaaagctgctgttatcttagagaatatgtatatcatcatgaacagaatttgctagaaacatgaatgttaaaggtgccttcagtgaagtttcagaaggaaatggggracacgttattagaaactggagggaaggctatccttgttataaagtggcagaaaacttggctgaattatattctactgtgaggtggaaaatagaacttttaagcaatgaacttggatatttagctgaggaaatttccaagtaaagtgtaggatttgttatctggtttctccttgctttttagagtagaatatgagaggaaagagataaagtgagtaaggagctgttaggttaaaagcaaccagagctttgatgatttggaaaattctcaggctattacaaaaagtgatatagcttgctctggggattacccagagcagagacaaacttttgctgggaaggttaggtatgtaactcatggatccaatcaatcatctaagcagaagccaggaacagagataaggttatccagaaagaattttgagagaacactcctgtcttaatgacatggattcccttgacatatgtgagaatcccacaaagattttgagaattttatacctgaagcaacactaccagcttaaaccaaaaggggcaaagaygagacaaaatgaaaaaggttgtcagacccccaaaattttacaggcaggaaatgcactgatagaacaactcagttgcaaacacttattacccgccaataaaaaggaaggtaaatcagacctaaatgtgacaggaaaacaataaacttctagaagaaaacacaggagaatgtcttcatgtcctcggggtggctgacttcttaaacaggatacaaatatcactaatcagaaaatactgctaatttgggctttgttaattatgaactaattttcatcaaagacagcattaagacaatagagtacacactgactgaagagatttgcattctctgtgtgtgtgggtgtgtatatattcaacaaagattttatatcctgaatatatgtatatatttttaaatggctaaaaaaaacaagaaaaaagagataacttaattaaaaataggcataaatacagttacatactttaaaatagtaaagtggtaacttttgttatatgtattttaccacaataaattttttaaataaaaaatatgcagccgggcgcggtggctcacgcctgtaatcccagcactttgggagtctgaggcagatggatcacgaggtcaggagtttgagaccagcctggccaacatggtgaaacctcatctctactaaaaatacaaaaattagccgggtgtggtggcaggcgcctgtaatcccagctacttgggaggctgaggcaggaaaattgcttgaacccaggaggcggaggttgcagtgagctgagattgtgccactgcactccagcctgggcaacagagcaagactccatctctaaataaataaataaaaataaaataaaataaaaatatgcataagacttgaacagatcttttgtaaaagaggatatccaaatggccaataaacatatgaaaatgtgtttaaaatcattgcttatcaaggaaatgcaattaatactacatcaattttttttttttttttttttttggagacagggtctcactctgtcactcaggctggagtgcagtgcagttaagtgatctcagctcactgcagcctcaacctccagggctcaagctctcaaacaatacccccacctcagcctccggagtagctgagatgactggcacatgcccccatgcctggccaatttttcctttatattttttgcagagatggggtttcgtcatattgcccaggctggtctcaaacttctgagctcaagtatctgcccaccttggcctctcaaagtgctgggattacaggcgtgtaccactgcacccagactaacatacatctattcttataatccagcaattccactcttaggaactcatccaggaataatgaatacatatacacacaaaggctctccggagaaagagagcaatagaatatatatagatatataagagaagatttattatgggaattggctcacatgattgattatggagaccaagaagtttcataatatgctgtctgccagctggagaactaggaaatccagtggtgtaattcagtccaaggctggagccctagaaccagggggaggaggatgcctggtattaagtcctggagtctaaaggccagagatccaggagcactgatgtctcactgaaggccagagaagatgaatgtcccagcttaagaagaaagggaatttgcccttcctctgcctttttgttttattcgtgctatcatcagattaggtgagggtgatcttctctactcagtcaactgattcaaatgttaatctgtttggaaaacaccctcacagacacacctagaaataatgttttaccagctttctgggcatccattcacctagtcaacctgacacataaaattaaccatcacagggctcataacagctttactcattaaagccccaaatacaaagtaatctaaatgccaccagcagaattgtggtatatttatacagcaataaaaaggatggactactgataaaacaacaaagatgtatctcccagacaatatgttgagtgaaagaagtgagaacaggcctggtgtggtggccgatgcctgtaatcccaacactttgggaaggctgatgggggaggatcacttgagcccaggagttcaagaccaccctaggcaacaaagtgacaccgtgtaggtttttgagttggaaatgtgtcatacccttggtggtggttaccagggcatatacctatgtaaaaattcattatgctgtatatctttgccatagaagtgggcatgtgccccatgctgcacattcagagtagcctatccccgttgttttggccatctattgttgcatgacagactatccccaaacgtagtgatttaaaaccattttctattatctttcatgattctgtggattacctaagtagttattcttcagccttgcctaaggtctctcctacagttgtagtaagattgtgactggggttagccatctggatgcttggatgggctggaatagctgggcttccttcactctctgtgcctcccaaaatgcaaatatagaagctaggagttcttcttaagacttaatcctacaactagcacagtgtttttctgtttaatttattaaagtgatacagtgtaggatttaatttaggagggactatacaagggcaagaatactgggagtcatggttcattggggctgtaattgaaaactactacagtccatcctctggttccctctttcatatgtaaaaaccattgaacaccttccttccaagacccctgatgtctcaacccattatggcattaggctcaggcttgaagtcttggaactcatcatcaagaatcatgtccatggctgggtgcagtggctcaaatgcctgttatcccagcactttgggagactgaggcaggtggatcacctgaggtcaggagttcgagaccagcctggccaacatggtgaaacccctactcttctaaaaatacaaatattagccgggcgtggtggtgcgcatctgtaatcccagctacttgggaggctgaggcaggagaatcccttgaacctgggaggcggaggttgccgtgagccgagatcrtgccactgcactctagcctggatggcagagcaaaactctgtatcaaaaaaaaaaaaaaaaaaaaaaaatcatgtccaggcacctcaattgagaggtagacaaacctttctgaggtgttaatgaagggtcttacagtctcatccttagatcttgacactgaggccacagttttactggcagttccctggatttgatcttttactgataccatgtctaactgtgagaaccttttggtgtgtggagtagctggaaatgagaaacagtcttatttttgaatggggaagtactggctctgttttctctaacttctgcttgaaaatgtaacagattcttttttttttttttttttttttttgagacagagtcgtgctctgtcatccaggctggagtacagtggtgcgatctcggctcactgcaacctccgcctccgaggtcaagtgattttcctgcctcagcctccccaatagctaggattacaggcaccaccaccacacagggctgtttttgtatttttagtagagatggggtttcaccacgttggccatgctggtctcgaactcctaacctcaggtgatccacctacccaaagtgctgagattacagacgtaagccatcatgcttggcctagcagcttctttttaagatcatcctacaccatccatactttatcataggcaattaaatgaaaccatttggccctttgcacattctgcctagaaaccttagctagctctatgagttcgtaatgtactccttctatactccacttttttgtaaggaagtgttacactaattttttttcctgtgtttttttttttttttttttttggtgggggagggatgaggtcacactgtgtcacccagcctggagtgtggtggtacaatcatagctcactgcagcctcgacctcccaggctcaagcagtcctcccacctcagcctcccaagtagctggtacaagcatgtactgccacacccaggtaattttaaattttttgtagagacagggtctttctatgttgcctaggcttgtcttgaactcctgggctcaaaaaatgatcctcctgcattagccttccaaagtgctaggattacaggtatgagccactgccctggcctaatttttctactagagcagtaagatggaagaggtagaggtaaactgataggaataattatttagaataattatttgcagaggttatgattcctttgctagacaggattaataaaaagcatagattgttatgcatttttacttgactttgctcattttacaacactaatgataatgtcaaataataatagctaatatttattaagcaattatgtgtcaggcatcattttaatttctgtattagtccatattcatgctgctgataaagacatacctgaaactgggtaatttatacaggaaaaaggatttaatggacttacagttctacatggctggggataccttgcaatcatggtggaaggcaaggaggagcaagtcatgtcttaacgtagatggcagtaggcaaagagagagaacttgtgcaggggaactcctctttttaaaaccatcagatcttgtgagacttattcactatcacaagaacagcaagacttggccccgtgagtcaattacctcccaccgatccctcccacaacatgtgggaattcaagatgagatttgagtgaggacacagccaaaccatatcattccaccccaacccctcccaaatctcacgtcctcacatttcaaaaccaatcatgccttcccagcagtcccccaaagtcttaactcatttcagcatcaactcagaagtccacagtccaaagtctcattcgaaataaggcaattccctttcgcctatgagcctgtaaaatcaaaagcaggttggttacttcatagatacaatgagggtacagtcattgggtaaatatggccattccaaatgggaaaaattggccaaaaaaaaaagggggctacaggccccatacaagtccaaaatccagcagggcagtcaaatattaaagctccagaatgatctctttgactctatgtctcacacccaggtcacactgatgcaagaggtgggctcccatggccttgggctcctgtggctttgcagagtatagcccccttcctggctgctttcacagtctggcgtctagtgtctgcagcttttccgggcacacagtgcaagctgtctgcagatctaccattctagagtctgaaggacaatgaccctcttctcacagctccactaggtggtgccccagtaggggctgtttgtgggggctctgaccccacatttcccttctgcactcccctagcagaggttctccatgagcactctacccctgcagcaaatttctgcctggacatccaggcgtttccatacatcttctgaaatctagacagaggtcccaaacctcttgacttctatgcacttgcaggctcaacaccacatggaaactgccaaggtttggggcttgcaccctctgaagccacagcctgagctctacattgacccttttcagccatgactggagcagctgggacacagggcaccaagttcctaggctgcacacagcacagcgaccctgggcccagcccacaaaatcactttttcttcctaggcctctgggcctgtgatgggaggggctgctatgaagacctctgacatgcagtggagacattttctccattgtcttggggattaacatttggcccctcattacttatgcaactttctgcagccagcttgaatttctcctcagaaaataggatttttctattgtatcgtcaggctgcaacgtttccaaattttatgctgtttcccttttaaaactgaacacctttaacagcacccaagtcacctcttgaatactttgctgcttagaaatttcttccaccagataccctaaatcatctctctcaagttcaaagttctatagatctctagggcagggacaaaatgccaccagtctctttgctgaaacataatgagtcacctttgctccagttcccaacaagttccttatctccatctgagactacctcagcctggatttcattgtccatatcatgatcagtattttggtcaaagccatccaacaaatctctagggagttccaaactttcccacacttttctgttttctgagccttccaagctgttccaacctcccagttccaaagtcgcttccacatttttgggtatcttctaagcagcgctctactctattgataccaatttactgtattaatccgttttcacactgctgataaagacatacccgagactgggaggaaaaaagagatttaatagactacggttccacgtggctggtgatgcctcacaatcaccgcacaaggtgaaaggtgcgtctcacatggcagcagacaagagaagacagcttgtacagggtatcttctctttttaaaaccatcagatctcatgagacttattcactatcacaagaacagcacaggaaagacccacccccatgattcgattacatctcccggtccctcccacaacacatgggaattcaagatgagatttgggtggggacacaactaaaccatatcaacttctaaatgctttaaatatatttttaatttgatattcataccccattttacttagagaaactgaagtacaaagtggaatgagaagatacacatatttagcactatttaaatgaatataaatacaaatttggtagttttctcttaaatgttaatgccgaatcttaacactacatctttcataagcttgatttctacatctgatttgaatcttttatgagtttttcagactgtttctttctatgactagcccatataaacaattgttaaaacttcacgtagtttctaaggctgtttaagaatgtttggctttcttattctaagagaatcatatcttttgctgtctaagccactttattcattactggtacactttagtttatgcttggagaatctatgcttctttgtgcttgataatgttgctttatctacctagaatatagatgtatctttagatccagaaaatacactggtaggcatagctagatgtgaaaatgtttttcagaataatactctagtataattcttaaaatataaatgtagctaatagcattctttaaaatttcacttgcaattaataatttaaaaatgtttatctgatcataatatgcttcttcagctccttcttgatagtctttatacccagttgctgtgcaacgttaggccctatactattgatgtctcagccttagacaacagaagccaccctgattaactcctggcaaaggaagttctctttcccactgggaatggtgaacagaggcctctggcatccaagattagaattcctaatacactttctatagaagcgggttgtaggtaattggacatacaaattgtttatataggaagctaatagttacaataattatattttgagttagggcagtctacttattgtattataagattttagttaataaacctaattgtttgagtaagaataagtcaagaagtgtattcaatcacttagatcagaggttattttatatgaaattaataaaagtagaaatggttggttgaaggtagggaaaagcccagagttttatttggtcatgctcccaatcaccctcctccatattgggggtggggagtagcagtggtgattacttcttctctattaatagttgcagcccttgagcaataataaataaatcaatgtgatataaatattagaaacatgaactgggcagaagttttaaatgaatgaaactttatttgcaggacactcacttatcttgtattatccccatcatggtggttcccacccctctggtatctagtgatgttatgtatgcttcctgttttctcatggtattcttcaaattacccagctcttttcttttcctcttcttatttccatacaaatataactggcctgttttgtcactagttgacctgctaatctctggtaagctgtttaccaatgatactgttactctgaagaacgctatttgcatatcaagacgctggtcttgcagaagtagtaaattaaattcaaaatggtcacattattaagattatggaatgttgggtgggaaactattttgagcaggataattttttcattttttatgaattttagcatgtaatccacaagccatttcatatttatgaaaacagctgtagtgacctaacatgtataaattgaagtaacattaataatgaatattataacctttatgaaataaggcagaactattcctattttaatttgttcatctgtgatcttttatctgtctcctatggcagatttgcaaaagtagtgtttgtagtctgtatcatcattgttatttcatagattctcaaatcataatgctgagtggtttaataaaataatccagtggtacgaattaaggtacatataataatttcatttgaaagtkttcatttcctttttaaaatgtgaatgattaggtatgtaaactttatgtgaatgcaggccacttttttgaacaaataatagaagattttaaagaaaaataaagatatcatctcatagaaatttaaattcttactggaagctgggcatgatagctcacgcctgtaatcctagcactttgggaggccgaggtgggtggatcacctgaggtcaggaattcgagaccaacctggctaacttggtgaaaccccatttctactaaaaatacaaaaaattagccaggcgtggtgacatgtgcctgtaatcccagctatttgggaggctgaggcaggagaatcgcttgaacccgggaggtggaggttgcagtcagctgagatcatgccattgcactatctcaaaaaaaaaaaaagttacttaagtagtatttttatgctgctgggaagccaactctttcttccatgccacacctactggagcatctgctttagacaatgggaattatcttagttgaggattttcttaccttgctgtaacaattctgtactccagggacttctataggttgactggagagataaatttatagcatgtataacatattcctgtgagaaaatatgctttatataattgcagataaatttggaagctaccaaattaaagagtctagaagttattttttgtagggaagcagcacattttastggtttcatactggattgtaatccttgttctacttaatagtgtgcagtactgtgcaaattacttactactttgttttcctcatccataaaaataggactaccatcatatggctacattcagctggagggccagctgtgctggcggaagtgggactcacttgctcttctggcaggtggtgctggctgttggttggggcaactcagttctcattgtggcctctcatgctgcattagctagaatggcttccttccatggcacctcaggacagtgctccaatatgacaaggaggaagttacatgcctcttgaagcctaggctccagatctttttttttttttttttttgagacggagtctcgctctgtcacccaggctggagtgcagtgacgtggtctcrggtcactgcaagctccacctcctgggtatgggggaaattcagccagatattgggcaaaattcacccccgatatttcatgtaggttcttttctgttttccctaagtgtcagccggtctgagaaataaagggaaagagtacaaaagagagaaattttaaagctgggtgtccgggggagataccacatgttggcaggttccgtgatgccccctgagccgtaaaaccagcaaggttttttttttttttttttgagacggagtctcgctctgtctcccaggctggagtgcagtggcgcgatctcagctcactgcaaattgcgcctcccgggttcacaccattctcctgcctcarcctcccgagtagctgggactacaggcgcccgccaccacgcccggctaattttttaaaaatatttttagtagagacggggtttcaccatgttagccaggatgggctcgatctcctgacctcgtgatccacctgcctcagcctcctaaagtgctgggattacaggcatgagccactgcgcctggccaaaagcagcaagtttttattagtgattttcaaaaggagaggggactgtacgaatagggtgtgggtcacagagatcacatgcttcacaagctaataagatatcacaaggcaaatggaggcagggcgagatcacaggaccacaggaccagggtgaaattaaaattgctaatgaagtttcgggcacgcattgtcattgataacatcttatcaggagacagggtttgagagcagacaaccagtcggaccaaaatttattaggygggaatttcctcatcctaataagcctgggagtgctacgggagactggggcttatttcatccccacagcttcgaccataaaagtcagccgcccccygaagcggccatttcagaggcctaccctcagggacgcattctctttctcagggatgttccttgctgagaaaaagaattcagcgatatttctcccatttgcttttgaaagaagagaaatatggctctgttccgccttggctcactggcagtcagagtttaaggttatctctcttgttccctgaacattgctgtcatcctgttcttttttcaaggtacccagatttcatattgttcaaacacacatgctctacaaacaatttgtgcagttaatgcaatcatcacagggtcctgaggtgatgtacatcctcctcagcttacgaagatgacgggattaagagattaaagtaaagacaagcataggaaatcacaagggtattgattggggaagtgataagtgtccatgaaatcttcacaatttatgttcggagattgtggtaaagacaggcgtaagaaattataaaagtattaatttggggaactaataaatgtccatgaaatcttcacaatccacgttcttctgccatggcttcagccggtccctccattcagggttcctggcttcccgcaacacccgggttcatgccattttcctgcctcagcctcccgagtagctgggactacatgtgcctgccaccacgcccggctaattttttgtatttttagtagagacagggtttcaccatgttacccaggatggtctcaatctcctgacctcatgatctgcctgtctcagcctcccaaagtactgggattacaggcgtgagccacagcgcccggccctattgtttgtttttttgagaaagactctcactttctctcccaggctggagtgcagtgtcaacgatcttggctcactgcaacctctgcctccagggttcaagtgattctcatgcttcagcctcttgagtagctgggattgcaggcaagtcccaccatgcccacctaatttttgtatttttagtagagatgggatttcaccatgttggccaggctggtctcgaattcctggcctcaagggatctgcccaccttggcctcacaaagtgctgggattacaggtgtgaaataccacacccagcccaccagatcttaaacaacataatttccactgcattctataggacaaagcaagtgacttggtcagcccaaattcaaagggatggagaaataggggcatacacacagggatggaatttacagcaaaggggaaatttcagcaaaggggcatacacacagggattgaagaaatttgtgaccattgatattaaacaatctttgccttggcgtctgctttgggacacagggacagctctaaattaagacattagctgaatcagcaatgaagaaaagaagaaaaaggctaccttctagaggtgtgttgatattaaataagaaaatacatttgaaagatacttaactgaggcctggcacratggctcatggctgtaatccaatctttgggaggctaaagcaggcagatcacttgaggtcaggagttcgagagcagcctggccaacatggtgaaactctatctctactaaaaatataaaaattagctggacatggtggtgcatgcctgtaaccccagctacttgggaggctgaggcacaagaattgcttgaaccagggaggcagaggctgcagtgaaccgagatcataccactgcactccagcctgggtgacagagcgagactctgtctcaaaaaaagatatttagctcagtgcctggcatataaatcctcatcaaatgtgaatgacgttgatgatgataatgattcggtgattagcacaacatcagggaatcagtgatggttttggtgtggaggagtgaaatgataaaagtattacttttgaaagattaatttggttccttttacagtgcaatttgcagyggggagagaatggaggaacagaaattagctaagagaggctgtgcacgatggctaggcgaaggttcccaaacctcagttcttgacttctacacaggctcaacaccacatgctcaacaccacacgtaagctgccaaggcttagggcttgcaccctctgaagtaatggcctgagctgtaccttggccccttttagccatggctggaactgaagcagctgggatgcaggcaccacaccccaaggctgcacagagcaggggggtcctgggcgcagcccacgaaaccatttttcctcctaagtctccaggcctgtgatgggaggggctgccatgaatgttgctgacatgaggtggaaacattttccccattgtcttggtgattaacattctgctccttgttacttatgcagatttctgcagcaggcttgaatttctctctggtaaatgggtttttcttttctactgcattgtcaggctgcaaattttccaaacttttatgctctgcttcctcttgaatgctttgccacttagaaatttcttccaccagatactctagatcatctttctcaagttcaaagttccacagatctcttggccaggrgtaaaatgttgccagtctcttttctaacacagggcaagaatcacctttattccagttgtcaacaagttcctcatctccatctgagatcacctcagcctggacttcattgtccatatctctatcagcattttcatgaaagccattcagcaattctctgggaagttccaaactttcccacatctacctgtcttgtgagcctccaagcctctaggaagttccaaacttacccatatttttctgttctcttctgggccctctaaactgtttcagtctcttcctgttacccagttccaaagtcacttccacattttccggcatcctgatagcagcacctcactctttgcagtaccaatttactgtgttagtccgttctcacactgctgtaaggacatatccaagactgggtcttttataaaggaaagaggtttgacttacagttcagcatggctggggaggcttcaggaaacttacaatcatggaagaaggggaagcaaacatgtacttcttcacgtggcggcaagaagaaataccaagcaaaggggaaaaagccccttataaaaccatctcgtgagaattcacaagaacagcagcatgggggtaactacccctatgattcaattacctcccactgggtccctcccatgacatgtggggattatgggaactacaattcaagatgagatctgggtggggacacagccaaaccgtatcactgatacatagaaacacaactgatttttatgtactactgattttgtactctacaatttttctgaattcatttaatagctgtagtaactttgtttgttctttggggttttctgtatctaggaacatgttgtctacaaatagtattttctttcttcttcttctttctcctttttgtctttccttttcccatttcccttcctttcccccttcccttcctttcccctcctttttccctttcctacccttccttcttccctttttatttctttttcttgcctaattgctgtggctagaacttctagtgcaatgttgaatatcagtaccagatcttggagagcttttagtcttcatcactgagtatgatataaactgtgagtttttcatgccctttatcatgttgaggaagttcagtccacatgtttgtgagtatatctcttagaatcccagaagttgaattgctgggacaaagagtttgtacatttataaattttaattttttttgccaaattgccctcaatagaattgaaccaaattacattcccaccagcaatgcatgaggctgcctgtttgccaacatctttataacacagtaaattattaaaattttgggcttttttgccaatacaataggtaaaaaatggtgttatagtctagttaccattttttttttttttttgagatggagtctcgctctgttgcccaggctggagtacagtggtgtgatcttggctcactggaagctccgcctcctgagttcacgccattctcttgcctcagcctcccaagtagctgggactacaggcgcccgccaccacgcccagctaattttttgtattttttttttaattagagatggggtttcaccgtgttagccaggatggtctcaatctcctgaccttgtgatccactggcctcggcctcccaaagtgctgggattacaggtgtgagccaccatgcccggccgtctagtttcaatttacatttattttaatatgagttagatctggaccatctttgcatatgtttaagagccattatattttctttctgtaaactgactaactatatcctttgcccatttttctgttgaggatttgttgcctttttcatattgatttgtaggagctctttatctatattaggaaaattatattttattacattttttctgatatatacatatatattaaggaaatttgccctttgttttttatgactttttttcacagtttgtcttttctctttaattaatgttttctttctatgcagaagttatttgttttttaatgtgattgaatttatcaaccttttcattatactttttgggttttgagtcagaatttaaaatttttcttgagttacaaaataattatcttgtattttttttctgtttgtttgtgttgacatgaatctcggtttatttcccacgctagagtgcagtggtgtgatctcagctcactgtagccttcgcctcccaggttcaagcaattctcctgcctcagcccctcaagtagctgagattacaggtgcctgccacaatgtctagcttatttttgtatttttagtagagacaaggtctcaccatgttggccaggctggtctcgaactcctgatctcaaatgatctggccacctcggcctcccaaagtgttgtgattacaggcatgagccaccacatctggcctgtttgttttcactagagattattttattgcccaatattacttgttcaggagaagtttgaaaagacaaaacagtccattgtaatccaaatgatacttcacctatgaccaaaaaaaatggaccattatcttcccttcaggcctttaaataaacttgaagttacctgataaaagcattatacacattgcatttaaatggctatagttcttagtatgctatcattcatgcttccctttcatattgatgagcataaggttagttagcatctgcttaacatgaatgagacttgagagatgcagaattccaccaggttaagcccgccaagttgacaagtccagttcatatgtgcaaagctgatgtatgcaaaatttattgtctttccatttaggaaggactcctattgaggaaatagagcctcatgtacaatagcagaggcatatacaactatttagaatagcctacttattatgtctttccttctttcttttcttccttccctcctcctatcttctagtaaagaaatattaagtacctaccgtgtgccacacagtgcctaggcattggagatactgtggtgaacatgacagaaagggttcctaccttcatagaacttatatttaattgagagaaaaagtgtaaatgttaactaatgctgtgctttggggaaaaaaatagaactaaagtaaggagatagaaaattctaggaaaaaggagtttattttagataggagagtcagaagtcctttctggaataactgacgttagattagagacttgattgaagtgaggagggaacaaaccacacagagatttagagttaaagcatttccagtatttctgagtcattaaacatattaaggaaaagccatcagcaagaaggagaatatagctgaccttggtagaaattaataattcaaagaacagacaataacttccagggcagcctgttgtactaaagaaacaatcatgaaacaaacaaacaaaaaaaaagtgcctttagaaatttaaaataaggcctagtgtggtggctcaggcctgtaaccccagcactttgggaggctgaagtaggaggatctcttaagcccaggagttaaaaccagcctaggcaacatagtgagatactgtctctacagaaaatttaaaaatgatccaggtatggtggtatccacctctagtcccagctactctagaggataaggtgggaggattgcttgagccaggcagtagaggctgcagtgagtcttgatagattgtgccaccactctccaccgtgggtgacagagcaataccttgtctcaaaaaaaaaaaaaaaaaggaaagaagaaagaaagaaatttaaaataaaatagctataattaaaattttttagtataagaactagaaaatagagtcaaataaatctcccagaacacaaagagaaattatacatgactatttccacagccaaaaagaagacatgatgtcttcagtttgataaggcccacaaacttttgagcattgtgaattaaataaacagcccactcctaaacagattctcatgaaatttctgaatatctagaagataagatgttaaagcttcgaagggaaaacagctaacaaaagcaaactatgacctataatgggtaagaatgaaattgccattgaaattctcattaatgactccagatgaaaatagaataatgtctccaaagttctgaaggaaaatttttttgattgtaagggtgaaataaaactgtcattattttcacatgaagtaatttcatagaaaatccaacagaatcaataaattattagaactaatactatttttccacattagtaataaccaattaaaaatatattaaaaaacaaggtacattcccaaaagcatactgtcaattttctgagaattgactatatatatatatgactactatggaaacaaatttaaaacttttatataggatataaagacttaaaagtgggagacatccagtttcctgaatttaaggtaatcttagtcaaaataccagctgtctattttggaaacttaacattcaaaagtgaatatggacaaataaaggtccatgaagagaagggaaggagggtagacaggactaccagatactgacttaacagttataaagtatgtgggaactagctcaagtataaacaaatgggcccagaatgagttctccatagcaatagtatttatgtagatttaaatattaagatatgttaaaggctcaagtgatcctcctgccatggaatgttcatcatgtacattccatgcacacttgaaaagagtgtatgggctggatatggtggctcattcttgtaatcccagcactttgggctggtcgcaggagtttgagaccagcctgggaaacatggggaaaccctgtctctacaaaaaaatacaaaaattagctgggtgtggtggtgtgcacctatagtcccagctactcaggaggctgaggtgggaggatcacttgagccctggagtggagtgtggtacaatcacagttctctgcagccccaacctcctgggctcaagtgatcctgcacctctgcctcccaagtacctgggaatataggtgtgtgccactgtgcccagctaattttttttttttttttttttttctgtagagatggtctcactatgttgccccaggctggtcttgaactccttgggctcaagctatcctcctgccatggcctctcaaaatgctgggattataggtgtgaaccacgcacctgccactcttcaaagttttaggcatccactgtatcccctgcagataagggagactactatatttatatagctgcttcagcaatctaacgactagtgcttgagtggtatgtctgctctatacttttgcttttacctattactttatatttaaagtggttttcttgtggatgttatatatttgggtgtggcttttttatccaatctgaagtttctgccttttaattagaagtgcttagaccatttatacttgatgtaattttgatagggttaggtttaaattgaccatcttgccatttgttttttatttctcccatgttttttgttcttttcttatgccttttttctgccccctggaattaattgttcttaaatttgcctggtgttgtttcactctatgcatacatagattattatttagcaaaagattgaaagacaccctgtgaggatttctggagcctttctaggcttaacttcttttctggcattctgttctgcaaatgacagctgcctcgtccttccccaactcaaacatctgtctctgccagtcagctagactgctactccctacttgagccacctyctttgtgccaaagtctgggtatataccaccatgcaacaaactggtagatttagaggatcacctcatttgttgttcatttcccagagataacactcatgtgctgcctattgtccaagttctgaaaacagttgtttgacatcagtcctatagctgttctccttcatgggcagaaatgaaaatgccttttctactatcaaaactgattttttaatagcaactccaattgtagctattacttaatatcttttctcacaacaagtttgaaagtgtctgtgatcatctgtcacacattgcattccttgagaaacactataatgtctagtttcttattttagcttctaatttcctactatagtatggcagccaacaaaatcattttattgaaagaaaatttttcttttaaaaatagggtctcactatgttgcccactttggactcaaactcctgggctctagtgatcctcccacctcagcctacctgaaacaattttttaaaggtcagagtgacctttcagttgctaggtccaattctgcacttctgactccagtggtatggtaggaacattaccatagaaaaacctccaggtaccacaaaatagaatgtaaaatataaagaatattttgtataatacataaatcatctggttaaaaaaaaatcctcagaataagagaaagggagaggaaagagaagtgtggtgggtggaggggtgggggggtggaagagaaacatactaagaatccagagaaataagtgacccattgaattctgaagctttcttatgaatattttccaattaaactccatagaagtttttattttatattcctgagagtgactggaggcaaaaacctggaagatgtgaggagtcattttagaaatccttcataaagccaagagtctccaatggccggctatagactttgtgaatgggtgaactagaactcagatctactgtacagagatgcagagaacttgcctttcttagccttgggctgtggttggaaagggaaaatagagtgcctgcatagaatttataataagtcaggcctcttttatttttgaagtttgaaatcatgctactcaagtgtttttgtttttgttttgaagataagaattgggttttaaaataggttagaacagtagttctagatggctggctcagacaaatagacatcctttctaggggaataaactctcaacagaagcttccaaatgtcccatgaacaaaatttcaacaaaaatgaattcccaataagaaaaaaaaaatcacagaacacacaacactaaggccacatgatgagagtcagtagaaatgaacaaacaaaaacaaaaccatacacgtatgtattaatatatgcatgcatatgaatatacaaaataaatctctctaaaatgtgtatatgtatgtgtgtgtgtatatatatatacacacatatatacacacacatattcctacaaaataacttcaaatattagaattatccatacaaaatgtaaaaataagtaagtttaattttttttaaggaaaatacatcagaaaattgctaatatgattaaaaagggtatagacagagctaaagacagaattgcgttgaaagatcaagcttaataaaattacacaaaagacagcacagagagaaataataaatggaaaayatgaaaaaattaataaaaataaaggttagaggagaaagtctaacttaggtctccagaagctggcttctgcaaccactattaccctgaagctctggcaggaatttttaaattggatgcaaatgccagtaatgatagttatggggatgcttttggtgatgttttaggaggcatgaagcacatggccagttttcacttcagagcatttttgaccaatgttttcctcagaacatttgatgaatactgaggctgcacagagcaggatgcttaacacataaatggcaaaagtcccttataagcagggtggcattgttcagtatactcttaagattagaggtctggatgactggggataattctataaaataaatcaaatatttggttgaaaaccttgaggggcaaatcatatgtatgaatcatactagggctgcaacccagatttaactgctcatactctcagattaaggagagaagtctctattttatctagctagtagtggggatagagaacccccactagagaaagatcgcatcctttggaacctatgtggtttttaaaacataccatctgtcattgaatcaaagattagtaagcatggtgaaaaggactacatgaccaaaattcaagaggaaaaacagacaatagagacagatactcaagtgattctgatactggatttagatgggaaaaactattaaatgattatttaaaaggaatgcctttaaatgcattttatttagagaatgcctaaataatcctgaacagagtgttagtagaaatacagacattaaagccattctgataaaacctcagatggaaatgaggaacatgttattggaaactagaggaaaagtgatccttgttataaagtggcaaagagcttggtgaaattgtattcatgttctagtgtcttgtggaaggtagaaattgcaagcaatgaaattggttatttggctgaaaaaatctcttagaaaattgctgaaggaccaacctggttcctccttctgactgcttatgatagagtgccagaagaaatgactacaagaggaactgttaatcaaaaagaaagcagaacttaaaagatttacaaaagtcttagcctattcatattgtaaagaaagagaaagcctgctttggagaaaacactgagggtatggccaaggagccttttgataaagagattagtatcaatcagccctctctacagaagccaggagatattctccaagacaatagaagacaatagaagaatggccctgaaggcaatttagagataatggaggctgcccctcccagcataggcccagagtgcaaagtcccttcgggcaaagaagtttcaaatatggagccacctgagcctgtgagacctctcagcatgcactgcccaatagaaccgtacattatgggttctgctccccaccactggcttctctaaagtgtggctctggtgggcctgatatagtttaggctgtgatggccaaccctgtaggcagcacaggtggtagattttggtggtgtctacacagtctctgccaacacttagggagccatggcttaggctatgtgtggcaaagccactcatgcatgattctagcctaggagagccacaggcccttgaccccaagtcaccttgaatggcagaggcagaataaccacctggaagagccacaagcttgggactgcagccaatagctgtggagatgggaccatagcctactgggtctggaaggcaaagcatcaagcagaagaaggttattctggagccttcaggtttaatggaatttgccgtgttgggttggtttgctcaaaacctgtcatttctttcttctttcctattcctttattttggaataggaatatctatcctatgcctctcccaccatagtattttggaagcatgtaatatgttggttttagaggttcacagcctcaggatgaattgtacaccttgagtctcacccatatctgatttagatgatatttagatgagattttggactttggaattttttagttgatgctggaatgagttaagatttttgggctgctgggatggaatgaaatattttgcatgtgagaaggacatgtattttggggggcttggatgcaatgctatagactgaatgagtctcccccaaaactcatatgtagaaacctaattcccaatgtgatgttatttggatagggcctttgggaagttaataggtcatgaggtcattaatggaattagtgcccttataaaaggaaccccagaaagctcttccttccatcatttgaggttacagccatcttatcagtgagaaagtagacctttgtcagacactaaatctgccagcactttgatctagtactttttagtccccagaactgtgagaagtaaatttctattatttacctagtctatggtattttgtcatagcagtctgaatggaccaagacagaatcttatggtaagcctgctaaaaaagtaaagacacagagaaaatattaaaagcagccagagcaaaaaaggcacattgctttcaagtgggggcagtaataaaacctagagctaactaatcaccagaaataatgagaaccagaagaatgaaagtatccttaaagtactgaaaaaaaatagccaacccagaattctgtattcataaaaatatctttaaaagtggtaagatgcaaatgtttcagacaagtaaaaactgagagaattcggagaaagcaaacctacactatgatagtagcaaagggagaagtaatatgatcccacatggaagtagggaactgtaggaaagagctatgagcaatgagatgagataaatatatgggtggtattcatgaatgttgatgatacaaacaataacaccaatatattgtgaggtcataaatatatatagaattaaaatgcctaacaatggtaatgcaaaaacaggagagtaaatggagttctaatgtcctagtatttccagggaaatggtaaaaggaataatttgtattatactgtaaaggccagctggctaaggatgcacattgtaatctctatggaaaccactaaaagaaaataaaagaataaataaattaaaattaagagatgggaaaaatttaagaaaatatttgattaatcttaaagcaaagtaggaatcaatgaaatataaaacatgcacacaatatagaaagtgaacaagtccagttactggctccttgaagaggttaataaacttgataaactcctagcaggattattcaagaataaccttagcttggtttgacatgttaaaaatcggttaatgtggccaggtgcagtgactcacacctgtaatcccagcactttgggagatggaggcaggctgaatcacttgaggtcaggagttcgagaccagcctggccaactggtgaagccctgtctccactaaaaatacaaaaagtagctgggcgcagtggcacgtgcctgtaatcccagttactcaggaggctgaggcaggagaatcgcttgaacccgggaggcagaagttgcagtgagccgagatcctgccactgcactctagtctgagcaacagagcgagactgtctcaaaaaaataaaataaaaaataaaatctgttaatgcaatttgtcactttataatagagtacagaagaaaagtcatgtaatcattttattaggttcaaaaaaagcatatgattaaattcaacattaatatattttttttcaagttcttttggcaagctaggaatatattctgataaagaaccataccccccccaaaaaaaaacaaaccctgcaatccatatcattcttattgtgataaattaaaagcattcccattacaatcaggaacaaaacacatatgtctcctttgatcatttttattcattattgaattggtgaacccatccagcatggttggaactccctaaaaaaaaaactagtaggattgaaggaaaaaaattacagttatcattcccagctagtatgtttagataatcaaagactagaagaagctatatattattagaaaaagaaagtttatagcaaagttgtagaatattcaatatataaaagttaattatatttttacatcccttttatgattgaattaataaatattaaagttaattgggaaaacatctagcaaaatatttgtaaaactttttgtagaactggaaaattttatttaaagataacctaaataaatgtagagatatgccatttatggatgctttggctgtgatattctaatacggtttttccttgcagactttgccttcaaaagaaacagcatttttaaacactacacaaatgccttgcctgcaatcagcttcaacttggagtagctatgaacacaattcggagtcttacctattaagagaacatgtatcagagttagattcctctttccattctgttctatcattgccatcaggtaagcctccttgtaacaatttctaagtaacgatattttctgtactgaaatctaatcctctaaatacagagaatctaataaatcttattttatcaattttttttcagtagatattagaactaagcaatgccttgacaattaaatttgttgtagaggaattaatctagtcacatgcacggttaatgttctatctgtgtaagttgattctttaattccttctaaaccaacttgatttactttgggaaattactaggtttttatcttgttaaattttgagcattttattggtaacatggctgtgctgttgaaatgtttctgagtaatggtaattcagtgttctttttctaatgtgctgttatacatggaggtttccctgtcataaaatatttctccatttataatctgcattgaatttctcaatgcagagggaagaaaactgcrtacctataagtatagtcaacctcaagagtatctgtactttataactgagtaaatgaggcttatacatccttacatctctaaagtgttttgttttgttttgttttgttttgagacagggtcttgcactgttgcacaggctggagtatagtggcgtgaacatagctcactgcagccttgacctcctgggctcaagtaatcctcccacctcagcctcccaagtagctggaactacttgggtgcatgacaccatacccagctaatttttaaatttttttgtagagatggggtctcactatattgcccaggctggtcttgaacttctagcctcamgtgatcctcccacctcaacctcccaaaaatgctaggattactctaggtggttttaaattttcagttcttgatttttgtggaacctttacactcttgtctatattggaactaaagtaaatatttaggggagaaagaaaacatccctcacattggttatctccggttcttctttactgggggayatctcaacttagcttttgttccattttccgcttatggttctgatggtcttttaaattctcaaaatcaagggactgatttatttgtaaagcactatgttttgaacctgtctccctgccctgaatctcaatttagtttttatcagtagtagagtggtttcttagctacaccattaccttgatttaagtttttaacaagaactattttattctatatttgaggaaaccttaataatatgataaaataataatccatataacaataataatgtagctaacatttagtcttagcatatactgagccttgtatatattaagcacattacattttcttgtttaattcccacaactccatgagaatagatatctttgttctgttcatcttacatatgagaaaactaagcttcgtgatactactcatccaagattactcggctaataaatgatgagccagaatttgaggtagtcattctccagaaccaaactactcaccattactttactgcctgttttcttattagcaaatatatttctctgatgacataaccctgagagctggtataaatactctttatcctaagactcttatgccccctctaataaatgagattagattgtttatctactatttcatgatatccattccttcttacattcaataaaaatctcaatacctactatatgtaagtactaaataaatgctaggagtataaatacaaataaatccctcaaggtactcgcattctagtttaaaacaactgaaaggtaatgtttcaaagcaatgaaatatttttacaaaagctgacaggtcacgtgcgggtattaagaaaggcacatagaccgaacaaggaccttttcttgttagatcatgttttcccacaaattgcaaagaacagtggtagaattggtgatactctcctcataagtataatattgctttggagaaacaaatgcaacaaatttatgttcaggtaattggaaaatatcagaatcctgaaatgtttaaggagcattttaaaggagaatatttagtttttattcccattttcattttgtcacctaattttcatatgatcataatatcaagattcaaactcatcttacctctgtcccttggtacaaaccccacgatgatactcatgaactaatttttgttttgcatatttttccacacctgagtatggatctgccactaagatacattatttgaagaagagatcatttttttctgtttaaaatccagacccagccaggtgggcacagtggctcatgcctgtaatcccaacactttgggaggctgaggtgggaggactgcttgagctcaagagttcaagaccagtctgggaacataataagactttgtctctaaagaaaagaattttctaattagccaggcatggagttgtgcacccgtagtctcagctacttgagaggctgaggtgggaggattgcttgcgcccaggagattgagaatgtagtgggccagaatcatgctactgcactccagcctgggcaacagagccagtccctgtctcaagaataaaaacaaataaaaaataaaatctaggccctttctgggtctatcctcatttatgtattcaaatgagtttccttaaagtaccttctttcagtagccaaattttcactattatcaactgctttataaaatatgttctcaaggaaaagttaggtgtctcttaataaatgctttttaagatgattttgttttttcattcttggctgaaagaaaaaacctttagtaaatgtgaagcataactacttcattgcttaactcctctttggttgtgagagtacagaatataaacatagtaaattgaaagtctccaagcctctatttaaaaacaaaactagcttgtcaataggttttaatctttataaaagtatattcattgtgatatataatatggtaaattaagggaatgtgaactttgatgttttcataaaaggttgcatctgacttatagtggttttctcccaagacgttaaaagcatgtaattttttggaagcttcattatttcaaatgcaaagtttgtagggatgggatggaatggatttagagtcagccagatttgggtgtaggttttcttaaagacttcttgggtatatttgtttccattcatctgtgaatagtatttattaatacttataattactgttcatcttatgtactattttaggaagttcatgaagttgtttctctgttagctttttaatttgttgattaagtgcacctaaccagtaatttctaaaatactgctaccaacatgcttggaaagagtattttgtcacttccgatagttgttacatctcaaacttttgcttattttcttaagcttatgtgctatttatagaaagaaagcaattttaatgttacaatctgtaatcctagtattacaaagagtggtatttgaaaataccttttttattttatttttccagatgtgcctcttcattttcactttgaaacactgttaaaaaagactgaaataaaaggcartcttgmtgaaaataaatttgtagatgaatatatcatatctccatcacctggtatgtcacatttacagttctkgtactctatatgcctttttatgtctttatacttactatttttgcattctaagaaaaataaaatctaagaaaagaatacatgaaaatccttaatttttaatactcactttttacaactcatgtacacataaaatacaagaacaatcttaacatgaaatgtgcgatacctattgaattgtaattatgaactattactgataaatataataaaaatttaaataaatgtggagaaacagcatttctgtatggtaagatcaataaatatataaattcttcctaatagttcatatgattaatgtaatgtaactcgaagttctcatagaatttgtttaacttaaaataattctaaagcacaatgggaagactaaacaggggaaaatataaaaggaattattataaaaagtttagagaaaatctagcccaagcacatatggaaacatgacaaaaatctataataatgtagaatctattttgtttatatttaagaaaatagatcaatgaagtaaactctatagttgattatatatcagggaagaattgtatattagtgggaaagtggagaaccattggttctcatggagagagtctttcccagtaaaattcttttacatactcatttaatgctatgaatcagaataagttctagttaattccaagaattgtacataaaacattaaaactacaaaataaaacttgaggaaattataatgaaatgtttatgagttctgtaaatgtgggtgagttctatgcttggaagcaattagaagaagaaagaaaacaacatattttgattatctacaaagttaaaatctaaacatcagaaaagtcatataaatttaagataaattatttctacatgaaataatctacctcaaaaactcgagtcaaatgaatacctgttagaactggggtcttattataaaataaatttataaaaatcagcagcttttataagtaccaatagtaactagatagcctatgtaaaggaataaattctgttagacatattgacaatgaaaatataaagtatttttaatcaaacttaacgagtacctacatgaggactacttcaaaagttcagtgagaaacatgaggacattcctatatggagagaaatatcctgttcctgtcagaagacagtatcataactaaagttgtcaattttccccaaattaatttacaagtagaatataatcctaatcagaatcagaggtattattggaacgaagttattctggaagtttatctcagacagaaaatgttgaatagccaattacatttttagaagattaatagcaggactatgaagttataatcactaaaacatggtggttctgatagaaggcagatcaagggagcttaaaaaaagcctagagacagaaggtggtatttcctaccatgttgataaaatggcttagtcaataaataataatgacaacaacaacaaattcttatgaagcatcatttatatgtcagcactgattgaagggctttatattacttaattatttaagtctgtataattctataaggtaggtattactattctccttgactaatcttccccaaattacagttgagtaataaaagagccagaattcaaacccaagcagtctggcttggagccatgctctatataactaagtttcctttgtaatcaaaggcattaaataacgactctttggaagaattaaaaactgatatcactaactcataaagcactttaaaacaaatttaaggtggatgaacattaaaatacatttcagttggattaaaaagttaaatgttaaaaatgaatgtcttaaaagaataacaagaaaaagtaagtgtacttgatgataataatgaaaataatattaactgagcttatagtcagacactatgcaaatatttactacttttgcctgcaacattaatgattttaaacattataatcatcaattttggcacaactatagtaaaaatagcaccctcaaatatcttggatattaagaattgatacaagccttttgaggagctctgcaaaatgcattacaaggcgtttaaactacgtatttttttataagttcagtgtggcttaaaaactcccttgtttattttgtacctattcccaataaatgtttactggactgttaaccctgcattctgacccaactattccatttccaagaatctagtctaatcctaaatatgaaagcttttttcgcaactgtattcatcttaacatgtttttgtgataatgaaaaattagcaacaacttgaaaagcataatagggatatggttaaatacattacagtggaatatacagccttaaaaaatatcttaaaagttcatataaggatggaaacctacttatcaaagaatgttgtgatataaaaggataaaaatattttacttctatatctggtaaaattatagtcgtgtagaaatatttattgttatatcaatcaaatgcaatgtatggaccttgttgagattgatttgaataagcctgctgtttatagacacacatataatttttgaaacagagaaatttgaacatggactagctgttagatattaatgaattattgttaattttgctacttgtaataatgcattgtggttacataaacccagacgtactttttcagtttgttagagattcacactaacatatatgtagatgaaaagacatgtctgggatttgcttttaaatactctagcaaaaatgttggtgggagagatgaaacaagattggttataagttgttcactgctgagacggaaggataggtatacgggagttcattattctagtctcctttgtgtttatttgaaaattttccacagtaaaaattaaagagaaaaaagatgaaggcaccaaggatgaagaacagttatctatgcttagggggaaaagcctaaagaaatacagaaaaatataagtattatgtgcagttaccttttaatgatgcgatttcacttgttggaatttgtcccgagamtagattgttttcaaaagggaaaaaaatgcatccatgaagatgattattttaagaatgtctctaatagcattatcattatgatgataagtatcatggccaacagctaggaaatagctaaagaacattgtttctaatcacggaatgttatataaccatctgaaaaagtaatagagtatgtgataaaaatataagtatgcatttaattaaaattatgatttcatacttgaaatacatatgaaatataaaacgttattgactgaaagagtatgcaaatatgaaaatatatgctattagagattagataattatatttcttttaatgttgttctactatttgatttaaaaaaaataaggcaggtcaggtgcggtggcccacacctgtaatcccagcacttagggaggctgaggcaggaggatcgcttgagcccagagttcaagaccagcctgggaaatatagtgaaaccccatctctacaaaaaatacaaaaattagctgggcatggtggcgtgcacctgttgtcctagctacttgggaggctgaggcaggaggatcatccgagcctgggaggttgaggctgcagtgagccatagttacaccactgcacctcagggtgggtgacaaagtgagaccctgtttgtaaaaaaataaaataaggcagttaaacgtgttaggcacacaattaaggggaatgcataaataatgtaatgagaaatttcatcctatatatctgtcttaaatagctggtcattaatttttcttttgctgttagtgatttgagttcagaatttattgagcacttagtgccaggcagactattaagtgctgaagaatcaaaggtgaattacaggaagtcaaaattataatgtaatggaggaagacacaaataactattatatagtataatggacatagatgataaatacctttgaaggctgagtgtggtggctcatgcttgtaatcccagcactttgggaggctgaggtagggggatcgcttgagcccaggagttcaagaccagcctgggcaacatggtaaaaccctgtctctacaaaaaatataaaaattaggcaggcatggtggtgcatgcctgtagtcccagggacttaggaggctgaagcaggaggattgcttgagcccaggagcttgaggctgcaatgagcaatgatcgcatcactgcactccagcttgggtgacagagtgagactctatcttaaaaagaaattatataaagaagatataaataaggagtatgtaactacttagaaggcagaaaaagagaggttcagggagatgagaaatgggcaaggagaggaactccagaaagttggtgatgcctaagtgcagcttcgactacttaattggaatttacagagaaagaagggtggagcgttccagattagtgcttctcaaactttaaaatgtaagcaagttacttcggggatattgttagaatgcagagtctgatttagtaagtctggaatgggacctgaaattctgcatttctaacaaggtcccaggtgattcagatgctgttggcccatactgagtaacaagtctttaaataacaaaaacaaacatatgtcttgtcatggagacatgacacagtatgatatattcaaatatctataaataaggccaggcacagtggctcacgcctgtaatcctaccactttgggaggctgaggcaggtggatcacctgaggtcaggagtttaagaccagccttggcaacatggtgaaaccccgtctgtactaaaaatacaaaggctagctgagggtggtggtgcacacctgtggtcccagctactcgggaggctgaggcacaagaatcacttgaacccaggaggcagacgtgtagtgagccgaaatggcgccactgcactccagcctgggtaacagagtgagacttcatctcaaaacaaacaaacaacaacaaatatctacaaataacttggcattcctgtagggtaagttgtgtgaaggcagtagacagatctttgcttggatttatcctgtatggtccattagatttggcagtttacaatggcattgctgatttcaggcaacaagcagagaaaagccaaactgtagtggkttgaaaagtgaatggatgactagtttaatcatgaggaataccagacaaaaccaatttaagggtttatacttaccaaaatgttcaaagttatgaaagttatggaagacagtggaactgtttcagatataagaccttaatgagatctgacaactgcaatgccatctgcaatgaatagttgaaattatctgtaaataacattatagagatattggtgaaatctgaataaggtctatagattagctaatggtactgaactgcatggctacataagagaatgtcctttgttttgagaaatacacattgatgtatttagggctaaaggggcatcatgtcagcaactaaatttcatttgtggtctgaaagaaggaggtaaagcaaatgtgatacgatgttaacatttgggggatttcagaaaagggtatacagaaattttttgttctatttcaagttttctgtaattctgaaattaggtctcagatagatggaagaggaggaacaatagcaccataacccacacaagcaagccagaaacatagagctcagtctttgtcacccacacttcctccaacttggtctaaaccaattgccaagttgtcaatatgatcttatgtgtttgagttccttttgtgccttcgactactctcacagtccaacatgatctcttatctatactgctgaaatagacttttaatccatttttccctttaatcactgtaggcagtgacctcctcaaaatgcaaatctaatgtcacacctgctccccaccccatccctttaaatcattcgagaaggaatattcttaacaccttaaagccctatctacataggctggctcctccctcatgattctttctcaccatgcttccttactctacagtacatagctgttcagttcccaaatttgtcctgttcccttgggccattgtacatgctattctcctccttcccctagctatcagctatttctgttcatatttggagtctgtcacttcatctggggaagcctttcstagagctcttactagcactcttatacattctcagtaacatcatgtagtttcacaactgaaatgaatattttcctatcacattacaattgcattccttaacacctgtaaacgacaagggctgctacaaatcctagttttgcttacctagggtttagaataatgcttgccatgtaattggttctctgtaaagttgttgttggatgaataaaagggaaggaagtaaagacaggatatatgagaaatgctatgaaagtgtgatcttaggatgaactctaggagaggattgggagagcaagaactgaaaggctgggaggtttatcartagaacaggtgaagaggatgtgtagaattgtcatacatttcctacggtttcaagggtccatgaaaaccttacaagacagtaacgaattagaaggaaaataaatgtgaaaaaaacatttgaataaaatttaatttaaaaatcaacttttggccgggcgcggtggctcacgcctgtaatcccagcactttgggaggctgaggcgggcggatcacgaggtgaggagatcgagaccatcctggataacacggtgaaaccccgtctctactaaaaatacaaaaaaaaaaaaaaaatagccgggcgtggtggcagccacctgtagtcccagctactcgggaggctgaggcaggagaatggcgtgaacccgggaggcggagtttgcagtgagccgagatcgcgccactgcactccagcctgggagacagagcgagactccgtctcaaaaaaaaaatcaacttttgtgaaagttgattccttcacaaaatttgatgttttcagaagagtggagaattgcttgtagaaaataagagaaacgttaattgtctatgatttgcttaaatgctacagcaaaatgttattaaaagaatggacacttttaacacctacacacgttttaacacacacatacattttaaaatccacctctcacaattctagttaccattttagtacgtttagattactcctgccatgctgttttcttgtattaataactttcagggtattatcatctgtgatgcatttatgatttttcatttgctgtttgacatgcaagtgcatcgttgaaatcttagggtttaatattgattctggaaaacacttcagctatcacttcttcaactattccctccttttcactctttctagtctcatcttgttaccccattgcggtctttttccctccatattttctatcactctgttccatcaagttatggaattcctcttccagaccctgattttgattttcagctgtgtccattctgtttcttagcctagtgatgattttaacatttgaacaattacattttctatttctgacatttctccagagggcctcttacctgtttctcttggcaatactgttttaaagagttgctaatctgtattccatgaatgcttcattatttcttgagatggttcttccacttgtggtttgtacctcttttttgattgtgttggtattcagatttttggagttttctatactcatcattgaagctgtgatactcagttaaaactcttctaccactgctgtttatgggacacttttgatgggaagggaatttwtacaacatttgaaattttcagactaatttggggatgggcgggacatttcaaagcagggcacctgggcattgccttctctctccaaccattcatttctctgcctaaagctctgattctgttagtctgactgagatattggcatgtgcagtcaatatccagatagttgtcctgctcccagttttcctttcttgtgggtctagagcacctttagtggcgtcacacatctttgtggcagtacttcactatgtgcttctgctctgggtttcctcttcaaattccatatagtattagtcttttagagattcctcagaaattctgctttacaggttccactttttgcttgcaaatgtggatttatatgtgcctatctgtgcatgtacctatgtaaaacrtatttgtctatcatgtttagggtcatttgccatcttgaaaccagacactccttgtcagctggtaggccatgccctttatttcagtgtgagtttggcacttcagcttacatatttctttttccactcctttccacatctccaaacctttcaaaaaaagaagccaatttggttgttagaccaaggctggaaataagggggttcagatatacaatcatgataacgctaacatttactgcacacttatcacatcagacacttttacttactactacaggaataaactcatgtaatcattatccaaggtcgctgctattatccctattttacagatgatgcaactaaggcatcagagatattaaatgattctggttcttgctcgcacagtctagtctgaccatgttgaatcttacttggtcccaacttatttccagatttaaaggtaagcaagaacttaaagattctgatcgccaagatttatatatctgagccaatcctcactctatcaagtttctgtaatttggaagactttgagaacagatcatcttcccttttcatccccctcaaaaaaatggagaaaatataagaaactggaaattcctggggatgtttttagttggagttgtgtgtcttggtatttatgtttatctgtaattttgaactggtatcttaaaattctgcagttacaaataaaaacagattgacatgttcactgtctgtgttaaggaactaaaacttaatatttccttttcatttgttttagtacatagtactctgaatcaatggagaaatggatattcacctatatgtaagcctcaaataaggtcagaatcttctgcacaactgttacagggaagaaagaaaagacatttgagtgaaacagcattaggtaggttaaagtgaggatataagcagtagtgataaatattaaaaattwaaaattctgattttaaaataacctctcatgggagtttataatccagaacagccactaataacacaaaacatctatgagtctacaaacatgaaacagcatattcgtagttaatttagaattatttgtggactggtatctacccactttatggcaattaagtatttccctcctatgttccctgactagttgtcttctaccaatcagtccctggatgggatttaatcttcaaagttgtgttctatgctcaaaataggctagtgcaaagttgccttacagaaactgttaaccatttatggtacctactgtggagatgttgatgcactgcagattcctcaggattttgagaaagtcaacaagattcaacttatatatatatataaagctttaaaaacatctaataagatgcaacatgaagtatacattacctaagatataaaatgtttcacttaaattgactgacactttagatctaacttcaagtttgatgtacatacaggaataaaataaagaaatgtcatactacaaataaataactagacaattccaaaagggtaggacatctggtccagcctgtcaaaagtcaatgtaatgaaaaatgatttattctagactataagaaacctaggagacaatggccaatttttatatatagatccttatctgaagaaactagctataaaggacttttttttaacaaatggagatatttaaatatggactgggtattagattttatattatgcaggaaatattctcattttaaaacacttgtactaaaataagggcagtaagtaaacgcatacatatatatatttactacacacacacacacacacastaactgggaaccaaaacaggaaaaaaaaaaaaaaagaacttggaagatatacagaaaatactaacagaagtaaacttctaatcaatatcctgagagatatgagaaatttcatctatgaaacaagaacaggatgctgttttaaaaaaagagtaccagagaacaagtactttcggaaacatgtacttataatagcagaattttttcaaaaaattaagagtgttcagaagaccaaggacagatacctcacataaattaggataaaaagtcagatatgaaaaatgagattagataagaaaattaagatagttctggtggttcaactatgaataggagtcacaggaaacaagaataaagggatgagatgagggattattcagggaacaataagaaatatattcgataaaaactgccaaagccccagaaaatggaaataacttgtggcatgactgcaagtaaggctcctcttttttcatttccttttttgttttctaatacacgaatttaaacacacacacacaaaacaaggaatcaatcacctgtcatctaattaggaaagtaattctaatgatattagacttgtttaatgtgtaacattcaatggttctttccatggcaggagaaagaactaaacttgaagaatctgattttcaacacacagaatcaggatcccatagcaattttactgctgtttccaatgtcaacgttttatcaagaatccagaattcatcacgagtaggtttttccatatgttgaactctaaaatagctttaaaaataaaaacacctgattttgaaaataatttatattttgctaatctataacagccttactagcacatattaacagacatttataactatcttgttagaaaacaatatatttgattcatacaacttatttttaactatgaagctaaaagttcattaatatttggttatagcttctttttatgtgttaaaaatttaaacattatcatgatcatctctattccttaacatattaagctaaataaagtcttactaatgagaattcaggactttcttgttcttgtcctgttttttgtttgtttgtttgtttttttgttatctggccagggaatagagaggtcaaaaggtgggagggtttagaaatgaattccgaaactcaggaaccaggaatgcataaatgaagagtatactgaagggctgaccaaaaatgtttcactgcctttcctaataaaaagtggttactgatcattttcattgacatttagggtgatgtatgttggtcttttctgataaagagttttgcatttaagacctattttttgtggtcttaaaaataagcttgtatgcttgcacacataaatacacattacacatctaccaagagattgttctgatttacaaaagatagaaaaatgttttattttttggttttcttaacattttttagtcagactttataacaatgtatttacaaaaattatgtaacgtgtactgccatatttacayaactgatgaaaggagggtatcattacaagtaactagacagtactgtaaatctactgtaatcctgttttgcagaatactgcacgacggagattgagaagtgagagctcttatgacatagataacattgtgattcccatgtcattagtagccccagctaaattagagaaactccaatataaggaaatacttactccaaggtatgtatacttacatcttcatatttttcttccttccttccctaataaacttaaattttcaaagtgaagaattttaattaatgaaaggagcatccttctcccagttccttcatagccatggaggggaaacggtgaaaaaaaaattactcgtgccttaagtgttatatagtatcacaactttatttctcagtttttattaagatttaggaattcctagactactttagcattcttagtcttttttattattattatccagtgttatctactatgtatatgacactaaaaggtactttagtgacataaaaactatagcaacaaataatccttgcccttgaagatacaggtgtgacataagttgcaaagagttctacrttttcatggggtattcacactgtaagacagtaatacctgtgaccaaaaaaaaaaaaaaaaaaaaaagattttgatgcattgccaagtcagcaataaacacattcaaaagatgagtgggaaggtctgggaagtcatccatgaaggaatgggaaggtggagaaggtatttacatagggatacgacaacaaaggcacaggacaagtgtgtaaggcttagccagatactgttttgtgcaggttgataatggaaggctaaaaacaaagttaggtccagattgataatggaaggctagagacaaagttaggtccagatttgtggaggtccctgaatgccatacacagatctgctccctactggcagtaacgttagccaaactttttagaaatcatgaatgcagcttcttaagaatataaatgacaccaggaagtagagacagaaaaggctgcaaacagagacaggtgggtgacaatttcagtcaattgctatacatctctattctaatttcatttcttttactacttcataattactttgaggtattaagagcataatattctagaagagttatatgagaactcaatctgtggatacttgttgcataagtaataacatttgtggctatgacgttctatagcaaaaatatatttcaacttgcaatggtaggctggagctagctggctgagcagatagttaaatatagaagayttctgtgagccagttattaaactactgatggctcaaaaggggctatggtaggtattttcacaccaaagaaattggcaaacatacaaaccagggtttttttccttctctgttactttttggccaggccagtttatcagcgtaccactgacttcagtcagtacataattattatgtataaaatgyagctatacagaacagactattcaccataaggccaaaaataaagtctcattttctcttttgtccttttctcataatacaaatgtttttcttttaaaaaattaagtattaaaatacaacaatttgaaccatggaagtgccaaggaaacactaatacatttagctgtgctgagtataaaattgccacatttaaataaataaaagctgtttaaaattggtttttatcttcaacagctggaggatggttgttcttcagcctttggatgaatataatttaggcaaagaagaggtaagctgcctttcatttaatgggataattgcacattatgtattatgaaacctgcttactttgacattcagggaactaaaggaatatataagccctttaacttacactgatttttttcttttcacttatgaaaaggaagttcttttaaaagaatattcgaaaaatgttttgtgcaaatttgactaccagcataatatagaaatacacaataatttaaaaagccaaggccgggcgcggtggctaatgcctgtaatcccagcactttgggaggccaagacgggcggatcacgaggtcaggagatggagaccatcctagctaacacggtgaaaccccgtctctactaaaaatacaaaaaaattagtcgggcgtggtggtgggcacctgtagtcccagctacttgggaggctgaggcaggagaatagcgtgaacccgggaggcggagcttgcaatgagccgagatcgcaccactgcactccagcctgggcaacagagcaagactccgtttcaaaaagaaaaaaaagccaaaagaaaatatagcatttgtttatgagtttttgagatactgaatttacgtgaatatccacattcattgtcagtattaattatatttttctgcatgagattagtctcactcattatttaagtttaaatgccattttcagaatcttaggaccaatttgctcttcggtttagaaaattttggactttaaaaaagtaatgtggtaaacatatcacgtaatacctgtagagtctcgggcgtaaaagtaatcagacattaatgtttctgtagtgaaatattcatagttgagttggataaacactaaaaatagcctcacatcatttcagatcaggctatgtcaccaaatgaattatgaaaaatttgtttttgcagatttttggattttggaattgcaggtaaggggttgtgaataggtatggataaaattatatcaagataagattatagggaaaaatactgtataaccaaactaattccaaggtgatggtctctagaagatgacactgttgaagacacttggtttctgtcaagtaacaatctttctatgtccagtggtcatgtttttcaactactaaaatttaccttctaatgccctttcctcttctaatgtattcttccttacttctgaatgatcctagccaagaaacccaaattcttaaacaccctaactaaggtagtattccaggttcaaaacctagataagtcattcattaaattaatgctgacttgtctaagattattagttttacttttatctgatattaacatcttcttagaatagtatgtactccacaatggacratccataaaaactcctgaatgaataaaacattaagactactggtactaagctatggcaaatggaaagtattacgaactcatctgtagcctaccgaagtcttcaaatatgaaccaataggaaacaagtatttttaagttttttgaggtgggaggattgcttgagcccagaagttcaaggctgcagtgagctatgactgcaccactgcactcactacagcctgggcgacagagacccgtgtctaaaaataacaataatgaaataatttttaaaaaattttgactccccttttacaggaatttggagttcatctcataacatttgttctctcaacttacacagatagcatttattttagtttgcttcctactgttttctacatgagaaactctttgaaacctgatcttatatttctttttttgagacagagtctcgccctgtcacccaggctggagtgcagtggcacgatcttggctcactgcaacctccgcctcccgcgttcaagcaattctctgcctcagcctcccgagtagctgtgattacaggcgcctgccaccatgcccagctaatttttgtattttttagtagagacgggatttcaccatcttggccaggctggtcttgaactcctgacctcgtgatccacccacctcggccttccaaagtgttgggattacaggcgtgagccaccgtgcccagcctgatcttatatttcaaaatgtttctgattaaaacaaaaatctttatttctaattccagatagaagatctttctgatgaagtcttctccctaaggcacaaaaaatatgaagagagagagcaagccaggtggtcactatgggagcaaagcaagtggcacagaagaaacagcaggcaggttacaaatttaaaaccccaagccatagaatccatgtgaaatgaacaaaacctctgcatgaattytgggtgagaccagtaaaaaggaaaacatgctgttgtaacatcagctattgtgcaccagaagtaaaatactacatagaatgagcttgtattcaaaatatatttgagctaattatataatgatgaaattagtttctgtattttcctctcttatgttgtcagcctcaggaatggatttaactaacaaataatgtgaaaattctctgtatatataaagtaggtcatttcaatctactttaataatggacctcacactggggactggagtttaggtaatccattttaacatcactacttccaaaatatgtttttctttaaaaaaataaaaaatttctcaagaaacctgtttaatctaaaatgcaaaaagtctaaaatacttttagaaacacaaatgagctttgagggaaggggaaataaatcagacataattattatatatatgagaaaattcctattttatatttattatacatttgatcatttttaaaatagccaaaactcaaaaaggcaagattgtgtgaagtctggtagtcactttagttaaggagcatctttcatttaattagtcagacaaaagacaaaagcaaacccaaataaaaaacaagaataaccctccccccacaactgttataattcggtaaaatatttcataaagtactatttcatcctctgagtatgaaaataataaatagcaccaggggaatttttaaaaatctttgggcaaaactgtttaaagttaccaagttaacttgactcagtgataccttgggttgttcataaattttcaagacctcaaaaaataaaaaataattgtgttttcctgattttcttgctagagcttacagtaaaaatgttgaaggacaggacttgcttttgaaagaataccctaataacttcagtagcagtcagcaatgtgctgctgcaagtcctcctgggcttccttcagagaaccaggatctgtgtgcatatggcttaccttctttaaatcaaagtcaagaaaccaaggtaagtgtaatatgtatgattaaacttcccattccttgacttttaactacttgtttgtagaaactacttgaaaaaaattaagtttattacatcattacataacaaattcaataagttaggtatagaagatctgtattgcagcattttgtgtccactactaactataatcaccttgtgtaacaagtcaatacgaacttccaagtacttatttatctattagagagtggaagtrctatcaaagtttcattacgaaacaaacctgattaatgaagaatagcacctgctacatggccaaagttagctgctatttctttctcctcatatcttaagatttttacatgcctcaccacagacccagttcctactttaaagggactgctttctaacactgcatccataaagttcttacacctttcttcctaaatagatactgaaaaagaactagatctagaatggaatggagattatagaattaataggcaagttgcagaaagctcaggaaagaaaaagttaataggtacctttaataatgaaaatgaagatactgtagaagtatatcaaacctaagaacactttcccaaagtactcttaggtcggaaatgaagaccactgcctatggcagcatttcctcttcttggcagaggcaaagtaaagaaataaatcccaaaagtcactcaacaattctcaatatattccattttgagttgctatttaagttgaaatgaaaaattgtacatttatgtgctaaagaacagaacaattattacaatatagacatgtacagattacttgttagatgaatttaaacaaaacaagttagttgaaacttaactgaaaatttttcccctttcagtctttgtggtgggaacgacgggcttttccactgaagggtgaagacatggcagccttattatgtcaagatgaaaaaaaggatcaggttgaaaggtcaagcacagctttccatggtgaaatcttcggtaccagtgtaccagagaatggccaccatccaaaaaagcagtcagatggaatggaagaatacaaaacctttggtctaggacttactaatgttaaaaaaaataggtgacagggaacaggttaagaaaactatgtaaatgtaggaaagatgggaggaaataaagccctgttctggatcccccatcccctccagaataagagcatgttctgcatgtattaatcttttatgctgtttatgaaacaggcaagataagtctgtttttccttctggaaccataagggtaaccagattttcatctacagacaagtggtagtcatttgtgtttatcatgcaacttacttacaaacaccaagatattaattgctgcaacttgatgtcaaatcacattactgggtaatttttaagactatgtacccacaccatacatacatacatatatatatacacatacatacaaacctgtgtgccaagtgacagctatttttttatatacatggtaattcattaaaattgccttagtaatatattagaatatacaaatatgtgtgtataaaataaacatacacacacacacacacccctatgtagtttttaaaacactggcaatgacccactccccttggaaatgcatgtatgaactaccctatgaaatgtaagctgcagaatagataaaacacaggtttccactaataaaagacatctgaacgtcctgaatatagagacagaagttttttgttgttgttgttgttgttttaacatgtttaaccaacagaagttatttacagaaattcatatrtccaggcaacacaaaactcctttattcaaaatcactgctatctttgggactaaacacaggctactttctgtttactcctaacaaaataaagcaagcaaatttgagtcaaatattggtgcactttaatactatcacatctttgaaaactcaatttgagttttaccaattaatgtgtctcatgaagagaagacaccagttttaaaatgagccacaaacagtaaagccctatcagtataaaatttgaaaaaaaaaaaaaagatgattgtatttctagattagcaagaaattagttaattctggctgatttctatttctagctaatttggtcattctttgccatagcttactctattcaaataaacatatattcttgcttgcatcctagattggaaattaaaatttttcaaagaacaaagcttcaatattggatactgaagagtatacatgaaagaaaattccttttgaagctattaaaccatttttttcctatgtgaaagttgaggacaatttatataactcactttttgtcatgtaaaaaaggttactcaagttgtactacccacataactgaaaatattggccatttggccttatctgtgagatttgacactaagtttttgttagagattggaaattatactagtccttttaaggggtaaaaaattcaattcaatactgacaaacttttgcttgtagttttactgtacatttatttttaaagaaaaagaaaacaaaagccagacaaacccaagttgtccaggcaaataaactcaaatctttgtcacgtctgatattataatcttctatgtaagttttttaattaaagttatttctatatgccgtgtgttgcttgttattaaatgcgacgtattcatggcacaaagctttcccaagctgaataaaaacaaacattaacaaatttttaccttgtaatgcaggaagaaacccaagcaagctctagtctgtgcttaagtgttagcattcttattttttgaaccttatttctcaaaacttatagtagcctcaagaagtctattgatattggtcatgtttatttcttgccatatttataacacagcaagagtatttacaggaatgaagtagctgacacatatttttagactctgtataattcagaacagttataaatatttagtttatggattgactctgtatcctgtcatcttttcgcctacctgatctttcttggaataaaataatatatccttggggtcaagatccatagttccagaattttctcagccatctggttctgctacagcgtaaaattagactggaaataagacaacgttaagtaaaaagcttcttttacctaacccacctcccaagggctccatttgtaaaagtacagaccagaaattctaccacttcccagatcctttccagggtaccaccctattaagcattaatttcttcattttttaaatggggacaaaaatatctgctttattattaccacttacttatagaggtgatttacagatttaatgagaatatatcaaagtactttataactcacaaaaatataaacttatataatgctgtttactttgtgttgagcatattctaaattctgggactagtactggaaactttacatatatagtgttagctcttaattctcaacagaaccccacagttgctataattacatttaatgtataaatgactttagagaaacacaaaaaagattgggtgatttgttaaaggtccagctagaaaggggcagtcagaattcaacccaatattacctccaaacagaggttttactttttcctttctactcagagctaacacaacagcattatttaacgttcttaagaatggtggggaggaatcactgaataacctgctttgacaaaacaccctgataaaatctatgcttgtattttagaacccctgggtttcacacattgtttttatagttttcacacatcaagtgtaaggtgaaaagtgatagattttaagaaccaagaatatggtatgcaccccacccaaacttataaacaaatcacaataacatgaaatagaaaaaaaccataaagacttcctttgcttttggaaaacagctgagaaacaacaaaattcttttcagaagtacagacaaaatttgtttttgtagtgtagctaatatgccctccttagacattaagacacttttctgtttgtaaccctaatgcagccgtatttttactttataaaaatcaaatctctcaataaaaacagtatcttactcactaatcaataaattgcatcactaaaaatgtagttatacacaccaatttctgacctcttagaatattctgcacaatcagttttaatcactggaatgaataactgctcaaaaaagcagtacggcttcaattgcattgtgatttggtagtcaatattcctgttttccagtaaaagggagatttcatgaacaggaacactgggctccttatggtttcaccgatcaagagaacgtttctgagcagcttctgagcaaacatttcttaatagattgatcacagatctggggtcttcactcctcataatagcactgccagacacaatcatgttagctcctgcctggaagaagtaaacagttaggttatgcctcaaaggaaaatgtagaaaaacctaaaacagaattcctggactagagtgtctacccttgcatctgtcaacatttcaatcatatgagagccactttgagattaagcagacttaagcaatctagttcaataagaaaaatttaaaatgttcacagatgaggatgtcagactatttttaaatgtgtctaagaaatcattgacctttctggtaaaccaactcttaataatctacatggtatctttgcgacctttagataaggtttaaaagcctttactcctcaagtccactaaggtttttcccaatatgcaccaatgcctctacagttactaaaaaaacacttttattctttgaattatatttatatgaatttgtgagtgtgaaaggacaattattgctaaaaatgtaaaattatccataaactacggcaaaattaagtgagttctcgtttttgtgtcaaaaaatagaatgtctctttatacttcattgcatttcagaatggttttgaagtggctttaaaaaagtttttaagatacatttaaatatggaagcaaagaaattgaaaaagaaaagctaaaaaattgggtccaaatttaactctgatcttcctaggatctgattcaaggatggaaacccaatctgttttgtgattcattgctagaacaaagagggagaagtgggagaaccacaggctgaggaaaatttttccagacagatagtgtcacttcatgtatgacaacatttctaacaatattcctcacagaaattataaaggtgagttttatagggttaacactgcaaatattctcttcagttaacccatttatgcctagtgttccattattggaacgctaagcttgtgggagttcttcatatcctgctgtttaaggtcatcgccaaggtctgatttttcacacaaaaaatttgctacctctggcataaaagcaggaatagtatactggcaaagcacagtttagtacaaagcaattccacaagcgatcaaaaggatatgagctcactcatcatctggccagcccctcctgcataagtatttactactgtcaagcttttgataggtatatatcaagcagaaacgtgtggcagttatacaagaacctggaagtagatacatcacactgtggaagaaaagcagtcatgtaagctttaatcacttgcagtgctaccagaagggctggcatcctcaggagcctgactatgctagactagctatctgaaaaaaaaaaaaaagtaaaaaaaagtttttacttctatacagatagccaaagaggtatcaggcctagattttcatcaaaaatggttctagcaagttcttacaaggaacaactaaataatatgtaggttctaaagaataatgtaataattaggtcaattagatttatctattttccccccttggtagtaccttttaattccgtattttggaaaaatttctcacttccaaggccgtgaaacttaatgatcttccaaagggctgaaattcaacatattcttttataaaaaagaactttcttcagccttcctgagaaaaccaggatttacaattttaacaatttatgtgattttagaatatccacttacgggccagacgccatggctcacatctgtaatcccaacactttgggaggccgaggcaggcaggtcacttgaggtcaggagtttgagaccagcctagccaacatagtgaaaccctgtctctactaaaaataaaaaaattagccaagcatggtggcaggtacctgtaatcccagctactcaggaggctgaggcaggagaatcgcttgaacccggcagcagagattgcagtgagcagagatcacgccactgcactccaatctgggccacaaagagagactgtctcagaaaaagaaaaaaaaaaaaaaaaaaaaaaagaatatccacttatggctgtttattttcctagttgtacatgtgaacaaaaaatacttttccaagaaagaaagtcaacttaggaaccacagagggaatcgctggcccatgagacaatgtcctggagacatatttgacgggaaattggtctagtcatagttgaagagcaatctcacctctgcacatttatggacagtgtcaggacctactccaccatcgacctctatatccaaagatgggaactgggtcctcaaccagtgaacctagatatatacatgaggaaataagtaactcctaaagtgggtatgttggtgggggtgggggtgggggacaatcaaacaaaaaaatccaacagcaaatattagcaattaaaactccaattgtctcacacaataactataccaatacaacatattactggggaacacttggtttttaatagcaagctttgttctatttggcaaacagcaatctgtattgtctttgcagagactgtcatgtaaacaagacagacaaatcctcaatagtcaatgacaacttccaagagatctaaaagttagagataatagtttcaaaaggaaatttcaagacttccaggcgtggttggctgccacctgtaatcccaacactttggcagaccaaggtgggaggacagcttaagcccaggagttcaagaccagcctgggtacgtagtgagacctcctctctactaaaatgtgtaagaattagccgggcatggtggtatgcacctgtagtcctagctactcagggggccgaggcaggaggatctcttgagtccaggaggtcaaggctgcaatgaaccctaattgaattactgcattccagcccaggtgacagagcaagactttgtctcaaagaaagagaaaatttcaagataaagatgtaatacttctctgatttccaaatcagaaatctattacagcatttattatactgtattagaatgatctgtaagcatccccatctcctcaccttcagaacaggttatgcctaaatatacaagcctttcaataaatgcttactgaatgaacacactgtaaaagcctcaccccaaaatcaaatacttcttttacctttggcatcatatcttccatgaatttctgccctccaaaccccggttccactgtcataaccaaggccatatctatctgattagcccatggtgccaaatactcaactgaggttcctggtttgatggcaaggccaacctgtaacagacacaaatatgctatatcacatttacaattacttctgtattatattattgtggcatagcaggcccagtagaaatatctgttcttattttttaaaagttaacaagactattaaatgtaagtattttcaacaagcagtagctttcagaaaactttagtggaatacataaatgctatgtgacaaagaagttaaatcctggcatcatagctgaagaacagctgcttaagtaaggtattctttacctgcaatgggccctgactgtgccactgcacttcagcctgggtgacagagcaagactgtatcaaaaaaagagaaaatttcctgtttcccgcaaatcttcccaactgagagtgaatgttacaaaacactctcatcacgatttcttaccttcatcccattctcccgaatgtctttaatcaaagcccctgggttctcagtagcctcgagatgaaaggtgtactgattggctcctgctacagccattggctttacccactgttctggcttggacaccatcatgtgcatgtctagaaagaaaagacacttcaaaatattactgaaaaatacctggctcatgttattggaagccaacctgtatgtagtttttgccacttctgataagaactctttggccatcacacaaatcattatttaaatagttctaattcagtataggtagtttcctcttattttgaagacaaggatttatttaaattcatttacaaaaaacactattttcccacaaaaagcatacagtgctgtatataaaaagttaacatctaaaaatcaggaaatctaggtccaggtccaggaaatgccactctaaaaaacttaaagaataagtcatactatccatgcaaactagtttcctctaggaaaaattaagtgatccttttcatttattctttcaatttatcgagctattgctgcatcattaattattctaggtcctagggttagagcaaaaacatgaaactctcctgtcatagggattacattcttaatgcgagagtcaaacaataaacaaaataagtaagtaaaatgcacactaggttggcagttaatatggctggtgtgcctggggaaggagatacaccagtcagaggtcagggaagcatgtggtgaggagaaacccttcagcattctgcaggccactgggaaaaaccaccacagtgaagtgacaagatactatcgactgaggaagctacgatagcaataacccaggtgaaaaatgatggcagcaattcgggatggatatgttcttaaataagagcaaagagagctgaggatagatgagatgtggaggataagaggatcctccatggatagatagatgagaggaaaataaagatggcatcaaggattttgaccttatcaactagaagaacggaactgccattaattgagaggcaagactgcaagaacaaatttagggggaaggacatgttgactgcaagaaacctgatattcatcctaattctaaagcttgattcatataaacacataaggtgaaaatgggcatggccttcttaaagatcttgatttaaaacataatagcatttcataagaaggagagggcagcttaaaacaagctaaaccaagaaataacactgtgaagaatcctgtgtttgatagatggtagtgaggagaggttttaagttttttattttgctagag

SEQ ID NO: 97158 - DNA, 18680 bp, Homo sapiens
gatgctccaaggtctgctgctggcattgggtaacacctgctgcttgtgtggctgcctcatactggggatgaaggtcttgggcccaggagaaggaaaaggggtgctcttacaatacctctctattgtgcagagagaagagcatggaccttgatgggccactgaaaccccaaggtgtgttgccagggcctggggagggcctgttatgaggggcagccgatgatagggtggcaggggatctaacataccccagaccctgctagctgtagagtaacctctctgagcacctcccaccactcctcactattgcctccctattgcctcagggaccttggacttgtttctgctcaactgccttcctgcaagtgtttggggcagcccctaggagagccatttccacactttgtaccatagtattaatattttgaccttctggccctggtacccttgtctaccctagaggccagaggcaggtgtgggtcctgtgtgacccacacgtccccctctcccgtgattttggggaccagtgcaggatagggctgtggaaagtgctcatcaaatattccttttttttttttttgagacagagtttcactcttgttgcccaggctggagtgcaatggccggatctcagctcactgcaacttctgcctcccaggttcaagcgattctcctgtcccagcctccggagtagctgggattacaggcccgtgccaccacgcccggctaatttttgtatttttagccgagacggggtttcatcatattggtcaggctggtggcgaactcccgacctcaggtgatccgcccacctcggcctcccaaagtgctgggattacagacgtgagccaccgttcctggccacagcaaatattcctaaaggacgcccacacctcgccctgtgcactgccagcaccaactttttttttttcttttcttttcttttcttttttttttaaagacagggcctcgctctgcagtcccaggtaggagagcaggggagcgatcatagctcactgcagccaactcctgggctcaagcgatctcaacgcgtcagcctctggcattaactttccctattatcagaggaaggaagccaggggccagggcgtcttcagggtggtgggctggagggggcgggccggctagcgaggcgtggccctatgaaggggcaggctgggcgtggaggcggtgactatgccgcggatggggtgggcccagatctggggggccgcgcgcccgggctggaacaaaggcagaggcggggacaaagccccgcggcccccagtccccatcaggaacaaaggccacacccggcccagcggtcgacgcgcccgtgctgcagccacgtgcggacacctgggagcggggcccggggaggcagtgccccgttaccctcacgccccgcccggctagccacctttacctgtgcgcgccttgggagtggcgaatgggtttcatggttgttcgcgccagtcctcgcggcctccaaacatcctccggaagctgccacctaccccgcccccagccgttgtcacctggaccggagacctcacgaccccaggggcaccgcacagggggctgaggcccacccccccggggccagcctcaatgcacccacccaccacgttttcaacgcgctgatagtccctaggcgggttcgcctctacctacagaccctgcttctccccttagacatgattcctctcccccagatcctgcgtccctcagacagagttcttctctcacacaccctgcttccctcctcagacgggattctccccccacacaccctgcttccctcctcagacaggattctccccacacacaccctgcttccctcctcagacaggattcttctcacacacaccctgcttccctcctcagaaaggattctccccacacacaccctgcttccctcctcagacaggattcttcccacacacaccctgcttccctcagacaggattctccccacacacactctgcttccctcctcagacaggattctccccacacagaacctgcttccctcctcagacaggattctccccacaaacaccctgcttccctcctcagacaggattctccccacagagaccctgcttccctcctcagacaggatgctccccacacacaccctgcttccctcctcagacaggattcttctcacacacaccctgcttccctcctcagacaggattctccccacacacaccctgcttccctcctcagacaggattctccccacacacaccccacttccctcagacaggattctccccacacagaccctgcttccctcctcagacaggattttccccacacagaccctgcttccctcctcagacaggattctccccacacagaccctgcttccctcctcagacagggctcccctccccacacaccctgcttccctcctcagacagagttcccctccccacacagaccctctttccctcagacaggattttccccacacaaaccctactttcctcctcagacaggattctccccacacagactctgcttccctgagacaggattctccccacacacaccctgcttccctcctcagacaggattctccccacacacaccctgcttccctcctcagacaggattctcaccccacacaccctgcttccctcctcagacaggattctccccacacacaccctgcttccttcctcagacaggattctccccccacacaccctgcttccctcctcagacaggattctccccccacacaccctgcttccctcctcagacaggattcttctcacacacaccctgcttccctcctcatacaggattctccccacacacaccctgcttccctcctcagacaggattctccccacacagaccctgcttccctcctcagacaggattctccccccacaccctgcttccctcctcagacaggattctccccccacacaccctgcttccctcctcagacaggattctccccacacacaccctgcttccctcctcagacaggattctccccccacacatcctgcttccctcctcagacaggattctccctacacagaacctgcttccctcctcagacaggattctccccacacacaccctgcttccctcctcagacatgattcttctcacacacaccctgcttccctcagacaggattctccccacacacaccctgcttccctcctcagacaggattctccccacacagaacctgcttccctcctcagacaggattctccccacacacaccctgcttccctcctcagacaggattctccccacacagaacctgcttccctcctcagacaggattctccccacacacaccctgcttccctcctcagacaggattctccccacacagaccctgcttccctcctcagacaggattctccccccacaccctgcttccctcctcagacaggattctccccccacacaccctgcttccctcctcagacaggattctccccacacacaccctgcttccctcctcagacagggctccccccacacaccctgcttccctcctcagacaggattctccccacacagaccctacttccctcctcagacaggatgctccccccacacaccctgcttccctcctcagacaggattctccccccacacaccctgcttcccacctcagacaggattctccccccacacaccctgcttccctcctcatacaggattctccccacacacaccctgcttccctcctcagacaggattctccccccacacatcctgcttccctcctcagacaggattttccccacacaaaccctactttcctcctcagacaggattctctccacacagaccctgcttccctcagacaggattctccccacacagaccctgcttccctcctcaggcaggattctccccacacagaccctgcttccctcctcagacaggattctccccacacagaccctgcttccctcctcagacaggattctccccacacagaccctgcttccctcctcagacaggattctcaccccacacaccctgcttccctcctcagacaggattctccccacacacaccctgcttccctcctcagacaggattctccccccacacaccctgcttccctcctcagacaggatgctccccacacacaccctgcttccttcctcagacaggattctccccccacacaccctgcttccctcctcagacaggattctccccccacacaccctgcttccctcctcagacaggaagctccccccacacaccctgcttccctcctcatacaggattctccccacacacaccctgcttccctcctcagacaggattctccccacacagaccctgcttccctcctcagacagggctcccctccccacacagaccctctttccctcagacaggattttccccacacacaccctactttcctcctcagacaggattctccccacacagaccctgcttccctcagacaggattctccccactcagaccctgcttccctcctcaggcaggattctccccacacagaacctgcttccctcctcagacaggattctccccacacacaccctgcttccctcctcagacaggattctccccacacacaccctgcttccctcctcagacaggattctccccacacagacgctgcttccctcctcagacaggattctccccacacagaccctgcttccctcctcagacagggttcccctccgcacacacaccctctttccctcagacaggattttccccacacaaaccctactttccacctcagacaggattctccccacatggacctgcttccttccctccttgggattccccactgttgaggttcagtttccccatctggaaaagcatcaaagtcagggtagctgctgacgaaaacatggggaggggatgccttggggggctgggtgggatttcacagactcattgctctttagcctcttgtgatttatatatatgtgtatatatatatatatattttttttcttgatggggggttggggggcccggcgtggtggctcacacctgtaattccagcactttgggaggccaaagtgggtctatcatctgacgtcgggagttcgagaccagcctggccaacgtggtgaaaccccgtctctattaaaaatacaaaaattagccaggcgtgatggcaggcccctgtaatcccagctactcgggaggctgaggcagaagaatcgcttgaacccgggaggcggaggttgcagcgagccgagatcgtgccactgcactccagcctgggcaacagagcaaaactccgtctcaaaacaaacacaaaaacctttctctcctcttttgagatggagtttcactcttttctcccaggctgtagtgcaatggcacgatctcggctcactgcaacctccgcctcccgggttcaagcgattctcctgcctcagcctcccgagtagctgggattacaggcgcctgccaccacgcccggctactttttgtacttttagtagagacggggtttcaccacgttggccaggctgctctcgaactcctgacttaagatccaaccgcctcgacctcccaaagtgctggaattacaggcgtgagccgccgcgcccggccacatttttctccatctgtggtctaggctggcgtgcagtggcacaatcccgcctcactgctgcctcggcctcctgggctaaacggagcttcccgactcgcctaagaaagtggtgggattacaggtatgagccacggcgcccggctgtgatctacatttgattcagtcaagtttctgtgtttctcaagtttaactatagcgtggttaaaatccaaaagtcagcacccgagctcacacaggagcttcctccctcttgggatggagactctcctcccctctccctggacacagcccttcactcggtcttggccccgcctacttctccatcggccctgccccctatcccgaactcttagtgacgcagaggctggagacgactctacggcggcgaagagacgcgggttgaggaagagggacggattgcccatgcgcttgggcgcacagcggcccgcttctgtgtggtctggaggtggagctgagaggggaatcacactctataaaggttcgcataccccactggcggattcaattgcggcagtgacgtcacagaggccccgccccgcccccacaagagccccaccgacgtggggttggcggtggtggaaggactaggagttggcgcgtgcgtactggcggcctctcccgcaccgaccggcctgggccccgcccccgggcgtgaggcgcccaatgcgcgtgcgcggcggcgtcggcgccagttatttctgtcccgccccccggcctcggctctttctgcgagcgggcgcgcgggcgagcggttgtgcttgtgcttgtggcgcgtggtgcgggtttcggcggcggctgaggaagaagcgcgggcggcgccttcgggaggcgagcaggcagcagttggccgtgccgtagcagcgtcccgcgcgcggcgggcagcggcccaggaggcgcgtggcggcgctcggcctcgcggcggcggcggcggcagcggcccagcagttggcggcgagcgcgtctgcgcctgcgcggcgggccccgcgcccctcctccccccctgggcgcccccggcggcgtgtgaatggcggcctccgcggcggcagcctcggcagcagcggcctcggccgcctctggcagcccgggcccgggcgagggctccgctggcggcgaaaagcgctccaccgccccttcggccgcagcctcggcctctgcctcagccgcggcgtcgtcgcccgcggggggcggcgccgaggcgctggagctgctggagcactgcggcgtgtgcagagagcgcctgcgacccgagagggagccccgcctgctgccctgtttgcactcggcctgtagtgcctgcttagggcccgcggcccccgccgccgccaacagctcgggggacggcggggcggcgggcgacggcaccggtaagtacgaagtgatcggtgccacccctccccctactctctgcctttgattccgactgggtgcagagatgaggatgccacctgggcgagaggatgggggcccggacagggcacgggaaatactttctgggtcctgcatacgaacgtgggtttgtgctggccgctgagatgggacatctgactaaagttggagaaaagaaggctcggggaggggaggggctggttcgctgcgggataatggtcgggggcccacccagcaggggaatggtgggggccataacctgggtsggaacttgtaacagtctcccacatccctgcttctcgaagtggtggactgtcccgtgtgcaagcaacagtgcttctccaaagacatcgtggagaattatttcatgcgtgatagtggcagcaaggctgccaccgacgcccaggatgcgaaccaggtgcgtcctatctcagcaaccacaaggaggtttctggggagggggcatctgcgcaggaggagcttggcaccagctccaggctgttaytccactttccyaaggctctgggtgggctgcctaggttgggtcaagggaccaatcttaaatctccggttgtattttctgggatgtaaacgtggatctatcaagttgtcttgccttctctgaccctgcctttgtctggcagtgctgcactagctgtgaggataatgccccagccaccagctactgtgtggagtgctcggagcctctgtgtgagacctgtgtagaggcgcaccagcgggtgaagtacaccaaggaccatactgtgcgctctactggtacatgaggctgaggggggctgttggagttgttctcccatgtgtgccctcagttgcttttatgatgttggttgcatctggtggatgggtcctagagttctctagggggtgccgcccgaagggcccgagggcagaactccagaagcagaaaaactggggttgtggtgtgtagtctctagggcctaggtgggagagggtgggaaggggaaataagggagaccttaatgtgctgcagggaggtacaaagggtttgagaaggcttatcagggagttgtcagacctggtggtgaagggctcagcatatgcaaacagggaaaggcatggtgtgaagggctttctgggtttgtggttccctggcacacatctggtataagatgctgctagggaaagtagactgtgggtccatggattataagtgatgatgatttttggaagtgttttagcttttgagttggcagagacttacccaaagtttggtttggcatttccagcttttcacagacacagctagctttggtttggaaggagcttgagagtcttttgagtctagccaagttttggggccagaatcctcccatgagtggccttttggtagccatactgtgattcttcccatcccagaggacagcattggtggaagatagcgggaaggtggtggctgtggggcctgagcagccaggagggatacgcaggggctgcagggtgtcctacattccagacgtcccaggcaaaggtcagggtgcaggaatgagtggcattggggaagtcagtttccccaatgagccctgatgctacatattttggatttggttggtatgtkggaccagtgtgtttgatcagttttctaatggggagacaggctttggaggttattaatgggttggtctttgggtgggattatgctgagcaccaagattctgctctagagggggtgtraccaccattctgagggtcctggtttgacatttcatctctcccagtatgagaacctctacaaggtttcctctgggcccttggattgtaagagaccctggtgttctcttgtcagggaagagggaggaagttaaccatgaaaggagaagaaaaggaatccagggtggtgtgtaggcagaattctgagtatgtccacttggagaagtgttcagtaaagggaacagtgtggggaagggtcagcgggggtggggggtggggtggggtggtcctctttttctagacgctgttatccttacccttacattgttgttatctctagaagctagaagaaagggatgtgtttctcagctatgttggggcagaggattctgggagcaaggagttgggcttgcaggcctgtgttcttccctggccacaccctctacatcttcccaataaatggcccagtgtcacagaacaggccggaaatgaggccccaactcattctgcttcctgarttgggggtggtgaagggcaaggtccagccttatgattcccactccccagggccagccaagtctcgggatggtgaacgtactgtctattgcaacgtacacaagcatgaaccccttgtgctgttttgtgagagctgtgatactctcacctgccgagactgccagctcaatgcccacaaggaccaccagtgagtcccaaggcatagtggttgggtgggtgggtgccaccccttccgtagcttagtgctcaggaacacatctgtctgctctcaggtaccagttcttagaggatgcagtgaggaaccagcgcaagctcctggcctcactggtgaagcgccttggggacaaacatgcaacattgcagaagagcaccaaggaggttcgcagctcgtaagtgtgggttctggggctgtgggggtggcccagggcagcaagaccctacctagcctgacctgctgtgtcycctagaatccgccaggtgtctgacgtacagaagcgtgtgcaagtggatgtcaagatggccatcctgcagatcatgaaggagctgaataagcggggccgtgtgctggtcaatgatgcccaggtaagccttgtgccggtgagaagggtccctgagccccctctgctgattgatgatgctgtctggggtgaggagtgatcctagtattcttctgccttctctgcttacctcatacaccttctatctgcagaaggtgactgaggggcagcaggagcgcctggagcggcagcactggaccatgaccaagatccagaarcaccaggagcacattctgcgctttgcytcttgggctctggrgagtgacaacamcacagcccttttgctttctaagaagttggtgtgtactggtgggctcctggctggtgggttccaggcaggtggttcccaatacctcaaatccctatttgttgttggtgtgctcattctttcctccctttcactcccaaccagatctacttccagctgcaccgggccctcaagatgattgtggatcccgtggagccacatggcgagatgaartttcagtgggacctcaatgcctggaccaagagtgccgaggcctttggtgggtccccagctttacctcactctgttattaccccacgtgctgcacctacttacgtttctctcttctttttgcaggcaagattgtggcagagcgtcctggcactaactcaacaggccctgcacccatggcccctccaagagccccagggcccctgagcaagcagggctctggcagcagccaggtgagcaggagagaggacccaggaaggggtgggcagggaatggggtccagtagcaggagagaggacccaggcagsgggggtgggcagggaatggggtccagtagggttcctgtcccactgaggcagagggttctgctttgttcacagcccatggaggtgcaggaaggctatggctttgggtcaggtgagtgggtctgcctagtgggtggggaagggccccaktgctgtttctaccccaacctgccagtcttctttctccattttctaaggagatgatccctactcaagtgcagagccccatgtgtcaggtgtgaaacggtaagtatggcacctcccctgggggtgaggtggatggagggtgggggtgtactcatgccaggttgctgcatctacaggtcccgctcaggtgagggcgaggtgagcggccttatgcgcaaggtgccacgagtgagccttgaacgcctggacctggacctcacagctgacagccagccacccgtcttcaaggtcttcccaggcagtaccactgaggactacaaccttattgttattgaacgtggcgctgccgctgcagctaccggccagccagggactgcgcctgcaggaacccctggtgccccacccctggctggcatggccattgtcaaggtaagcctgtcccaaggaactatagctgtaggatgaagcctgtagtccaggtctggaccctgttgaacacccctcatcaccaccttgcaggaggaggagacggaggctgccattggagcccctcctactgccactgagggccctgagaccaaacctgtgcttatggctcttgcggagggtcctggtgctgagggtccccgcctggcctcacctagtggcagcaccagctcagggctggaggtggtggctcctgagggtacctcagccccaggtggtggcccgggaaccctggatgacagtgccaccatttgccgtgtctgccagaagccaggcgatctggttatgtgcaaccagtgtgagttttgtttccacctggactgtcacctgccggccctgcaggatgtaccagggtgagtgtgaggctggtgggggtcaagtctgggtgttgggctgtctggacaggatcatgtgcagacccttattttcttcaccctagggaggagtggagctgctcactctgccatgtgctccctgacctgaaggaggaggatggcagcctcagcctggatggtgcagacagcactggcgtggtggccaagctctcaccagccaaccagcgggtgagggctggggttacttaggtggggttgcccagagaggctttataggtgctgcccagagctgtgacatcccttacaatgtttgtagaaatgtgagcgtgtactgctggccctattctgtcacgaaccytgccgccccctgcatcagctggctaccgactccacyttctccctggtgagtcctaggatgggaarggggaagggggtggtggctgctgggtctcgccctcaacctgtgcatgtatatgtgtgtctttgtgtgtgtatgtgtgatctctgcctgcaggaccagcccggtggcaccctggatctgaccctgatccgtgcccgcctccaggagaagttgtcacctccctacagctccccacaggagtttgcccaggatgtgggccgcatgttcaagcaattcaacaagttaactgaggtgagccagtggaatggagaggctgtgggcagggggagatgtgaaggaaagaactaggacccattcatccactgcattcctgcttggcccaggacaaggcagacgtgcagtccatcatcggcctgcagcgcttyttcgagacgcgcatgaacgaggccttcggtgacaccaagttctctgctgtgctggtggagcccccgccgatgagcctgcctggtgctggcctgagttcccaggagctgtctggtggccctggtgatggcccctgaggctggwgcccccatggccagcccagcctggctctgttytctgtcctgtcaccccatccccactcccctggtggcctgactcccactccctggtggccccatcccccagttcctcacgatatggtttttacttctgtggatttaataaaaacttcmccagttcctcaggcgttggctggttgggggactgtggtcctggggcctggtttattgactgtatctactagtcagccttatcaagcactggtggcacaagggaggggggtcttgtcccccacctatcgaagcccatgtgtatggatgcctagggagtggggaagactgcctccttgccctttctgggtatggggagggtcacccagggcaaaggatgtacacactagaggcttgttgggtaccctgtgggatactgggtaggtgtgacctacatccctgtgtaggcagggttagccccaggtgtagcacagccactctactgaatgcttcctaaattttggtgctgtagctgtttctcatcttcagaaggtcccacagtgaactgagaccttccagatgtggtttttttccctgtctccctttgctgagtccacttaacattatcattcatctctgtgttatgatttagttactctacagtcgagcctgtgtgaatcccaaggccacccccttgcctctattggttggtctggactgtccttgagtgttgtcattaaaccatcactggaccaaacagtgttggacactacagcctggcagatgaggcctggactctcaagatcctaccagggtgtttgggcagtccagtatcttgggagaggtgatggagaagggcccacagctcacctgaagctcccagctcctgaaaatcccaggtggactttgcttgttcacccctgccccaaacccccacccttagcttagtaccaagtgcctcttgccttagtgatgcccatcctcccagggaccccagtctggtcccacatcaggccaaaagtcacatgggcctggagactagtgtcaaatctcttttattacagaggggttgtggtaaaagatcctgggcatccactggttatctcggagtggcaggggcactcagtccctccgcaggttcttaagccgttcctccaggtctgcatcagcatcagctagggctgaggctgcggcctctgcttttttcccaccagcagccacactaagcgagcccccagttgaggggaggtctgcagagaaagtgggggtttgagcaggtggggtcaggcagcggaggggagtaatgcagggaaagggagggcttggagctgtggctgggccttgggtgggaaatggggtccaggatttggagcactcactcgacagctcatctgttaggctaagtcccagctcatccagaacctgggacaccacagcatcactagggaagagagagaactcagtgagggctatgcactccgtgagggccaggcaaacatctccaccctcccatccagtttccccatacctctcctcttcatcttcctcatcacccatggcatcatcaatggcatcattcatcatctcctccttcatatccatgatctctgcctgccgctcaaactccatcatgatcttctggatctggggcaacttcagctggaagtgacaggagtgtgagtgtgatccccatgggtcgtgggagtgggaagggggattgggaaaagcgcacctgtctgttcatggtgcccatggccttggtgacacccttcatggcttgtgccatcgagttgttggacttgagtgtctggatcttgagggacacagcctggatgttggcccgcatcaatacaaacttgcgcacatagcgccgggtgcgcaccaagtcttttgccatgatgcgaacagcatcctgcagagtagacaagggtatcaaggacacaggaatgagattatcctacacttcttgacaccccattagttggttgtccctccccaccagcccaatttgcaattccacttgaagtttccagagactctggctaacccaatggtcactggtccctccctccttctgacctaaccctcctctgcctcttgggccaccaactccctgggctcctttgtaaggtcctcctcacttctcttgatctgtaaatggtaaaagaaaggccccaggctcactcctgagggttccttttccctccatgttttcagtcattcttttgacttacaacagccattcctcaatttttattcccagcctagacaaagaatctgtctcttccttcacctgatacaaacccatacctcgaactatccagaatcacatacagacctatctgaggctcagcttttgatttcctctccaaacatctttcttgcccatcccaagaaatggtatcttctctgcctacctgttcaggccaaaaccctctcacccatcaaaggctgtgttccttcttcatgctctccctactggttccggctgtctcttaccagcctcttggccatagcttatagcttacccttaccttttttttttttttgagttggagtcttgctttgttgcctaggctggagtgcagtggcacaatcttggctcactgcaaactgtgcctcccggcctcaagcgattcttctgcctcagcctctcgaatagctgggataacaagtatgcaccaccatgcccggctaatttttggtagagtggggttttgccatgttggccaggctggtctcgaaatcctgacctcaggtgatccacccacctcagcctcccaaagtgctgggattacaggcttgagccatcatgccgggccagcttatccttatagttaactggtttttttttttttttttgagacagagtctcgctctgtcacccaggctggagtgcagtggcatgatcttggctcactgtaacctccgcctcctgggttcaagagattgtcctgcctcagccctgctgagtagctgggattacaggcgtgcgccaccatgcctggctagttttttttattttcagtagagacggggttactctgtgttggtcaggctggtctcgaagtcctgacctcaggtgatccaaccacctctgcctcccaaagtgctgggattacaggtctctgagctactgcgcccggccctgtaatccctaaccttccaacttagctcccactttggcccagagttctgaattgtctggtccatgcccaactcttgaagctcacctgtcatctcccatttttttgaggctcttttttaacatttgctgctctgtctgcttaacacattccctgcccagatctgtaggctcactctcatcactcaagccttggatctcataccagttccttggaggcagccttccagaccctcaaactagggaagccctgctgacctttcactccactcgttttgctgaaagcacctgtgtttggtgtctggtctctcttgttcactgctgttagagccgtgcctgattgacagcaacctgcccgaccacccacactcaccatctggccttgcttggccatcttcttaatgtctgcaatgattttcttctcctgggtctctagtttctgtcgctcgcggtccagctcccgcatggcacggttcagggccctctggttctgccgcagtagctcctctggcgtcttccggcgcccgaacaataggtccatgatggtagaagctcactggcaggcctgagacagatgtgagtgaggcccagttgtagggcatggggcccaggagggcaagaagcagaacagggtcacgggagccttgccaaatgggaaggggctaacggagactggaggcaggaatgaggagccaaaagggagcagctgagaacactgggattgtcccggggacacataaagggggacaggtagacctgaaaattatccaagtgctggcccgagcccctccttcatcgccatgccccaaaagaagttatggcttgcaagttcagcttccctctccagaactatgggtgaggccctggagtccttgatacgactgagagcgggggatgacgcgggccggtgcactggtgttttggagactgtgggcaccgaggacagagcaattgtgggggttctgatagaggaggacaggatgggcggaaacgctaagtaccaagaacaggtgaatgtggggctgtgaagctcaggacaaggcattaggatttggggaccctgaatgctgagggagacggttgggggcgctggggcatcctgtacactgaggacgggatgatggagattcggtcgcactatacaccgaggacagtcagtgggcccggcaccaaagcaaggtggtgttggagacctcgatgttgacgacagggtcccagggagaagcgaggcaccggacacccgggcgagtagaaggcctcgtacgctgccgcccgcacgcccgcccgggatccacggtccagcaggggccactcaccggagctgggacggacacccgtttccgcttccgggtcacgcttctctttctgggatccccgacttgcccaccaactaaggcccctcggtcctgtcgccgccgccgccgtttccggattaaacgacgtgacgtaacatgccccgcccgcacccggaaggttgggaaactccaggagcgcgcgtgcgcccgtgccccggaacgggccagcgtccgagcgcatgcgcaacagctcccgtttcctctgcgcgtccgagtgtttcatgttttgagtcccgcccgagtgacccaagccagtaccggggtgggcgctttccacccaacctccacttgaggacccagcttattcgtgagaccttgacttctgcctgaggcctcagatagaaggagcctcagaaggctcctcctcctcggtgggcccacccacacaagaaaggggcaaagctagagatggcttgtttcttccactttgctggcctcttggccaggaagccacaggtcactggatcctgcctacgcttctcatcctagagtaggcttcatcccaaccaaccccaggcacagtcctggtatccccaccaactttagagctgccccaggcactgggcagcctgttgtagggtgctccaatgccacctgtgaccacaccttccaccaccccagctttgcaggccctaatggacctcagctgcccctcccaccccatagaagtaagaagcagaggccatgcagtaacattcccctttaatagcctggtgggacctccagaggtggaggggtgggttgcctgggcccagctacccaggcccgttgcccacccactccacagcccagagtgggggctgaacaagcacccagcaggggggctagacaagccaattcatttcccatcgctgagtgggtcgggggaggcagcgccgaccttaatcacatggtgttaaaaaaaaaaaaataactaggggcacgtggcaggaaggggaggcaaggccaaggcaggggattcccccaccggccgccccccaaacccctacccatggcccccaataaatatttgcaggggatgccagggcttgtggccgtggcgggggtgggtatgcgccaaccctatttcaggcagcgctcaaagtaggtggagccgatgtagccaccccgcatggagcgctgcacgttctgctcaaacagccgccggttgttctgcaggacctctgcggcctccttgttcagtgggtcctcggggttgggctcctgtggccagtacaggtagggggggtcaacaggccagagggacagaaggccaatctccccagacccaaccacctattcctactcaccaagaagagatactgcaggccataaattatggagtttatcgtaaggactggcttccagtcctctctgtggacagagagcatcagggtcagggcttggtgagtgggagactgccacaggcccctctggtgttgggcaggtcagatccagggcataggagagtgagcatgtgagaggctgggagggagggtgtggagcaggacaggccaaggagaaaaccaaggtcaggccatgaggaagatgactgggaaatcaagaaaccacagacaacaaaggggtgggaagggacagagtctgatgtagtgcccacaagaccatgagggaggcctggcaggcagcgctgaggagggcattagagggccagtgtcctcacctgaggatgttgaggcagacgttgccctcgaggtcaatgttggggtgatagaccattgtctcacacttcaccttggggggatcatg

SEQ ID NO: 97159 - DNA, 15558 bp, Homo sapiens
ccaaggggaagaggtggtgctggcctagtctcttctccctttccaacccctgttccagcctgcccttaacagatctgcaagtgaagagaggtgtttgtagtctctgccctgcacagtgatgcctaggtgggtaggtctggagcccagccttgtctggtgatgaaatcccatgggattttcccttgacactgagaccagggcctccaagggctgggagaacactcaatcctcagggaggttaccagcctcctgagcaccagtcctccttgctccaagtcagcgttaatgattcattcccatgatactacctctcccaccccagctcagctgtacagctacccttaccctaacagcaccctactccctaaagtggtcctgagcggccaaagctttctacctttatctacctatcagtaggagtacccgctgaagagttgtactcatggggacattcagcatctcacccttagtactagaggaacaaagggaagcagtggggtcacagcacttcttacagctgggagccaaggatcccacttggatctgccaacccccaggtttgtgggtggtactgtgcctaaacttgatgcctgcaacctgcatgctcccctccacaccctgtcacggctgtcccctgggccatgggccaagccaaaccccaggaaaggacccagacaggccagaatctccctagccaaccaagattatgcgatccagcaggagcaaactgacacctggtgatccagattctgcctcaggatgtctttgtaaaactcctttacacctaggaaaccatttcctagttttaaaactagaagatttcacctggaaattcagatttttcaagactttcctgttctcgtgttcacaagcagcaggtgatgagggtgtaggaccctgcagatggaaccccagccagtctgagaagcaaaggctgcaggccctgggccagtttccctgccctgtggtgatcattcccatcgctagagctgaaggcttctcccaccctggccccatgcacattggaaggtttcagtcaggagtagattcagcagcaaaccagtggaaacgcagcttaggtgaaagtggacagatgctgagagcataagttcagcatactgcaggcttcagggcagcgtctccaggacccagtgccattgcctgttttgccctagccatcttccccttccatcccattgtccaggtccttcacacagcccctctcccccaaccctccagtgggtgacttgggtgcaggtaacacaggctgaaaggcagtttcaaagaaggggcttggccttggccagaagccactcctgggggagcatctgcagaatcagaggagtggcgcctgggcccctccgcaggcaagtgccacaccatgcgctcacggggctggcagtttccgtggtgacggccggaagtcgctgaccggcagagttccgtttcctcccgccctccgaggcacgctgagctgtgattggatgggaagctgacccccgcctccatccccttttccagatagtgggggaagcgcagaggctgcagtgcgtgtccgctggaacttgaggcccacgccaatagcggcccgattccgcccccacgtcgcgttccccaagtgtccaccccgacaggtcttcccctacaccactgtaaccctccacagtgcttaccactctctggcacaatacatgttttgttagtttacctcaatcagaatctccaggaacggggatctttgggtttgcgatgggacagggaaggtactcgacctcgcaccctctgggtaacgcatctagtctcactcagggtcttgccgcgatcaccctgccttgtctgtgacccatagggtcaaaggcaggccgggcgggtggcggcagcagcggaggtgaccacccgcgccgcgctctgcacatatatacaacttaagatgaagtgaccgcgagcaaaagcggcccacgtctgccccactcaaagatggcgactaactccgcttcctgcccggccccgcgaaagtcgccggaagtgacctgcaaggccgccgaagcgtcatctccatgaacggaaatgcccgagtccagccgaaggaggccgaaccccaaactccatcgctgagcaacgcgggtttgcggcggctgcgcaggcgcacaacgcaggccgggcgggaagagccaaagcgggcaggcggcggaaatatccgaagcggcggggcgcccgaggccgttgccgacctccgcgctaaagccgctgctgccgcggaagacgatcctccagtacccgcccgccgtcaccgcagctgccgtgtcctcctcccacccctagccgcaccccctcgcggagggatcagctgagcggccaaacggcacggtcgggggagccccgagtccgcagctgcagcggggcctgagaccagagttggcgagggcaaggaaggagcggccccgggcagtgggggcggggccgggcgggcccgagaacagccgaatttggccgagcgctgccgagcgagtccgaggcgctgggccaggccggagccggactacgggagccgaggcgggccgcgcggtgggcgcggagaggagcggagcggcgcggcaggccgggcgggtggcggcagcagcggaggaggccgcagctgcgggtccgaggagcggaggcgacgcgggcggcggcggggggccgggtggccggggtcccgggccccgcggcggcggcagcggcggcggcggcggcaggatgatcaagctgttctcgctgaagcagcagaagaaggaggaggagtcggcgggcggcaccaagggcagcagcaagaaggcgtcggcggcgcagctgcggatccagaagggtagggggtcaggggatggggttggagccggaggtcggaggtcagggcctgaggcagggtgatgtgggagtcaggaaggggtaatgcggttgctgagggtcagaggtgaagggccccgagcgtggggggggtcggaggtcaagtcttgagggttgggatcatgcagtcacggggagggggtcagagataggggcccggtatgtggtggtttaggatattaggaaggcctggtgtctgctactagggactcggaatctcagagtcaggcagtggagtggaggaactgacgactcgagagtctgggggttagacgggaacttgggtttggggtgacaggcggagaagagagggatagtagaggccaggggttggggatatgagtggaagaggatttagtttattatgctggggtctctgggaatctctgagtcaaacgggtgaagtaggttggaggaccagggactcatgggcctgcctgagtcacagcaatttggggtttggggtgacaggtggaggagggaaggttaatgagtaccagggattggagacaggggtgaggggaaatttaggctattgtgctgtgaacctcagagtcagagggggtggggtagggtggcgggggttggggacttgagagtgtgggggtcacatggaaagctgggtctgagagacagagaagaggaaggacagtgaggactgagggttggtgggggtgggcaggatctttgagtttgggtgaacaggtagatactgtagagtggaggtcatggatggggagcctggggtttagggcggtcagaggatgtttgggagtgggggcatttgggagctgtggatacagaaaagttgggggtcaccctgggccaggagttgggacacgcatacacagctgaacatgcatgtttggggtatgctgtgtatccacaagagccaagctggggagcagggagagggctggaggtgtggagcacagcccaggagaggcgcctgggggtccaggaggagacgatgggggctctgctaacaaacacccgccctaagtgtcctgctggctccctctctctctctcttcccctccctctttctgttcccgactctctgctacccaaacccagacataaacgagctgaacctgcccaagacgtgtgatatcagcttctcagatccagacgacctcctcaacttcaagctggtcatctgtcctgatgaggtgagggtgcatatggctgaattcccaggagcaaaccaagggtgtccccactgagaggagggagacatgttctgcccatcgggccccacaggatggaaccctaaaattttcttctcccccttttcctcccagggcttctacaagagtgggaagtttgtgttcagttttaaggtgagtcccaggcgggcagggatggctccctggacagaggaggcagcagctgaggcccttccaggcacctacccatctctcttttcttttcctggagccaggtgggccagggttacccgcatgatccccccaaggtgaagtgtgagacaatggtctatcaccccaacattgacctcgagggcaacgtctgcctcaacatcctcaggtgaggacactggccctctaatgccctcctcagcgctgcctgccaggcctccctcatggtcttgtgggcactacatcagactctgtcccttcccacccctttgttgtctgtggtttcttgatttcccagtcatcttcctcatggcctgaccttggttttctccttggcctgtcctgctccacaccctccctcccagcctctcacatgctcactctcctatgccctggatctgacctgcccaacaccagaggggcctgtggcagtctcccactcaccaagccctgaccctgatgctctctgtccacagagaggactggaagccagtccttacgataaactccataatttatggcctgcagtatctcttcttggtgagtaggaataggtggttgggtctggggagattggccttctgtccctctggcctgttgaccccccctacctgtactggccacaggagcccaaccccgaggacccactgaacaaggaggccgcagaggtcctgcagaacaaccggcggctgtttgagcagaacgtgcagcgctccatgcggggtggctacatcggctccacctactttgagcgctgcctgaaatagggttggcgcatacccacccccgccacggccacaagccctggcatcccctgcaaatatttattgggggccatgggtaggggtttggggggcggccggtgggggaatcccctgccttggccttgcctccccttcctgccacgtgcccctagttatttttttttttttaacaccatgtgattaaggtcggcgctgcctcccccgacccactcagcgatgggaaatgaattggcttgtctagcccccctgctgggtgcttgttcagcccccactctgggctgtggagtgggtgggcaacgggcctgggtagctgggcccaggcaacccacccctccacctctggaggtcccaccaggctattaaaggggaatgttactgcatggcctctgcttcttacttctatggggtgggaggggcagctgaggtccattagggcctgcaaagctggggtggtggaaggtgtggtcacaggtggcattggagcaccctacaacaggctgcccagtgcctggggcagctctaaagttggtggggataccaggactgtgcctggggttggttgggatgaagcctactctaggatgagaagcgtaggcaggatccagtgacctgtggcttcctggccaagaggccagcaaagtggaagaaacaagccatctctagctttgcccctttcttgtgtgggtgggcccaccgaggaggaggagccttctgaggctccttctatctgaggcctcaggcagaagtcaaggtctcacgaataagctgggtcctcaagtggaggttgggtggaaagcgcccaccccggtactggcttgggtcactcgggcgggactcaaaacatgaaacactcggacgcgcagaggaaacgggagctgttgcgcatgcgctcggacgctggcccgttccggggcacgggcgcacgcgcgctcctggagtttcccaaccttccgggtgcgggcggggcatgttacgtcacgtcgtttaatccggaaacggcggcggcggcgacaggaccgaggggccttagttggtgggcaagtcggggatcccagaaagagaagcgtgacccggaagcggaaacgggtgtccgtcccagctccggtgagtggcccctgctggaccgtggatcccgggcgggcgtgcgggcggcagcgtacgaggccttctactcgcccgggtgtccggtgcctcgcttctccctgggaccctgtcgtcaacatcgaggtctccaacaccaccttgctttggtgccgggcccactgactgtcctcggtgtatagtgcgaccgaatctccatcatcccgtcctcagtgtacaggatgccccagcgcccccaaccgtctccctcagcattcagggtccccaaatcctaatgccttgtcctgagcttcacagccccacattcacctgttcttggtacttagcgtttccgcccatcctgtcctcctctatcagaacccccacaattgctctgtcctcggtgcccacagtctccaaaacaccrgtgcaccggcccgcgtcatcccccgctctcagtcgtatcaaggactccagggcctcacccatagttctggagagggaagctgaacttgcaagccataacttcttttggggcatggcgatgaaggaggggctcgggccagcacttggataattttcaggtctacctgtccccctttatgtgtccccgggacaatcccagtgttctcagctgctcccttttggctcctcattcctgcctccagtctccgttagccccttcccatttggcaaggctcccgtgaccctgttctgcttcttgccctcctgggccccatgccctacaactgggcctcactcacatctgtctcaggcctgccagtgagcttctaccatcatggacctattgttcgggcgccggaagacgccagaggrgctactgcggcagaaccagagggccctgaaccgtgccatgcgggagctggaccgcgagcgacagaaactagagacccaggagaagaaaatcattgcagacattaagaagatggccaagcaaggccagatggtgagtgtgggtggtcgggcaggttgctgtcaatcaggcacggctctaacagcagtgaacaagagagaccagacaccaaacacaggtgctttcagcaaaacgagtggagtgaaaggtcagcagggcttccctagtttgagggtctggaaggctgcctccaaggaactggtatgagatccaaggcttgagtgatgagagtgagcctacagatctgggcagggaatgtgttaagcagacagagcagcaaatgttaaaaaagagcctcaaaaaaatgggagatgacaggtgagcttcaagagttgggcatggaccagacaattcagaactctgggccaaagtgggagctaagttggaaggttagggattacagggccgggcgcagtagctcagagacctgtaatcccagcactttgggaggcagaggtggttggatcacctgaggtcaggacttcgagaccagcctgaccaacacrgagtaaccccgtctctactgaaaataaaaaaaactagccaggcatggtggcgcacgcctgtaatcccagctactcagcagggctgaggcaggacaatctcttgaacccaggaggcggaggttacagtgagccaagatcatgccactgcactccagcctgggtgacagagcgagactctgtctcaaaaaaaaaaaaaaaaaccagttaactataaggataagctggcccggcatgatggctcaagcctgtaatcccagcactttgggaggctgaggtgggtggatcacctgaggtcaggatttygagaccagcctggccaacatggcaaaaccccactctaccaaaaattagccgggcatggtggtgcatacttgttatcccagctattcgagaggctgaggcagaagaatcgcttgaggccgggaggcacagtttgcagtgagccaagattgtgccactgcactccagcctaggcaacaaagcaagactccaactcaaaaaaaaaaaaaaggtaagggtaagctataagctatggccaagaggctggtaagagacagccggaaccagtagggagagcatgaagaaggaacacagcctttgatgggtgagagrgttttggcctgaacaggtaggcagagaagataccatttcttgggatgggcaagaaagatgtttggagaggaaatcaaaagctgagcctcagataggtctgtatgtgattctggatagttcgaggtatgggtttgtatcaggtgaaggaagagacagattctttgtctaggctgggaataaaaattgaggaatggctgttgtaagtcaaaagaatgactgaaaacatggagggaaaaggaaccctcaggagtgagcctggggcctttcttttaccatttacagatcaagagaagtgaggaggaccttacaaaggagcccagggagttggtggcccaagaggcagaggagggttaggtcagaaggagggagggaccagtgaccattgggttagccagagtctctggaaacttcaagtggaattgcaaattgggctggtggggagggacaaccaactaatggggtgtcaagaagtgtaggataatctcattcctgtgtccttgatacccttgtctactctgcaggatgctgttcgcatcatggcaaaagacttggtgcgcacccggcgctatgtgcgcaagtttgtattgatgcgggccaacatccaggctgtgtccctcaagatccagacactcaagtccaacaactcgatggcacaagccatgaagggtgtcaccaaggccatgggcaccatgaacagacaggtgcgcttttcccaatcccccttcccactcccacgacccatggggatcacactcacactcctgtcacttccagctgaagttgccccagatccagaagatcatgatggagtttgagcggcaggcagagatcatggatatgaaggaggagatgatgaatgatgccattgatgatgccatgggtgatgaggaagatgaagaggagaggtatggggaaactggatgggagggtggagatgtttgcctggccctcacggagtgcatagccctcactgagttctctctcttccctagtgatgctgtggtgtcccaggttctggatgagctgggacttagcctaacagatgagctgtcgagtgagtgctccaaatcctggaccccatttcccacccaaggcccagccacagctccaagccctccctttccctgcattactcccctccgctgcctgaccccacctgctcaaaccccyactttctctgcagacctcccctcaactgggggctcgcttagtgtggctgctggtgggaaaaaagcagaggccgcagcctcagccctagctgatgctgatgcagacctggaggaacggcttaagaacctgcggagggactgagtgcccctgccactccgagataaccagtggatgcccaggatcttttaccacaacccctctgtaataaaagagatttgacactagtctccaggcccatgtgacttttggcctgatgtgggaccagactggggtccctgggaggatgggcatcactaaggcaagaggcacttggtactaagctaagggtgggggtttggggcaggggtgaacaagcaaagtccacctgggattttcaggagctgggagcttcaggtgagctgtgggcccttctccatcacctctcccaagatactggactgcccaaacaccctggtaggatcttgagagtccaggcctcatctgccaggctgtagtgtccaacactgtttggtccagtgatggtttaatgacaacactcaaggacagtccagaccaaccaatagaggcaagggggtggccttgggattcacacaggctcgactgtagagtaactaaatcataacacagagatgaatgataatgttaagtggactcagcaaagggagacagggaaaaaaaccacatctggaaggtctcagttcactgtgggaccttctgaagatgagaaacagctacagcaccaaaatttaggaagcattcagtagagtggctgtgctacacctggggctaaccctgcctacacagggatgtaggtcacacctacccagtatcccacagggtacccaacaagcctctagtgtgtacatcctttgccctgggtgaccctccccatacccagaaagggcaaggaggcagtcttccccactccctaggcatccatacacatgggcttcgataggtgggggacaagacccccctcccttgtgccaccagtgcttgataaggctgactagtagatacagtcaataaaccaggccccaggaccacagtcccccaaccagccaacgcctgaggaactggtgaagtttttattaaatccacagaagtaaaaaccatatcgtgaggaactgggggatggggccaccagggagtgggagtcaggccaccaggggagtggggatggggtgacaggacagagaacagagccaggctgggctggccatgggggctccagcctcaggggccatcaccagggccaccagacagctcctgggaactcaggccagcaccaggcaggctcatcggcgggggctccaccagcacagcagagaacttggtgtcaccgaaggcctcgttcatgcgcgtctcgaagaagcgctgcaggccgatgatggactgcacgtctgccttgtcctgggccaagcaggaatgcagtggatgaatgggtcctagttctttccttcacatctccccctgcccacagcctctccattccactggctcacctcagttaacttgttgaattgcttgaacatgcggcccacatcctgggcaaactcctgtggggagctgtagggaggtgacaacttctcctggaggcgggcacggatcagggtcagatccagggtgccaccgggctggtcctgcaggcagagatcacacatacacacacaaagacacacatatacatgcacaggttgagggcgagacccagcagccaccacccccttcccctttcccatcctaggactcaccagggagaaggtggagtcggtagccagctgatgcagggggcggcagggttcgtgacagaatagggccagcagtacacgctcacatttctacaaacattgtaagggatgtcacagctctgggcagcacctataaagcctctctgggcaaccccacctaagtaaccccagccctcacccgctggttggctggtgagagcttggccaccacgccagtgctgtctgcaccatccaggctgaggctgccatcctcctccttcaggtcagggagcacatggcagagtgagcagctccactcctccctagggtgaagaaaataagggtctgcacatgatcctgtccagacagcccaacacccagacttgacccccaccagcctcacactcaccctggtacatcctgcagggccggcaggtgacagtccaggtggaaacaaaactcacactggttgcacataaccagatcgcctggcttctggcagacacggcaaatggtggcactgtcatccagggttcccgggccaccacctggggctgaggtaccctcaggagccaccacctccagccctgagctggtgctgccactaggtgaggccaggcggggaccctcagcaccaggaccctccgcaagagccataagcacaggtttggtctcagggccctcagtggcagtaggaggggctccaatggcagcctccgtctcctcctcctgcaaggtggtgatgaggggtgttcaacagggtccagacctggactacaggcttcatcctacagctatagttccttgggacaggcttaccttgacaatggccatgccagccaggggtggggcaccaggggttcctgcaggcgcagtccctggctggccggtagctgcagcggcagcgccacgttcaataacaataaggttgtagtcctcagtggtactgcctgggaagaccttgaagacgggtggctggctgtcagctgtgaggtccaggtccaggcgttcaaggctcactcgtggcaccttgcgcataaggccgctcacctcgccctcacctgagcgggacctgtagatgcagcaacctggcatgagtacacccccaccctccatccacctcacccccaggggaggtgccatacttaccgtttcacacctgacacatggggctctgcacttgagtagggatcatctccttagaaaatggagaaagaagactggcaggttggggtagaaacagcactggggcccttccccacccactaggcagacccactcacctgacccaaagccatagccttcctgcacctccatgggctgtgaacaaagcagaaccctctgcctcagtgggacaggaaccctactggaccccattccctgcccaccccccctgcctgggtcctctctcctgctactggaccccattccctgcccaccccttcctgggtcctctctcctgctcacctggctgctgccagagccctgcttgctcaggggccctggggctcttggaggggccatgggtgcagggcctgttgagttagtgccaggacgctctgccacaatcttgcctgcaaaaagaagagagaaacgtaagtaggtgcagcacgtggggtaataacagagtgaggtaaagctggggacccaccaaaggcctcggcactcttggtccaggcattgaggtcccactgaaacttcatctcgccatgtggctccacgggatccacaatcatcttgagggcccggtgcagctggaagtagatctggttgggagtgaaagggaggaaagaatgagcacaccaacaacaaatagggatttgaggtattgggaaccacctgcctggaacccaccagccaggagcccaccagtacacaccaacttcttagaaagcaaaagggctgtgttgttgtcactctccagagcccaagaggcaaagcgcagaatgtgctcctggtgcttctggatcttggtcatggtccagtgctgccgctccaggcgctcctgctgcccctcagtcaccttctgcagatagaaggtgtatgaggtaagcagagaaggcagaagaatactaggatcactcctcaccccagacagcatcatcaatcagcagagggggctcagggacccttctcaccggcacaaggcttacctgggcatcattgaccagcacacggccccgcttattcagctccttcatgatctgcaggatggccatcttgacatccacttgcacacgcttctgtacgtcagacacctggcggattctaggggacacagcaggtcaggctaggtagggtcttgctgccctgggccacccccacagccccagaacccacacttacgagctgcgaacctccttggtgctcttctgcaatgttgcatgtttgtccccaaggcgcttcaccagtgaggccaggagcttgcgctggttcctcactgcatcctctaagaactggtacctgagagcagacagatgtgttcctgagcactaagctacggaaggggtggcacccacccacccaaccactatgccttgggactcactggtggtccttgtgggcattgagctggcagtctcggcaggtgagagtatcacagctctcacaaaacagcacaaggggttcatgcttgtgtacgttgcaatagacagtacgttcaccatcccgagacttggctggccctggggagtgggaatcataaggctggaccttgcccttcaccacccccaactcaggaagcagaatgagttggggcctcatttccggcctgttctgtgacactgggccatttattgggaagatgtagagggtgtggccagggaagaacacaggcctgcaagcccaactccttgctcccagaatcctctgccccaacatagctgagaaacacatccctttcttctagcttctagagataacaacaatgtaagggtaaggataacagcgtctagaaaaagaggaccaccccaccccaccccccacccccgctgacccttccccacactgttccctttactgaacacttctccaagtggacatactcagaattctgcctacacaccaccctggattccttttcttctcctttcatggttaacttcctccctcttccctgacaagagaacaccagggtctcttacaatccaagggcccagaggaaaccttgtagaggttctcatactgggagagatgaaatgtcaaaccaggaccctcagaatggtggtcacaccccctctagagcagaatcttggtgctcagcataatcccacccaaagaccaacccattaataacctccaaagcctgtctccccattagaaaactgatcaaacacactggtcccacataccaaccaaatccaaaatatgtagcatcagggctcattggggaaactgacttccccaatgccactcattcctgcaccctgacctttgcctgggacgtctggaatgtaggacaccctgcagcccctgcgtatccctcctggctgctcaggccccacagccaccaccttcccgctatcttccaccaatgctgtcctctgggatgggaagaatcacagtatggctaccaaaaggccactcatgggaggattctggccccaaaacttggctagactcaaaagactctcaagctccttccaaaccaaagctagctgtgtctgtgaaaagctggaaatgccaaaccaaactttgggtaagtctctgccaactcaaaagctaaaacacttccaaaaatcatcatcacttataatccatggacccacagtctactttccctagcagcatcttataccagatgtgtgccagggaaccacaaacccagaaagcccttcacaccatgcctttccctgtttgcatatgctgagcccttcaccaccaggtctgacaactccctgataagccttctcaaaccctttgtacctccctgcagcacattaaggtctcccttatttccccttcccaccctctcccacctaggccctagagactacacaccacaaccccagtttttctgcttctggagttctgccctcgggcccttcgggcggcaccccctagagaactctaggacccatccaccagatgcaaccaacatcataaaagcaactgagggcacacatgggagaacaactccaacagcccccctcagcctcatgtaccagtagagcgcacagtatggtccttggtgtacttcacccgctggtgcgcctctacacaggtctcacacagaggctccgagcactccacacagtagctggtggctggggcattatcctcacagctagtgcagcactgccagacaaaggcagggtcagagaaggcaagacaacttgatagatccacgtttacatcccagaaaatacaaccggagatttaagattggtcccttgacccaacctaggcagcccacccagagccttgggaaagtggagtaacagcctggagctggtgccaagctcctcctgcgcagatgccccctccccagaaacctccttg

SEQ ID NO: 97160 - DNA, 64869 bp, Homo sapiens
  misc_feature (1)...(64869): n = A,T,C or G
gtagcccaagcaaaggggccttgatgctagatagtgtgttacttgaggacctcataaggacctcctgtggccagggcttctatgggctgtggcttatgtctcatgtgtcattctccagggaagcgccgccgagctgctatggacttccctggagccaaggtcattgttccccagctgaagggcagggtgcagcgaaggcgtgtggggttgatgtgtgagggggcccccatgcgggcacacagtcccatcctgaacatggagggtaccaagattggtaggtggaccagggaagctgggaaacccttgtctcttcccaggagggtgggggcactggcagggtggtgctgatgcgtggcttatgcttgcttgacaggtactgtgactagtggctgcccctccccctctctgaagaagaatgtggcgatgggttatgtgccctgcgagtacagtcgtccagggacaatgctgctggtagaggtgcggcggaagcagcagatggctgtagtcagcaagatgccctttgtgcccacaaactactataccctcaagtgaagctggctcagggtggggctgtcccttccaggagttttgcccctacaaggggttagtcaagaagctgaggcagaactcactgggggtgggcagttaaggtggaggctgattctaattgtctggttgaggggccacaccacctattccccccacctaactcatgccattccagcttccttcaggaccctgcttctgagtgacggaccagctcacacaatgtcttgtttcagtccatgatcccactgacctactcttgcctgctggagggtaatgagaagctttggttctgccatctctcccactctgccaggtgctggctgtggagcaaaggctcacctttgtggagaggataaaacctgcccaacctacctcaccatggtttttcacattgcaaagggtaataacatgggcagtgcggacttaggctaccccctccagtttgctttccgtaaatgcaaattgtccttactgcaagtcaggaatgattgctgactcacagtagggctgctatgcctgtgtgtaaacttggggatggctgagggaacatagactcactcttccacattcccaagttggtctagtgtgctgcccagtagcaaaccatggcagactcaccacctattctgagttccagggctgctgtagggcagggtgggcttcctcccagacttgccttaccctgggctgatctttgcccctggtatgcattaatggactccactgaatcctgaaaaaaaaattaaacttccttcttacttgccagtctctagcttcattgttctctgttcacagggttcctgaaatgccaacccaatgcctgccttcctggcctccaagacaagcttggaataggttctccttgaaaggggccagtctataaaaatggagatattgcccctgttgggcaccccatccctgctcctccagggagctgcatcacctctcccctccctgcaagttattgcatctgggtcccaaggggcaacagcttccaggatgttccctctctcactgcccctgtgcatgcacacccttgttctgtctgaataaccacaacaaccgatgcacttccgtgtttaataagccacatcctcagttgagcctggggtgaaatgtgagatcctgactctgtgcagtagtattagtgggtgggccaggggctgtgaataacatcatcctcagtacagctgcaattccagggcccctctaccacaaagatggcttaagcaaaggcagccagatggaagtatgatatccaacaggaaggaagtaggcaggggtcactaaagtggctggtggcccagcagatggaaacagaagtatggccccgagggaaggaggcaggtccagggctacagtgctttcaggtactggtgtttctataggggcatttgccacccacatctttggaaactcccctggcctattgtgacatggcagggctgcctggttcttgaaggtagagaagatgctagtggggaggagctgagcctgtgacgtgcatttgtaccaggtccagatgggaaatgatgaggctgcaggctatgatggggccactgtgcactaaatgcttggtaccatcctatgaggggacaaggtgcagacccacattcccataggcacttaagcagtggtggataggaggctaccccaggggttcagctgtccttcaggtaatcagcttacccccaagaaggactgagaggaatatgagtaggacagttggcagatgacaatttcctttgcctggctcacgggagaagtctggttgggccaggtatgtgggtgtttggtgcctccatctggatagtgccagcaggtacaccaccctgccttatacctgaatggccagctaaataaccatagagcttaaggtctggctcaggtcaggattccctggctccttgccaacaaagcaaaaccagagattcagaaaactcagggcctaggagaaaacagacctgccttacaaaccccagagctggtcaacctcaggcttcctctcaggaaaaaaattttttttttgagatgggtcttgctctgttgcccaggctggagtacaacggcgcaatcttggctcactgcaacctctgcctcccaggttcaagcaaatctcctgcttcagcctcctgagtagctgggattactggtgtgtgccaccacacccggctaatttttgtatttttagtagagatggggttttcaccatgttggtcaggctggtctcgaactcctgacctcgtgatctgcctgcctcagcctcccaaagtgttgggattacaggcgtgagccaccatgcctggccaactcaggaaaaatttttatggggtcacatcttggggatggaagagggacaggaaaagaaacctaagacaaaagaactgatggtcttcccaacccagaggcttcctgagttatcacccctgagagaggaagaacacaatctctctccttaaggcacccagataagagtacaggcaaactcttcacttgcccagtgcctgggtgagggagcaggcttaagaggcagaagaggcccagccctgtaggcactgggtactccctgctaccaaccctgaacccccggcagttgtccctgaggtctggggagtagcagaacccagtgtagaagccagcagacccagtgatgcccttggagaccctctgctgccttcccttattctctgtgggttttgagaggttcgtttgctgccatttccctgaaagtgatggagagagagaagagagagtggttattccatgggcagaacagttgctgaaattggctctcccaagctccttcttgggggctgagctaggctcagtaaggtcacataacaatctagacctctctgctggtctcccacagcccaccctgggcccagcaccttctccctgcagactcattcttcttcctggttctccatgttagtacggcattgccatccttctctagtttttttattctttttatttattactattgttattacttttctttttttgagacggagtttcactcttgttgcccaggttggggtgcaatggcaagatctcagctcactgcagcctccacctcccgggttcaagcaattttcctgcctcagcctcccaagtagctgggattacaggcgcccgccaccacacccagctaatttttgtatttttagtgaagacggggtttcgccatgttggccaggctggtctcaaactcctggcctcaggtgatctaccctcctcagtctcccaaagtgctaggaacaggcgtgagccaccatgcccggcctgttattttttttgagacagagtctcactctgatgcccagtctggagtgcagtggcgtgatctgggctcactgcaacctctgcctcctgggttcaagtgattctcatgcctcagcctcccgagtagctgggattacaggcgtatgccaccatgcccagctaattttttctatttttagtaaagacggggtttccctatgttggccaggctagtctcaaactcctgacctcaagtgatccgcccatctcagcctcccaaagtgctgggattacaggcatgagccatggggcctggcctcttctctaagacagaaacctgggcagtggcagcctttctaacctctagccctaactcttggacccctttatctacttgccatgaagtaggcatttataaaggcaaattagatcagaccacagccttgctgagttagtctttcaatggctcccagggtccaacaagctctcacgttcaagctccagcatcacagtcttacctattctaatatgtcacccgtattcttccctcttagccttgctcaatccattccctttgcttggtacactttgtcaccctgtggcatttgatctcggcttaggtgtctttcttgggagaagccttccctgaccacccttgccccatgcactgccgccctcccctaataaatccctggctccccatgagcagggcccgggttgtctttgttctctgggcctcgtgtggcccctatcacgtgataggggcccagagattatctgaatgaatgccctgattagtgagcgcatgttttgcagaagaggaggctgaccctgatgaggtcaatgtgctcaggacagagattactgccttcccaactgaggggattgtgcggagtggaatccaacaaacctgtcatttcatctctctgaaattatgacaataccaccacctatcctacaggctgctgaacagcatgatgatggactgtccagaccttggtgtcaccctaacttgaagcctgagctctacgtgcagacttgaagcttgctgcaaaggccattaagctggtgggcttaaagcctgagaactcccctctctgtcaccagcacaggagtgtccttggaatgccaagcatggggttgcggtatggacagatttactcaccacgaagggaaatgcgtggagccatcaggcgtggatccattctgaccacccagacctggaggcagaaacacatccagagctgcagaaggctggggtgggaatctgagcaggcatcagcccaggtcaggttagagaccactggtattgtttggtgaagtctggtgagggtcctaagggactaatggtattgccaggtgagagttctgaggaacagatacaatgtgatgggtggactggtggggattctggcgtaaaatggtatggtggcatgagtcagggcacaacgttaagttctcccatccaagtacctggcttagcttccgaggtcagatgcgttcagggtagtaaggccgtgaaccaatgttaagttctgatgagcctcttgcaggatagtggggaacccaatggtacagtcgggagagggtgggggcgggggcggccagcccacggaggttcgtaggaagcctcacctggacggtgatacaacccggtcactgtattcccgtagaacccccacgccagctggatgcccaggagacttaacaccaaccacagcagcagcagcttgaagagggtcacgcgcatgtcctgcgcctcccactcccgcaagaactcgctgcccagcgcgcccagcaccgtggccggcagagcctgcaaggcctgcccagaccaggactccgccatgactggccctcgccccacccggggtactgtcaccgtagtccccaccacgcacgcgtgtggtcttccgggaccaggcccgttagtgcgcacgcgtaaacccagccagggtggggcctacttcgcgtgcgtgaagagttggcagttcggggaggagtattaaaaccgcgcacgcgcacctaaccccaccctgcttgcttaagggatgagtgactccgggagtataaaatagcaaccaggtcttttatagccccggagttcccgtgatgccccacgcggctgcaatgattggttaagggttttgcttttagggcgtggacgggctcctgagcaatagtggatgagctgtgagtgcgcgcgcgtgcgcggggccgcgacctgtgccggctcgagcccgctgggcactcggaggcgcgcacgtcgttccccgccctcccgccgccgcccgccctcgctctctcgcgctaccctcccgccgcccgcggtcctccgtcggttctctcgttagtccacggtctggtcttcagctacccgccttcgtctccgagtttgcgactcgcggaccggcgtccccggcgcgaagaggctggactcggattcgttgcctgaggtgagcggaagggttccctccaggcgccgcggggccccaggcccgccagcccggtactcttccggccggcaggccgccgcaccgccgcggccgcgccccaccggctgctcgtggccgagccgcccctggcccctgacccttgacctgactcccagcccgggccccgcgccccaagcggcgaccccgcccgcgcagtccccggaagcgcgcccggtagtctcctgtgccccttyccccgcccggccgggcctggtggagcccaggctgcccgcctgcccgccctcggtccccggagcttcctctcccagcggcgccgggcagggcgggggctttgggccgggccccgcgaccgcgcagtgtagccggccgctgaaagcgcgcgtggctgtcggagttgaaatgggaaagaaactctttacaactccattttgctttttacgtttaacgagaaacgacaatcactgtttyatattgattaaagtccagttacactttgggtaggttttcttttaatgcagacttgttggagactgtgtaagtaagtaaaagattgtattgaacgcttaggggtatgatctacggccataccacctcgaacgcgcccgaactcgtctgaaagctttggggtctgtattgagtggaaaaggggtattttccatttggaaaaaaaaaacaacacacaaaactgtaaatgatttaagcgatgttgcatgaaaatagatgcaatgttgcttagtcgaagtcgctgtattgattaggaatgatctaaacatctgtaccttagttactgattggatctacagttacgggtcgtcttcattgaatagcgctattcgcatccaagttgatttgttcacaaaccttgtttagtagtttacggtggaaaattggaatcctttttacctcaaagttggttccacttgtgttttttaatagttctgattttaaatttttacctctgttgttgacttgtttggttctgtcttgaagaaagtcttaaacgtttcttgcaggtgtgtaagtagatatttcactctgcctttctgaaggagaaaaattgaaaaaccaaaaaacttccataatttaaaatgttgtatgtggagagaatttttcaaccacttagtatcacccagatgtgtaatgtgtaccatgcggatgattgtcaccttagatgtggctagattggcggagatactgttttgagcatttggcacaagtgacattggactgaaaaactagtttttaattgtaaagaatgacttattgaaggatctctggataacttgtcttaattggttccatctacttttgtggagcactgatggctcttggggacattaaatatataaggtgcaccttggtttgagttaaagtctagtgctagatttatcctctctgttctcataaaaatctgtgttggagggaagaagagagtaggaatactgtgtagttcttgagttttagatctaagaggaatctttcaggactggttgtccaaccccatttgcagatgagcaaactgagtcccagagacttaagtaaatttcccaaggttacctatctagtcaggagcagaccagaactgtctgctctgttaaggtattctccatttactcccaagcagttggcctccagagtcagctaaaattcaggacttctagcttattccattgtttcttcttttaaaccttgttgatggtgaatagtttgggagaaactgttcatttgccaaaaaatttcggttcattagcttacacagcactctccccttgttaactggatggtcctgccttcaattgagggagatagatgaatgtacgagggtccctggttggcctaatcatggctttgtttggatttttttttaagggaccaacttctagagcaaggcctacactttactgcttcaaaaccaagatatttaggtcaggctaagatatttttagttaactgtgggcacttttgactgttgatttggggtactgcgtgtatcaagtaaacaattccctgtgcacatgcatgtggtggtggtggagtattttcgtagtcctgatttctttccatttgtcagttaactgctttttaaaagtttattctggtcatatgggggtgtaagttattaggagagtaaaaacaggtagctcttcaggtgtttcttgtccatggggtggagtccatgcagtgactggagaaggtgctagtttgcgtctttttaattgtcttagagagctgagagatatatgttaactctgagaagaaagactgatcagcttctaagagagctaatttgaagctgctggccttctgtagacagcaccttgggtttaattgcattgtggttactagtgattatgataaatagtacatagtcactggattttaaaattggccatatagttgtagttttatatttatttttatttttgaaatggagtctcactctgttgcccaggctggagtgcagtggcgcgatctcagctcactgcaccgtctgcctcctgggttcaagtgattctcctgcctcggcccctggagtagctgggactacaggcacccaccaccattcctggctaacttttgtatttttagtagagatggggtttcaccgtgttggccaggctggtcttgaactcctgacctcaggtgatccgcctgccttggcctcccaaagtgctgggattacaagggtgagccaccacgcccacccatatttgtagttttaaaaggatcccggcagggcgcggtggttcatgcnnnnnnnnnnnnnnnnnnnntctactaaaaatacaaaaaaaattagctgggtgtggtggcgggcgcctgtagtcccagctgctctggaggctgaggcaggggaatggcgtgaacccgagaggcggagcttgccgtgagctgagatcgcgccactgtgctccagccagggcaacagaagcgagactccgtctcaaaaaaaaaaaaaaaggatcttaagtattttgtctgactctgccatttagtttattcctttgtttacctgcccaatggaactgtttgcttgtaactacacattaatataactaaattttgaacttaatgttacatgccttgctatacatggggctctttggggacatgctcatttgtgggattaaaatttccaagacggtttgaagtttgtaattactataaaatccctcatctttaatctgtggagctgtagtattaagtgaaggccttggtatgttcataattacgatagtcatgtgactgaaaatcaggcactgaagctgctcgttctgggtgttggtctcagtttattgatgcttcatccaaatacatttttatagctaataataaagaaaaacatcaaatactcttgctaaattgcaatcagtatgcagtttatgccaaacttagcttgatttcatttttttaagaggatgagtatgtatatttaagcatatgtgtgtgtgtatatatgtatatatacttgtgtatacgtatatatatgtgtacatatacgtgtatacgtatatatatgtgtacatatacgtgtgtgtatgtgtgtgtgtatatatatatatttttttttttctcttttgagactgagtctcactctgtcgtccgggccagagtgcagtagcgccatctcggctcactgcaaccgccgcctcctagttcaagtgattcttgtgcctcggcctctggagtagttgggagtaccagcatgcgccactgtgctcagctaatttttgtatttttagtagagacggggtttcaccatgttggtcaggctgttctcgaactcctggccttgtgatctgccccccttggcctctgaaagtgttgagattgcaggtgagagccactatgtctggccatatttaagcatatttatgatagtatcttaaatttaagtgaagggaaagaggaaaacatacacagccaatgaagtaagtttgaagtggagtgaaaggaaaagttggaggtaaaaagaggttagagaggtgggcaggggccaaatcatatagggcctttaggacatgggaaattctttggatttgttctgagattagaagtcatttagatattctttagaaagggaatgacatgatctgatattaaaaaaaaaactagaatcactgtgagtaggagtagatctaattccattctgactaaatagtaaactaatatgataatttggacaaatataaaaaggaattcctggctgggagcagtggctgatgcctgtaatcccagcactttggaaggccgaggcaggtggatcgcttgaggtcaggagtttgagaccagcctggccacatggtgaaaccctgtctctactaaaaatacaaaacattagctgggcgtggcagcaggcgcctataatcccggctattcaggaggctgagataggagaatcactttaacctgggaggcggaggttgctgtgagcagagatcgagccattgcactccagcctgggagacggtgcaagactcaaaaaaaaaaaaaaaaaaaaaaacggaaaggatttcataatattaatttccttgacttagtgacttctgcctattttatttgaagtcattggttcttctcttctcttctcttgagacagggtctcactgtcacccaggctggagtgcagtgagtgatctttgttcacttcaacctctgtttcccaggttcaagcgattctcgtgcctcagtctctagagtagctgggactacaggtgtgtgtgtgtgaccatgcccgactaatttttgtatttttagtaaagacgggatctcaccatgttggccaggatggccttgatctcttgacctcgtgaccccgtgacccacccaccttggcctcccaaggtgttgggattacaagcatgagccactaaggatttgtttttaaaatttttttgctttatttttttcttctctttttttgtactagagatggtgtcttgctatgttgcccagacagatcttgtactcctgggctcaagttgtcctcctgcctcagcctcccaaagtgctgggattaaagatgtgagtcaagcgattctcgtgcctcaacctacccactagctcgattacaggtgccatccaccacctgcccaccacccttggctaatttttgtattttgtattttagtagagacaagaattttaccatgtcggccaggctggtctcaaattcctgacctcaggcaatccacccgcctcagcttcctgctgggattacgggcgtgagctaccctggccaagatttttaatttctgaagcttatagctgctctaaagcacaaggattcagtcccatgatttaaaaaagttgcttgttttgacttcaagtatatggttgagcattctaacttttgttatgtatacatttttattttactgtattcttctagccattgtatcctagtctgtatgttgcagatgagttgtgattctctggtgtctcttccatggacctagagatcatatgctctactactgggatttttttttgtaactttgtttgggatataggctttgagaggttaaggaagtaaatttaagatggatatttaatgttgtaacactttgttaatgcttttttctacaagataattttattatgtgatatggcagctttgttggaaatacctgtttttttgtgtgtgtggaaaatttcttttctggatgaaatctcttgtttaacttttccagttattcataatgaagctctgtttatcttttgaagatcttaagttcagaaacagaaggcaggctgcgtatggtggctcatgccagttatcccagcactttgggaggccgaggtgggtgggtcacctgaggtcaggagttcgaaaccagtctgaccaacatggtgaaaccccatctctactaaaaatacaaaaatcagccgagtgtattagtgagtgcctgtaatcccagctactcggaaggctgaagcaggagaatccctcgaacttgagaggcgcaggttgcagtgagccaagattgctgcactccagcccgggcaacagagcgaaactccgtctcaaacatacacacaaaaaaaagaaggaaagaaaaggcagtagagtatcttatttaagagcatggattctggagagaaactgacagttaaatactagctctgacacttgatggcttgagacccttggcagtagtatgtctcctttgtaattcagtttttttcttctgtagaaagggaatggtaaggaagcgccatgagatttcagtgagagagaagcacttacctcaagtgccagacatgtagcccttcaactaacttattttatttatttattttttgagatggagttttgctcttgttgcccaggctggagtgcaatggcgtgatcccagctcactgcaacctccacctcctggattcaagtgattctcctgcctcagcctccccattagttggggtttacaggcatgtcaccatgcccagctaatttttttttttttttttttttttttgagacacagtctcgctctgtcacccaggctggagtgcagtggcgcgatctcggctcactgcaacctccgccctccgagttcaagcagttctccttcctcagcctcctgagtagctgagactacaggtgcccgccaccacgcccggctaggtgttttttttttttgtatttttagtagagacagggttttaccgtgttagccaggatggtcccgatctcctgacctcaggtgatctgcctgcctccgcctcccaaagtgttgggattataggtgtgagccaccgcgcctggcctactttttttattatttttttttttggagacaagagtctcgctctgtcgcccaggctggagtgcagtggcgtgatctcggctcactgcaaactctgcctcccgggttcatgcggttctcctgccttagcctcccaggtaaactgggactacaggtgcatgctgccacgcctggctaatttttttttttttttgtattttagtagagacggggtttaaccatgttgcccaggctggtctccatctcctgagctcaggcaatctgcctgccttggcctcccaaagtgctaggattacagccgtgagccaccgtgcctggccttctggcctttttttttttttttttttttttttgagacggagtcttgctctgttgtccaagctggagtgtagtggcacaatctcggctcactgcaatctctgcctaccagggtgcaagcgattctcctgcctcagcctcccaagtagctgggactacaggtgcgtgccaccatgcccggctaattttgtgtgtgtgtgtgtgtgtgtgtgtgtgtgtgtgtgtgtgtgtgtgtgttttactagagacggggtttcactttgttggccaggctggtcttgaactcctgaccttgtgatccacctgccttggcttcccaaagtactgggattacgggtgtgagccactgcgcctggccttttttttttggagagataaggtcttgttttgtcatctaggctggagtgcagtggcacagtcatagctcatggtggcctccaacttttggtgtcaaggtatccttacgcctcgtcctccctagtagctgggactacaggtgtatgtgccactgcgcccagctaatatttttacattttgtagagatggagtcttgctgtcttgcccaggttgggtctcagactcctgggctcaaacagtcctcccacctcagactcccaaagtgctgcaagtacgggcatgagccactgagtccagctatcttcaactttcactattcaggttacagtttgtagtaccttttttcgggggtggtgggagggtagtgggagtagcaccctaagatttcttggaataaaacagggcttactacttggttcctggtacttaagaacagtggttcctagactccactgttcccaaacttggaatccagttccccaaattggaatcacctgaggtttaattaccttcatggaggtttaatttgcatacaataaaatgcacatactttaaatgatagtttgataatttttttgttcttattttttttagacatagggccttgttctgtcacccagctgaagtgcagtgtcggaatcatggcttactacatcctcgacctcctaggcccaagaattctctgctttagcctcccgagtagctgggactgcaggtgtgcaccaccacgcctggctacatttttattttgtaatttttttttttgtagagagaggggtctcactatgtgctcagactggtcttgaactcctggccttaagtgattctctcgtctcaacctcacaaagccctgggattataggcatgagccaccacaaaccgccagtttgataaattttgatgaatgtgtatacccaagtaattgccactcagtcgagttaaagagcatttcctcaaggctttaaatttttatttttatttttgagacggagtcttattctgtcatctaggagtgcagtgccgcaatcttggctcactgcagcctctgcctcccgggttcaagtgattcccctgcctcagcctcctgagtagctgggactacaggtgcgtgccaccacacccagctaactttttgtatttttagtagagatggggtttcactctgttagccaggatggtctcgatctgatcttgtgatccgcctgcctctgcttcccaaagtgttgggattacaggcgtgagccaccgcgctcggcgggtttcttttttttttttttttatgagatggaatctcgctctgttgcccaggctgcagtgcagtggcacgatctcagctcactgcaacctccgcctctcgggttcaagcgattcttctgcttcagcctcccgagtagctggaactacaggcacccgccaccacgcccggctaattttttgtgtttttagtggatacggggtttcgccatgttggccaggctggtctcaaaggcctgaccttgtgatcctcctgcctcggtctcccaaagtgctggaattacaggtgtgagccactgctcctggcctaaagttttttagactagtttttttgttcattcgttttatttgcttggcttcctagaatatgacaagttttggtttgtttttgagacagagtcttgatctgtttcccaggctggagtgcagtggtgctatcgtggctcactgcagcctctaactcttgtgcccaagtaatactcctgcctcagcctcatgagcatctgggactacaggcaagcaccaccatacctagttaattaatttaatttttatagagatgacgttttgccatgttgtccaggctggtctctaactcctgagctctggcctcgcaaagtggtgggattataggtgtgaaccactgcacccggcctagttttttattttaagaaatatatatacttggtaaaagtaaactcctgcaataaggtttacaataagcatatataaattcttagccagctcactgggaggtacctaatggttcatwtttctttgtcagttttactagatacgcattgtcttagaggcaatgtaagtttggaattaggccaaacaaagtcaaatcctgattctgtgcatccattgaaggttaaccttataatatttacattttgagataaatgatttcatgctcttatttaggaaacttgacggtatgttacctcagggattgttccttgcctgtctttccccaaagaacttgagtttgaagtgattttcacttggcagtaaattgaaggttttcttcattgcttaccaccatgtgccttaytcctgctgctcttgatctccaagtgcccttactgctacagaaaggaaagctcttgaactaagagcttggcagccacttgatcaggatggccaaataatggcagtacaggttgagcatctgaaatgcttcaagatgggcgctggcatgacattcaaaggaaatgcctagtggtgcctttcagactttcaatttttggatttgggatactgaaccagtaagtataatgcagatattccaaaatctgaagaaattctgaaatctgaaacacttctgggcccaagcattttggataagcagtactcaacctataccaggctcaagttcattatggacagatggatggatggtagtttggccctttcatcaggaatttcccatgcagtcagtaaacaaaataaacagctctatgttttcaacttcatttccccaatttttttttttttttttgagacagagtttcattcttgtcgcccaggctggagtgcagtggcccgatctccactcactgcaacctttgcctcccagaggtttcgccatgttgcccaggctggtgtcaaactcttgggctcaagtgatccatccgccatggcctcccaaagtgctgggattataggcataagctaccttgcctgtccgttttcatatttttttgagagatgaggtctcactgtattgcccagactggtctccacctcttggcttcaagcagtcctcctgcctcccaaagtgctgggattgcagttgtgagccaccacacctggtcaggagttttacatactatgcgttgttacttgtaggtcttgtttggaaagaagtaacttcctaaggtcaattcagaaaagaagggtagtaacttagaggaagtaaatttgaaggccctagtgtctaatattagtaatttgggcttttgaaagtttcctttctaaaaggtaggaaattaactcttttttttttttttttttttgagacggagtctctgtcgcccaggctggagtgcagtggtgcaatctcagctcactgcaagttctgcctcccgggttcacgccattctcctgcctcagcctcccgaatagctgggactacaggcgcccgccactatgcccggctaatttttttgtatttttagtagagacgggatttcaccgtgttagccaggatggtcttgatctcctgacctcgtgatccgcccgcctcggcctcccaaagtgctggaattacaggcgtgagccaccgtgcccggctggaaattaacccttttatataccatccccccacctcacctttttggctacaatcttgctctgtcacccaggctggagtgcagtggcatgatcatagctcactgcagccttgaactcctgggctcaagggatccagctacctcagcctcctgagtagctaggattacagacgcatggcaccaagtcctgatacagtcttctctgtaccagaacaaagtattcagtgattcaagctcacataggcatgaaacagcactgaaagacgaagtgctgtaggagttcagggataaagaagaatttagagtagccaggaagccactgaggcctctggtggtgagggtgtaactcttggcctttaaaatgaggtttaggggaaatgttatgagtagtgggaatcaacccttggcctgaacacagataatcttgttttatctccttatagaaacaggaggtggtggggggtggccagttttggttagactagggaagatgttgggggagaggggggcagtatgcttctgtagtttcgtttttttgtttttttttttttttgagatggagtctcgctctgtcacccaggctggagtgcagtggcgcggtctcggctcactgcaagctccgcctcccgggttcaagcgattctcctgcctcagcctcccgagtagctgggattacaagcacgtgccaccatgcccagctaatttttttgtatttttagtagagacgggtttcaccttgttggtcaggctggtctcgaactcctgattcgcccacctcggcctcccaacgtgctgggattacaggcgtgagccaccgtgcccagccgtttctgtagtttcttgagttcagattccaagatggatttttgcatatgtattgctttatttcttacccccttgatgtaatctactatataaatcttttaaagtccctacatttaaaaatttatcttgttcgaaaacataatagttttatttggtaaattcaaacagtgcaaaaggatatatggcccctagaggtacctgttgtgtttcttgtagaccagtgcatgtaatcccagcacttggggcagctgaggggagcccaggagttctaggccgcagtgagtcatgatcactccactgcactccagcactgcagcctgagtgacaaagcaagaccctttctggggaaaaaaaaaaaaaaagctcctgtgtactattctagagacagtctatacatataccagtgtctattggtgaatattgtacacctctgtcaagccctgttttgtatatctatgtatcccgccattacactatggtatgatagcatatgacatatttggcacatcacttttttcatttaataatcttgtctcagagatcatttgttaacacactttttttttttttgagacagagtctcgctctgtcgcccaggctgcagtgcagtggtgcgatctcggctcactgcaagctccgcctcccaggttcacgtcattctcttgcctcagcctcccgagtagctgggactacaggtgcccgccgccacgcccagctaagtttttgtagtttttagtagagacggggtttcactgtgtcagccagggtggtcttgatctcctgacctcgtgatctgcctgcctcggcctcccagagtgctgggattacaggcatgagccaccgtgcccagcctttttttttttttttttttttttttttttttttgagacggagtcttgctctgtcacgcaggctggagtgcagtggcacagtctcagctaactgcaacctctgcctcccgaggcagcaattctcctgtctcagtctcccaaataactgggattacaggcgtgagccaccagtattaaagccctgtaataatactgtaatactcagacagcaaaattcttttttttttttttttttttttttttttgagacggagtctcgctgtgtcgctcaggctggagtgcagtggcataatctcggctcactgcaagctctgcctcccgggttcacgccgttctcctgcctcagcctccagagtagctaggactacaggtgcccgccaccacgaccagctaattttttgtatttctttttttttttcttttagtagagacggggtttcatggtgttttagccaggatggtctcgatctcctgacctcgtgatccacccgccttggcctcccaaagtgctgggattacaggcgtgagccaccgcgccctgccagcaaaattctttaagcccccactggggcttaacatctattgatgctactgcctaccctttcactgctccttacctttagtttatcactgtaattacccccttttatgtattctccatttcttgttctgtctctcattttatgttacctggcaaaatctcagccctggtttagatcttactttttttttttgacaaagtcttgctctgttacccagggtggagtgcagtggtgcgatctcaaggctcacagcaacctccgccttctgggttcaagcaattctcgtgtctcagcctcctgagtagatgggaccacaggagcgcgccaccacacttggctactttagtagagatggggtttcaccgtgttggccggggtggtctcaaactcctgacctcaagtgatctgcccacctcagcctcccaaagtgctgggactataggtgtgagccaccacgcctagcctaaatcctactctttacctattctgtgcttttgactgaatgtagcgaaagaaaaaattcactgacttgtctctctttgaactcatggacccttgacctcaaaggtggctgcttttagcactgcctagcagtcccgctaagattccttagtccgtttattctcctgcttttaggataatatagcaccatgtcctttggctcaaatctcctgttccctttccttgcctctatcagctgttatgatcttgcttcttacttatttttctattcctgtggatcagtcccttgggagtccattgttctatctaaggtcagcccttccacttgcaagcgaaatctcgttcccctctaatctcgtaatgttgctctagcagttctctcctctcctgcatcatcattttctgcatacagtctgttggtcagatcttaataccccacctagctgcagtgaatgctgggaaatgtagtctttataactggcagccatgtgactatgaaggggaaagctattgaggcagataagcaggcagtctctgccatactttcaacgcttattttttttaaaaaaacaaaaaccaactcttttggtaacaattttactgagatataattcatatatcacaccattcatttgaaatgaacagtttggtgggttttagtatattcacagagttttacgtgtatcactacagtcaattttagaacattattatcacctcaaaaagaaaccctatgttcttcaactgtcatcttcaatctccctatcaccacgcccagccttaggtaaccactaatctactttgtgtctctatagatttgcctattctggatatttcgtgtaatggaatcatatattgtcttttgtgactggcttctttcatttatgcaatgttttaaaggttcatccatgttgtaacatttattttctgactttttttttttttttttttgagacaggattttgctctgtcacccaggctggagtgcagtgtctcgatcactactcactgccactttgccctcctgggcccaagcgatcctgccacctcagcctgcagagtaggtgggaccacaggtatatgctaccacgcctgggtaatatttttattttttgtagagacaagctctcaccatgttgaccaggccagtcttgaactcctgggctcaagtgatcctcccacctcagcctcccaaagtgctgggattataggcatgagccaccaagcccaggctgactactttaaaaaaattttttttagtaaagatgtggtctcactatgttgcccgggctggtgttgaactcgtgcttaagcagttctcccacctcagcctcccagagtgctgataactgcacccggcctgactttttttgtgtgtgatgttttgctcttgttgcccagtctggagagcagtggtacgattttggctcactgacacctccacctcccaggttcaagcgattctcctgcctcagcctcccgagtagctgggattacagacgtgtgccatcatgtccggctaatttttgtatttttagtagaggtaaggtttcactatgttggccaggctggtctcgaactgctgacctcgtgatccgcccaccttggcttccaaagtactgggattacaggtgcgagccaccgcgcccaactaattttttgtatttttagtagagtcagggtctcaccatgttggccaggctggtctctaactcctgatctcaaatgatccatcctcctcagcctcccaaagtgctgggattacaggcgtgagccaccaggcctggccccgggctgacttcttgaaagaacattttccaccacatatctcagtgcccacgttttctcaattcactgccatctactcttgcctgtggctatatgaaaaggttttctcctgttgctggacacctcctcatagacctgtgttctttttgcaagcatgtagtttggactcttttcttgtaatgtgttcttccttttttcttggtgttcattatcatcatacctttttgagcatttcagttatttctggcttcttcatgaccaccacttcctttgtgttggtggcactctttggctagatcactgcccctctccattccatacactrgaagactatgctgtttttacctgtaataacagcttacctgggcactgatatttttcagctgactgtggggaaatgtttgtgaggtttggaaaacgcctccttagattgtgcccattccacctccccttccattagggttctttcttttgggcaccctcatacccttgccatagttttctcatccctatccagttaaccactcaatcacttttcgtgccctgccaaggctctgtttcttcctcttctttttttttggagacagagtcttgctctgttgcccaggctagagtgcagtggtgtgatcttggctcactgcaacctccgcctcctgggttcaagcgattctcctacctcagcctcccgagtagctgaaattataggcgcccaccaccacgcctggctaatttttgtatttttagtagagatggggtttcaccatgttggctaggctggtcttgaactcctgacctcaggtgatctgcacccctctcagtctcccaaagtgccgggattacaggtgtgaacagccgtgcccggccaggctttgtttctctattaattacagacctgattgtgctggtccagtggctttcccttccttacagaatagaatgcagattgctctgcatgacataccatatcctctggtctaaccatcgccccatctttccacccttattttcaaaaatctcctttctgaattctttttttttttttgagacggagtcttgcactgtcgtccaggctggagtgccgtggtgcgatctcggctcactgcaagctccgcctcccgggttcacgtcattctcctgcctcagcctcccgagtagctgggactacaggtgcctgccaccacacccggctgtttttttttgtatttttagtagagacatgatttcaccgtgttagccaagatggtctcgatctcctgacctcgtgatctgcccgcctcggcctcccaaagtgctgggattacaagtgtgagccaccgcgcccgaccgccaaattcttgtgttactggtcattgaggttatttgctcaagctgtttcctcaccttagaaagtattcctgaaccatcattaccgctctttccaggggacttgtcctccttcttcaaggtccatccaggtcagatatcatcttatctgaagctctctggcagaatcacttgccttttctctgagttcataccagagaagataagcttttgttacagcacttaattacattgtgctgttttccctgagtgttttccagataaagctgtatctctagtagctagaacaaggaatggcccatagaagacagtggtttgtggccggatgcagtggctcacgcctgaaatcccagcattttgggaggccgaggcaggtagatcacttgaggtgaagagtttgagaccagtttggccaatatggtcaaaccccatctctactaaaattacaaaaattagctgggcatggttgtgcgcacctgtaattctagttactcatgaggctgatgcaggagaattggtggaacccgggaggtggaggttgcattgagccaagatcatgccactgcacttcagcctgggcaacagagagagactctatctcagaaaaacaaaaacaaaaaagtggtttgtatgagaccagtcggggcaataagaattgagacaaggagctggatgcagtggctcacgcctgtaatcctagcacttcgggaggctgaggcaggcagatcgcgaggtcaggagttcgagaccagcctgaccaacatggtgaatccctgtctctactaaaaatacaaaaattaggccgggggcggtggctcacacctgtaatcccagcactttgggaggctgaggcaggcagatcacgaggtcaggagattgagaccatcctggctaacacggtgaaaccctgtctctaataaaaaataaaaaaattagccaggcgtgttggcgggtgcctgtagtcctagctacttgggaggctgaggcaggagaatggcgtgaacccgggaggtggagcttgcagtgagccgagatcatgccacagcactccagcctgggcaacagaggagactccatctcaaaaaaaaaaaaattagccaggcgtagtggtgcatgcctgtaatcccagctactcaggaggctgagacaggagaactgcttgaacccgggaggcggaggttgcagtgagccgagattgcaccactgcactccagcctgggcgacagagcgagattttgtctctcacacacacacacacacacacacacacacacacacacacacacacacagaattgagacaagggacctgtggtcctaactgttcttgaggctgagcctcttaaaaaaaaaaaaaaaaaaaaaagccagtgcagtggcctacacctgtaatctgagcactttgggaggccaaggcaggtagatcgcttgatcccaggagttggagacccgtctggcccatatgatggaaccccatctctacagcaattagccaaacgtggtggtgtgtgcctgtggtctcagctacttgggatactgaggtgggagaactgattgagcctgggaggttgaggctgcagtgagccataattacgtcactgcactccagtctgggtgacagaggcagaccctctctggaaaaaaaagttgacacaaggccactgggcctggcaaggagaagatcaccattatactgcagtagtaggtggcagagtgactaagaaggaagcgtaaaagatggatgggagcacttagaatttatctttaaaatacctgatttttttattttttgagacagagtcttgctctgttgccgaggctggagtggcgcgatcttggctcactgcagcctccgcctcccaggttccagcgattctcctgcctcagcctctcaggtagctgggattacaggcacgctcaccatgcctgggtaatttttgtatttttagtagagacggggtttgaccatgttggccaggctggtcttgaactcctgacctcagctgatctaccccccttgacctcccaaagtgctaggattacagaagtgagccatcacgcctggcctctaaaagacctgatgtttgtggtgaccattttctggaaaaatttgtgacattaaattgtggatatgtcttctttgaccaatccagcagctgtgggagacatgtttagaacagcgttgtctttctgtgatggtggacgtgctgtatatctgcactgtccagtaccatagctcccagccacatgtggctattgagcattgaatatggtcagtgtggccaaggaactgaatttgaaaatgaaaaattttaggccaagtgcagtagttcacacctgtaatcccagcacttgtggaaggctgaggcaggcagatgacttgagctcaggagtttgagaccagtctgggtaacatggcaagacctgtcttttattcaatactttaaaatttttacttacttgataaaaaggaagaatattttaaaatttaaacatcagttttttgttgttcttgtttttgacacagggactcactctggcacccaggctggagagcaatggtatgatcatggctcactgtagactttacctactggctgaagctgtcctctcacctcagtttcccacccttacccacccagtagctgggattacagacactcaccaacacgcctggctaatttttattatttgtagaaatgaggtctcactgtattgcccaggctggtctcgagctcctggcctcagacatcctgggattacaggtgggagtcactgtgcctgaccagcattgtttttttgtttttgtttgtttttttaaagataaattaattggccatgtgtggtggctcacgcctgtaatcccagcactttgcgggggctgaggctggtggatcacttgagataggagttcgagaccagcctggccaataaggcaaaaccctgtctctactaaaaatacggaaatgagccgaacatagtggtggatgcctataatcccagctacttgggaggctgaggcgggagaatcacttgaacctgggaggcaggattgtagtgagctgagatcgtgccattacactccagtctgggggacaagatcgaaacgctgtctcaaaaaaaaaaaaaaaaaaaaaagataaattaattaggccgggcacagtggctcacgcctgtaatcccagcactttgggaggctgaggtgggcggatcacctgaggttgggaagttcagaccagcctgaccaacatggagaaaccccgtctctactaaaaatacaaaattacccgggcatggtggtgcatgcctgtaatcccagctaccggggaggcggaggttgtagtgagttgagatcgcgccattgcactccagcctgggcaacaagagcgaaactctgtcttaaaaaaagaaagtcacaatgtggctagtagctaccacgttgggcagtgaagctgtgacattaccagttgtaggattgaatgcaatccagactttttgtctgttgtgttcacacttgaagcagtgactctgctgcctaagtatgtataatttttacttttttttttttttttgacggattctcactctgtcgctcaagttggagtgcagtggtgtgatcttggctcactgcagcctctgtctcctgggttcaactgatcttcctgcctcagcctccctagtagctggaactacacgtgtgtactaccacacctggctaatttttgtatttctttttttttttttttgagacggcgttgctctgtcacccagactggagtgcagtggtgcgatctcggctcactgcaacctctgcctcccgggtacaagcggttctcctgcctcatcctcccaagtagctgggactacaggtgcatgccaccacgcctggctagttttttgtatttttagtagagacggggtttcaccgtgttagccagggtggtctcgatctcctgacctcgtgatcctcctgcctcagcctcccaaagtgctgggattacaggcatgagccactgcatccagcctaatttttgtatttttagtagagacggggtttcaccacgttggccaggctggtctcgaactcctgacctcaagtaatctgcccgcctcagcttcccagaatgctgagattataggggagagccaccacacctggccccgtactcttttatattaatatccatgacgccttttaccttttctgaaatagattttttcagtttctctactgtcactctatcaaaatttgtaaattttccttggaatattagacagaggattaagccacgtgtttttccagtccaacttttgttacatctgtattttccttttacatgttgactggttcaaactggctagcatcccaagtaaggtgtgaattaaatcctgacatggggctgggcgtggtggctcatacctgtaataccagcactttgagaggccaaggcaggcgaattacctgtggtcaggagttcaagactagtctggccaacatggtgaacccgtctctacaaaaaatacaaaaattaaggctgggtgcagtggctcacgcctgtaatcccagcattttgggaggccgaggcaggtggatcacaaggtcaggagttcaagaccagcctggccaagatgttccccgtctctactaaaactacaaaaattagctgggcgtggtggcgggtgcctgtagtcccagctactcagaaggctgggacacaagaatcgcttgaacccgggaggtggaggctgcagtgagctgagattgtgccactgcattccagcctgggtgacagagtgagactccatcttaaagaaaaaaaaaaaattcctgacaacggactgtcaaagctatttgcttctcacagtctgtgggtattatagatggacggggacccgccaataaaggaggggaaggctccttttgtgaaactgatttgcttctgtcttctaaatcagtatgtgtacttgggcctactaatcaagtcttactgttttgtctgtaactttttttttttttttttttttgaggtggagtctcactctgttgcccaggctggagtgcagtggcaccatctcggctcactgcaagctccacctcctgggttcatgccatttttctgcctcagcctcccaagtagctgggactacaggcacctgccaccacgcccggctaattttttgtgtgtgtggtagagactgggattcactgtgttaggatggtgtcaatatcctgacctcgtgatccgcctgcctcggcctcccaaagtgctgggattacaggcgtaagccaccgcgcccggcttctgtaacttttatttattgtaagttgttagctattggaattctggacagaacagagctcctgagtctgttcactgctgtaagaagtaagaagtgtcatgactctttttcagcagaggaattagtctattaatgacatgtggctggaaatagacctgccgctcagaacctgttctggagttaagtccttccaagatgggcctagggaatctgagaagcacagcaggttcctctcagcaagtgctgctgaaccccaaactaagctcacacattcttcttgggttctgcctggagagtccctattagcctcatccctaagcaaccactatgctcctttttttttttggagatggagtctcgctttgtcgcccaggctggagcgcaatgtcacaatcttcactcactgcaagctcagccccccgagtagctgggattacaggtggacgccaccaggcctggctgatttttttttttgtatttttgtagagatggggtttcaccaggttggccaggttggtcttgaactcctgacttcaggtgttccacccgcctcggcctcccaaagtgctgggattacaggcgtgagctaccacgcccagcagctgctttctgtctctgtagatttacctattctggatatttcatacaaatatggtatgaaacatgtggttctttgtgactggtttcttttactgagcatagtattttcaagattcatccatgttgtagcatgtttcagtacagtactgtacttcgttccttattgttgctgagtagtactccactgtatggctataacacatggttagatatgtagcttagataggattgttttgttaattaaaagctaatgaacaaagatttcaaagtgtgagatattagtcattagtaggctggccattgaacagctccacatttcaaaatgtgagatactaaattagttattagtgggctggcccattgaacagctccagaaggccttcaggaagttgtccagacaaatgtgagtaagcatcatggtcacacaaatgtgagaaaattaccaaagactgctatgtgaaatgcggagagttgctcattaatgcatggttttaatttacctactgaagcatagtcagtagccactgtagcatctgaagaacatatgatggacacaccactcccacactcagcacccagataagcaaggcaggcagcaatgcagatgagctatagttatcccaggaaatcactttgacttgtaaagtgtgaaaaggactggccttcacctatcattctttctatagcagagctccctaaagctcagaaagccacagctggctggatgtcatggctccacctattataatcccaccactttggaagacagaggcgggtgggtcacttaagcccaggagttcatcactgagcccaggagtttgagaccagcctgggcaacatggcaaaaccccgtctccacacacacacccacacaaatagaaaaaaatttagtcgggaatggtggcacacacctatagtcccagctactcgggaagctgaggtgggagggtcacctgagcccaggagtttgacgctgcagtgagccttgatgacagcactgcactccagcctgggcaacagagtgagaccttgtctccaggaaaaaaaaaaaaagagaaagccatccccttccttgacatcatctgtaatgagtaaacagacattaaaacagtaagagtaaacaggtgtaagacatgctagaaccaaagaaccaagagttgatgatttcagagtgactcaaacatatgtgacattgttattatttcttcctctggtgtgtacagaaaaaagatacacacatctaaaagaaatgtatgcaaaaacatcataaaagcatagaaaacaaacataatagggtttttttttttgttttttttttttgagacctggagtctcgctctgtcccccgggctggggtgcagtggtgtgatctcactgcaacctctgctcccgggttcacaccattctcctacctcagcctcctgagtagctggaactacaggtgcccgccaccacgcctggctaattttttttgtatttttagtagagacggggtttcaccgtgttagccaggatggtctctatgctgacctcgtgatctgcccaccttgggcctcccaaagtgctgggattacaggcatgagccaccgcgcccgacccttttttttttttttcccccgagatggagtctcgctctgtcacctaggctggagtgcaatggcacgatctcggctcattgcaacctctgcttctcaggttcaagcaattttcctgcctcagcctcccaagtagctgggactacaggtgcgtgccaccatgcctggctaattttttgtatttttagtagagatggggtttcaccatattagccaggatggtctcaatttcctgacctcatgatccgcccgcctcggcctcccaaagtgctgggattacaggtgtgagcccccacgcccggcccggttttttttttttttttttttttttttttttttttttttttttgagacggagtttctctcttgttgcccaggctggagtggaatggcgtgatctcggctcactgcaacctccgcctcccaggttcaagcggttctcctgcctcagcctcctgagtagctgggattacaggcacccgccaccatgcctggctaatttttttttgtatttttagtagagacgggattttgccatgttggccagactggtctcgatttcctgacgtcaggtgatccatttgcctcggcctcccaaagtgctgggattacaggcgtgagctgccacgcccggtcatgtaacagttttaaaaagcccatacggtcatactgaatatagacatagacagagttaatcaaatacatcagagactgagtttgtgaagttaaggaaaaatattcaaactagttaatcgccctaagttgcatattaattaatcgagtctttcagtgtcaccaaggtttgcctgagtaggcaaaggagaataatacgctaaagctgtagaatcacttctcttgacacggggaaggaaggagggtaagacagtggaatgtttagaaatgtgtactctgaaacggattgcttaatttacttcagtgtccaattctgcctcttactggctagcagtgcgactgacgttgaacaaattagcctttccatactcagtttcttcatttgtaaatgagagtattagaacttacaggaggactgttgcgaggattgtttgtttaaagtttataactgcattatttgttagctgtttcttatatttttcctcttctacaaagtagtggtgggagacaaggcttccctacatttagtttgatgcctgtggttctaagtataaggagaaaacggaagggaggaaagaggaagtaaaaatgaaagatgacctaaataaatggaaaggcgtccatgttcatatgtcagaagacttaacattgtaaagatgacagtactccccaaatcgatctgtagattcagtgtaattcctatcaaaattccagctggcttttttgcagaaattgacaaactgttactaaaatacataccaaaattcaggggacccagaataaccaaaataatcttggaaaaaaacaaagctggaggactcacacctccagattttaaaacttactgcaaagcaacagtaatcaagactgtggtactagtataaaggtggacaatatagaccaatggaataggattaatccaaagtaaaccctcagttgctaattagttgatttctcaagtgtgccaggaccatccagttggggggaaaatagtcttttcagtaaataatgctgaggtgactagatttccaaatgaaaaagaatgaagttggaccccttacctcatatcatgtatgaaaattaactcaaaatgaatcaaaggcctaaagtgtaagacttaaaactatagaaagaagcatatatattttttttacgaccttgaatttggctgtggtattttagatatgccaccaaaccatcagtaaccaaagggaaaaatagataaatttgacttcaacaaaataaaaaacgttgtgccccaaagggcatcatcaaaaaaataaaaaaaacaactgagtttaaaaatgggcaatgggggctgggtgcggtggctcattgctgtaatcctagcactttgggaggccgaggcaagtggatcacctgaggtcaggagtttgagaccagcctggtcaacatggtaaaaccccgtctctactaaaaataaaaaaattagccaggcgtggtggcagacgcctcccagctatttgggaggctgaggcaggagaattgcttgaacctgggaggcggaggttgcagtgagccaagatcgcgccactgcactccagcctgggcgacagagtaagactctgtctcagaaaaaaaaaaaaaaaggtaggggggcaatggaccaggcgcagtggctcacccctgtagtcccaacacttagggagccaacacgggagaatcacttgaggctaggagtttgagactagccagggcaacacagcaagaccctgtctctacataaaagataattaaatttgtttttcccccgagacagtcttgctgtcacccagactggagtgcagtggtgccatctcagctcactgcaacctccgcctcccaggttcaaacaattctcctgcctcagcctcccgagtagctgggattacaggtgcctgccaccacgctaggctaatttttgtgttcatagtagagaatggtttcaccatgttggccaggctgctggtttcgaactcctgacctcaagtgatctgcccatctgagcctcccaaagtacttggattacaggcgtgagccactgcacccagccaagataattaaatttttagaaagtgggggcatcacttgagcccaggagtttaagaccatcctgggcaacatggtgaaactccatctttacaaaaaaaacacaaaaattagctgggcgtggtgtgtgtgcctgtactcctagctacttgggagactgaagtgggaggattacctgagcctgggaggtcaaggttgtggtaagccatgataacaccacctcactccagcctggatgacagtgagaccctgtctcaaaaaaaaaaaattaaaagttgtaaaagaaatactgttatttgtgtattgttactggtgacttaattagatataactgacttttggttaaataaacctctactccaaacttataagttatttctgagactaaacctagcctggaaaatgacacgtctgggagagctaagcgtgatttcctttcttgacaaaccatgtacttgtaaagaatgctgcattatagcaaagtggaaaggagagataattctgcaaaatttctcctgcgtttttcaaggagaaaacagcaagtttgattttctgtgcttgtactttttacttctcaacttctgtgtattgccgcactcccagtatcccagaaatcacttaggctttcattttgtccgataatcacttgtaatttttgtctttgtcaccattagtggctaaatgattttattctttttctgggccaaatgttctttatcagatatttttctttttcttttctttcttttttctgagacacagtctcactctgccgcccaggctgtaatgcagtagtgcaatctcggctcactgcaacctccacctcccaggttcaagtgattctcgtgcctcagccttccaagtagctgggattacaggcagatgccaccatgcccggctaatttttgtattttcagtagagacggggttttgccatgtttgccaggctggtctcgaactcctgacctcaagtgatccgcccacctcagcctcccaaagtgctgggattatgggcgtgagccaccgtgcctggctggactagggtctttaaacgtgaattccctccctataagcaaaggtggagacagagtctggacattctaggaagggaaggcacaaacagaatagaagacacatgcagtaatctcagacacaccagagcacccggaaggaatggagtgcaggctgaaagtgcagaggggaaggtggggctggagagggcccaaggacaggcaatgatttattccccatctataaggaaacttttcaaaccataacagaagatttaagtcaatactggaacaaatattgtgggcatgttgaactataaacaaagcaaagatagctctttttttttttttttgagatggattctcgctctatagaccaggctggagtgcagtggtgtgatctcagctcactgcaagctccaccttccgggttcacgccattctcctgcctcagcctcccgagtagctgggactacaggcgcctgccaccatgcccggctaattttttgtatttttagtagaaatgttagccgggatggtctcgatctcctgacctcgtgatctgcccgcctcggcctcccaaagtgctggaattacaggcgtgagccaccacacctggccgaaagagattatttctcaagaattgaatgtcttctaggtagggtgctacgcaaaggtggcagccttttctttttctttttctttttttttttctgatacgatggagttttgctcttgtcgcccaggctggagtgcaatggcgctaactcggctcactgcaacctttgcctcctgtgttcaagtgattctcctgcctcagcatctcagtagttgggattacaggtgcccaccaccacgcccacctaatttttgtatttttagtggatatggggttacaccatgttggtcaggcttgtctcgaactcctgacctcaggtgatccacccacctctcaaagtactgggattgcaggcatgaaccccagcacactcggccaaagcagccttttcttgaactggggaattcctgttgacgtttctttgcatcccatagggtcctggttgtttgactttgggcaaaagcccatgcagattaggccttatgagagatgtaaagtttattaaatctttatttggtgagacagggtcttactgtgtcactcaggctggagtgtagtggcatgatttcagctcactgcaacctctgcctcctgtactcaagtgatcctcccatcttagcctcctgagtagctgtgaccacagatgcgcaccaccacagccagctaattttttgtattttgggtagagatggggtttcactgtgttgtttaggatggtctccaactcttaggctcaagcaatttgcctgccttggcttcccaaagtgctgggattacaggtgtgagccaccacgcccagtgtctatttttttattttatttatttatttatttttgagacggagtctctctctgtcacccaggctggagtgcagtggcacgatcttagctcactgcaagctccacctcctgggttcaccccattctcatgcctcagcctcctgagtagctggaactacaggcgcccttcacgacgcctggctaattttttgtatttttagtagagacgggatttcactatgttagccaggatggtctcgatctccttacctcgtgatctgcccacctcagcctcccaaagtgctgggattacaggtgtgagccaccatgcccggccaatatttttttatttttatgagatagggtcttgctattttgcccaagctggtctcaaactctggactctagctgtcttcccacctcagcctcctgagtagatgggattacaggcatgagttgccacacttgactctaactggggaacttcactctctgtcttttttttttttgagacgaattttcgctcttgttgcctaaactggagtgcagtggcacgatctcagctcactgcaacttcctcctcccgggttcaagtgattctcctgcctcagcctcctgagtagctgagattacaggtgcggaccaccatgcccggctaatttttgtatttttagtagagatggggtttcaccatgttggtcaggctggtctcgaactcctgacatcgtgatccacaggcctcggcctcccaaagtgctgggattacaggcgtgagccaccatgccaatccttttttttttttgacagagtctcactgtgttgcccaggctggagtgcagtggcgcgttctcagctcactgcaacctccgcctgcctaattcaagtgattctcatgcctcagcatcctgagtagcctttcaggggttacaggtgcctgccaccaacccagctaactttttttttttttttgagacggggtttttctcttgtttcccaggctggaatgcaatggcgagatatcggcttactgcagcctctgcctcctgagttcaggagattctcctgcctcagcctctcgagtagccgggattatgggtacatgccactacgtccaacttatttttatattttttgtagagacggggtttcacaatgttggccaggctggtcttgaactctggacctcaagtgatccgcctacctcagcctcccaaagtgctggcattacaggcatgagccattactcctagccttgactgcatgctcttgtttgaagatatgcattgagcacatttccctatcatcgatatgcttcttattgtgctttcatgattagtagtatcttcaatttactccctttttgcaaaaaaaaaaaaagttactagattttgtagatttggataaaattctataatatctgtatctatatatatatacacacacacgtattcactgctgtatgtaatattgtcctgagaattcacaaatgagtaatggcagcactgtcagccctctgagtttttttgttttgttttcattgtttatttttgtcgttgtttgccctctgagttttcttctggtacccctgtggattgtcttatccattctggttggggaacataccctttagacaatatagttttgataatgagtatttattattattattattattattattattattattattatttttgagacaagagtctctgtcacccaggctggagtgcagtggcatgatcttggctcactgcaacctccacctcccaggttcaagcgattctcttgcctcaccccaccacgcctgggtaattttaatatttttaatagagatggggtttcatatgttggccaggctggtctcaaactcctgacctcgtgatctgcccgcctcggcctcccagagtgctgggattacaggcgtgaatcaccatgcccagctgagtgtatataatttaggattagtttgactataggtaacagagacttgaaaaataccaccttaaataagacagtcatttatttctcattcatatggaagaaacatggaaggtaggcagtcttggggctgagatggtggctcccaagatcacctgagatccaggctcctttttaccttttggttcttccagccccacggtatggcattcattctcacataccaggatggctgcttagaaaccagcccttactttagatttaagcagcaggaaaggaggaggataataaagacttccctttaagaaagactttctggaagtcccacaacatactgctgattctcacatctcatggtacatggccatgtctccaagggaagctaggaagtgtagtctacaacaaagtacatagctaaaaatcgaagtatggtctaggagggaagggcgggaattgggatggttgaccatcactgtctgccagatggaaggaatctgcagatttctctcttttttccccccactgggggcgagagtggtggtaacagctttattgaaatataatccacatatcttacaattcacctttttaaagtgtgaattatatatactgtgggctgggtgcggtggctcacgcctgtaatcccaacacactgggagagacaggcaggaggatcgcttgacctcaggagtttgagagcagctggggcaacgtggtgaaacccggtcactactaaaaatacaaaaaattagccgggtgtggtggcatgcacctttagttccagctacttgggagactgagattggaggttcacttgagcctggggaggctaaggttgcagtgagtggagatcgcaccactatactccagcctgggcaacagagtgagaccctgtctcaaaataaataaaatgtgtgaattatatatactataatcaatagtttatagtatattcatagagttgtgcagccatcaccacaataattttggaaaaatctttttacctgagaaactccagtattccattagtcattttccatttctctccacccccaagtccctgccctaggcaactaccagtctattttctctttctgaatttgtttattctggacaattttatataaatggaatcatgcatgttggtttttgtgactgggttctttcacttatataacatttccaagatctatccatactatagcatatatcagtactttatcctttatcgctgaataatattccattccattgtatggatatattatattcatcagttgttggatatttgggttctttacattttttgacaatatattatgaataatcctgctatgaatattcatgtagaggtacaagttgttatgtggacatatgtttttgtttctcttagatatatacctaggaatagaattgcagggtcatacctactcacatcctttgctcattttttaattggattagattatttgtctttttattattgaattgtaagagttctttattttttaattttttctatatactgtatttaggcctggggaggtggcttatgcttgtaatcccagcactttgggaggctgaatcgggaggattgcatgagcccaggagtttgagaccagcctgggtaatatagtgaaacgctatctgtataaaaattagtcagctgtggtggcaggagcctggtagtcccagctactggagaggttgaggtgggaggatcgcttgagttgagcctgggaggcagaggctgcagtgagccaatattgcaccactgcattccagccttggtgacagaatgagaccctttctgaaaataactacataatagagaaacacatagataggttagataggtacatagattggatagatgcgtagatagatgggcagtggctcacgcctgtaatccctcagcactgtgggaggccgaggcgagtagatcacttgagctcaggagttggagaccagcctgggaaacatggcaaaaccctgtctctgccaaaaatacaaaaattagctgggcgtggtggcgcatgcctgtggtcccagctgctggggaatttgaagtgggaggatcacttgagcctcggaggtggagattgcattgagccaagatcacgccactgcattccagcctgggtgacagagtgagacctcatctcaaaaaaaaaaaaaaaaaaaaaaagatagatggatagataaatagcgtacttcatgtcagaaggagttctctctttttttttttttttttttttaagacacagtttcactctgttgcccaggctggagtgctctgttgcccaggctggagtgcagtggtacaatctgggctcactgcaacttctgcctcctgggttcaagcgattctcctgcctcagtctcccgagtaactgggattacaggtgcccgccaccacacccggctaagttttgaattttttgtagaaacggggttttgctgggttggtcaggctggtctcgaactcctgacctcaagtgttctgcttgcctcagcctcccaaagtgctgggattacaggtgtgagctaccgtgcccagcccaaaaagagttctttatgatttcaaccttgcaagagatcctgagccagaccaccaacctaagctgcttttttgtagttgagtcataagagtttgagacaaggttccactctgtcacccagtctggagtgcagtgatgcaatcatagctcaccacatcctccacctcctgggctcaagcaatcctcccacctcagcctccttggtagctgggactacaggtgcatgctaccacaactggctgattttttttttttttcttttccttctttttttagagacagtgtctcactggggttccccaggctggagtgtagtgatgcaatctcagctcactgcagcttccacctccagggctcaggggattatcccacctgagcctcccaagtaactgtgattagcatgcaccaccgctcctggctaattttttgtatttttagtagagacagggtttcactatgtttcccaggctcgtcttgaactcctggactctcaagcagtccacctgtttcggcctcccagattgctgggattataggcgtgagccactgcgcccggcccttttctttctcccctcccctctcatgcttccgtccgtccttcctttctcagtgtctcactatgttgtcagggctggtctcttaactcctgggcctgagcattcctcctgcttcagtctcccaaagtgttgggattacagacatgaaccactgtgctcggcctcaattgatttttcttttttgagacggagtttcgctcttgttgcccaggctggagtgcaatggcatgatctcggctcaccacaacctctgcctcccgggttcaagcgattctcctgcctcttgctcctgtgtagctaggattataggcatgtgccaccacgcctggctaattttgtatttttggtagagatggggtttctccatgttggccaggctggtctcaaactcctgacctcaggtgatctgcctgcctcggcctcccaaaatgctgggattataggcgtgagccaccgcgcccagccaagaatgctgtttctttacaaacaaatctagattggtaaaagaaggaatatccaaacttagaaagattgcagaatgtctacccaaacaacctgccgatgacttttttggttctttcctcccttgggtactccctttcatcagtcctttcattgtttttaccctgcttgacaaattgtttcctttttttttttttttttttttgtgagatggagtcttgctctgtcccccaggctggtgtgcagtggcccgatcttggctcactgcaagctctgtctcctgggttcacgccattctcctgcctcagcctcccaagtagctgggactacaggtgcctgccaccatgcccggctagttatttgtatttttagtagagatggggtttctccgtgttagccaggatggtctcgatctcctgacctcgtgatccacccgcctcggcctcccaaagtgctgggattataggcgtgagccactgcgcctggctcaattgattttttaatgttaatattgtatcctgcaaccttactgaacttgtttattctaaaagttttctttaggatttcccacattacaaaatcatctcatgtgtgaattgagatagttttacttcttcctttccaatttggatgtcttttatttcattttcttaccttattgccctggctaggacctccagtatcctgctggatagaagtagcaagaacaggccaggcgtggtggctcacgcctgtaatcccagcactttgggaggctgaggcaggtggatcacctgaggtcaggagttcaagaccagcctggccaacaaggtgaaaccccatctctatcaaaaattagctggatgtggtggtacgtgcctgtaatcccagctacttgggagtctgaggcaggagaattgcttgaacccgggaggctggaggttgcagtgaactgagattgggccagtgcactccagcctgggcgacagagtgagactccgtctcaaaaaaaaaaagaagtggcaagaacagacattcttgtcttgttcctgatcttagggggcagacctttttttcagtcttttaccattaagtataatgttagttacgagtttttaatgtataaccttttggtgccaggtggatcggcgtactagaagtttgaatttgagtatgctaatagaggtttatgccccatggttaccaaagcatgtgtcatcctgtaagctacctatgacttcttgtgcattgcaggtaatatctgtgttttgtgtttcagcaatggctgccatccggaagaaactggtgattgttggtgatggagcctgtggaaagacatgcttgctcatagtcttcagcaaggaccagttcccagaggtgtatgtgcccacagtgtttgagaactatgtggcagatatcgaggtggatggaaagcaggtgagtatacttttcataacaactgatgccattttccatgttagaatatttatggagcatgtagagaattagagctttttgcctcttcagtataccatataacaaaaatgttggaaagaagaatccattctcatcctgccatcttagtccaagtttgttctttttttttttttggagacggagtctcattctgttgcccaggctagagtgcagtggctcggtcttggctcactgcaacctctgcctcccaggttcaagtgattctcctgcctcagcctcccaaatagcagggattacaggcatgttgccaccatgctgagctcatttttcgtttagtagagatggggtttcaccaggctggtctcaaactcctgacctcgggtgatccacccacctcagcctcccaaagtgctgggattacaggagtgagccactgtgcccagccttcccccaggtttaaaggattctcctgcctcagcctccccagtagctgggattacgggaatatgccaccacacctggctgatttttgtatttttagtagaaatggggtttcactacgttggccaggctggtcatgaactcctgaccgcaggtgattggctgttttttcatttttaactgctactcatccagactttgtttacattcatatgtatttgacatggtgtccttagcatatgtgttttttttttgttttgttttgttgtttgagacagagtctcgctctgtcgcccaggctggagtgcagtggtacaatctcagctcgctgcaacctccacctcccgggttcaagcaattcttttgcctcagcctccagagtagagtagctgggattacaggcgcacgccaccatgcctggctaatacttgtattttgtaaagatgcaattttgccatgttggccaggctggtctcaagctcctgacctcagatgatccacctgcctcagcctcccaaagtgctgggattacaggcgtgagccaccttgcccagccatatgtgctcttttcaagtttacgtatatttgaagtttagttcattgccatatagataatgctcagatgaacttctttgtatgcttggactttgacaaaaattctgtcaaagtatttaatcagatgtcccagtattagattactagttcaagctctgcctcctgggttcacgctgttctcctgcctcatcctcccaagtagctgggactacaggtgtccaccaccagactggctaattttttgtatttttagtagagacggggtttcaccgtgttagccaggatggtctcgatctcctgatcttgtgatctgcccgtctcggcctcccaaagtgctgggattacaggcatgagccactgtgcccggccaaaagatttttttttactttaacataaaatagcctgccacagttgttttattttattgtcattgatggtgagaacagtgcttccccatttctgtcctaaaagccctctggcaagactggaacaaagctcttgtgaaattggagggtttttttgggttttaattttggttttggtttgtttttgtttttttttttaatcttctgcttccttttgttgtctaagtaatgctttgcttggcctctcatacttttttttttttctcttaaataaagagacagggattgtactttgtctcccaggcctgcagtgctgtgacatgatcatgcagccttgaactcttgggctcaagtgatccttccacctcagcctcccaaatagctggcactgtaggtatgtgccaccacacctgggtaatttatgtttttagagatgaggtcttgtgttggtccagctggtttcaaacaactgggctcaagttcttccatctcagccccaagtggctgggcttacaggcgcaagccagcgtgcccagctctcctatacatcttttgaagtgggtcagctgaaaggaaaaaacccctaaaactagaatgaggtgctcttctccaacattctcatttttcttgagcattcagttatatgtctcatatgctgctaacacttgatatattagcttccattcatcccctttctcctttcttactttgtttttgtttgtttgtctagagacagagtctccctctatcacccaggttggagtgcaatggcatgatcttggtttacaacaacctccgcctcctgagttcaagcaattctcctatctcagcctcccgaggagctgggattacaggtgcctgccaccaagcccagctaatctttgtatttttagtagagacgaggtttcgccatgttggccaggctggtctcgaacttttgacgtcaggtgatccgcccgccttggcctcccaaagtgctgggattacatgcatgagccaccgtgcctggccacttctacttgtccacattacttatttctttctgtcctagggccacctagcctccttttgtggcactgtgtgaggaatgtgggttagatcagctgctcagaactccagggtccctcattgtagggcttcctgatagttgtttgaccatcagtaagctcctgacctttgagccttcctcatttgtaaaacggtttttataggtgacatcaaggttctgtgaagtaacggaaaatgtttggcagcaccaaagcgctttctaagagatgaatactgccatgttcaaaaccctctttcatagtttgtagtccttttttttttttttttttttgagacagagtctcgctctgtcgcccaggctggagtgcagtggcgtgatctctgctaactgcaacctctgcctcctgggttcacgccattctcctgcctcagcctccggagtagccgggactacaggcgcccgccaccacgcctggctagttttttgtatttttagtagagacagggtttcaccgtgttagccaggatggtctggatctcctgacctcgtgatctgcctgcctcccaaagtgctgggattacaggcgtgagccactgcgcccgtcctatagtttgtgctcttttttattcaaatacagagtgagccacgatgattgctcttatgctaataggaactctaagatactttctggcccaagtatagatggaaaaaatacaacaaataccagcctaacagaattttgggatgtaccctgaaggtggcaaaccaatacagagggtgttaattcagcctcagccaagcatggatgcttggacataggtgtttttgtggtcctgataggaaaactggttttatatggacacagggcccagttgtgacaaactaggtagaaatgtgatgacatcttcaggattggtgtcaagttatagccctcttacctaacttagattgatgcaccatacatagaaagatccattggcttggggaagcaatgtcaggttggcattttcatagcttatttctcaaaagcctagtagtgaatgtatattactggttgtatcctaacattttctccagagagtggctgttaattgctgcatgtctgtaagcatgaactggaagggtcttttccatctgtggcagtatgtatgttttggaagcagctctttggttctcttggaaacattatttctgcctgggcatcttggaacaaccagaatcttgcccataagaaatttagagaccttgacttaaaaccttgaggcatggtctgtgagtatttttcttgtgctgcaaaccttggacatcactgaccctcgcaagatagggggaggttctcacttgaggagagtcccctggaataaaagtgtttgattgaagagcatattacaggctacctgcctgcctcagagcaactcaagagtccccaagatgggagagggtactgtgtaggaatattcatttaacagtatgcaatagtataaggccagacgtggtagctcacacctgtaatccagcactttgggaggctgaggcaggaggatcaccagaggtcaggagtttgagaccagcctgcccaacatggcaaaacccaatctctactaaaaatacaaaaaattagctgggcgtggtggcaggcacttgtaatcccagctacttgggaggctgaggcaggagaatgacttgaacctgggaggcagaggttgcagtgaactgagactgcgccactgcactcaagcctgggcgacaagggcgaaactctgtctcaaaaaaaaaaaaaaacagtaggcaatagtacagcctagggaaccatacaagattgtaggtgatcatggtaccaagagtaggcctgctcacaatgaaaaggccccttttgatatgagacagactcaacatcttggaagcattttatcaagcgccaatagaggctggatatatgactaaacaccgtggggtggagggggccgggagagtgggatttgccagggagtaaatgagctccattattgtgagggcagacagattgtgataattgggcatcagtatatcttagttacacatgccagaatgatggtttgcatgacagaagtacagtgggccttgtggaggttatttgtgatgcatcctggggcaaaagttcgggggtggaagagccatcaattttaaggaagaaatcatttagaaactgaaatttgggctgtgaaggtgctaagagaagaaagatgtgttccaagtattggagggagacctcttgggcctcaaagggcctctgtacagaggatgtttaacatggagtctggtgataagaatggggtagcagagctgggtgcagtgctgggcagtgttgaatgggacttgtattcagagcccaggcatcagtttacccttctaccacaggagggtgaggatgtacccggatgtgaaaggagtactctctcaccttacgtgatgcattatttcagacatttcttgagtagtaaaggcacagccaaaagggctttcctgtcatctcaggccttgcctaacagccagcatggtgtcttttcctacctaccaactcaaaatacagatttgtttccatggtttccacattatagcagaaaatttacttagtcttgtatcttcctctctcgcctgtatgcctggtaggatgttatttaaaatttgatttcttccctcctgtctgctttctttcctagtagaatgttatttataattaaacacttttataagctacagagttatttttgacttgacattttgaattatgccacttggttcagttctagtatctgttttgtttttttgtttttttcctaattgagtcaaggtctcactgcctaggctgcagtgcagtggcacaatctctgcttactgcaacctccgcctcccgggctcaagcagtcctcccacctcagtctcccaagtagctgggactacaggcgtgcaccaccacagtcagctaatttttttttttttttaaatggagtttcgctcttgttggccaggctggagtgcagtggtgcaatctcagctcattgcaacctccactcattgcaacctccgcctcctgggttcaagcgattctcctgcctcagcctcctgagtagctgggattacaggcatgcttcaccacgcccagctaattttgtattttcagtagagatggggtttctccacatttgtcaggctagtctcgaacttccgacttcaggtgatccgcccgccttggcctcccaaagtgctgggattacaggcgtgagccaccgcacccagcccacactcagctaagttttattttatttattttttttttttttagagatggaggctcgctttgtcgcccatgctggagtgctggagtgcagtggcacgatcttggctcactgcaacctttgcctctcgagttcaagcaattcacctgccttagcctctccagtagctgggactacaggcgcacgctgccgtgcctggctaatttctttcgtattttagtagggacggggtttcaccatgttgcccaggctggtctcgaactcctgagctcaggcagtcagcccgcctcagcctcccaaagtgctaggattacaggcatgagccaccgcgcctggccacactcagctaatttttaaggtgtttttgtagaggtgggttctcagattttcaattttgagaaatttcaacctaaaataatttaaatatactctcatttgagcttgatgctcataaaagtgaatattcggccggggtgtnnnnnnnnnnnnnnnnnnnnnnnnnnnnnnnnnnnnnnnnnnnnnnnnnnnnnnnnnnnnnnnnnnnnnnnnnnnnnnnnnnnnnnnnnnnnnnnnnnnnnnnnnnnnnnnnnnnnnnnnnnnnnnnnnnnnnnnnnnnnnnnnnnnnnnnnnnnnnnnnnnnnnnnnnnnnnnnnnnnnnnnnnnnnnnnnnnnnnnnnnnnnnnnnnnnnnnnnnnnnccactgaactccagtctgagcaacagtagtaagactccgtctcaacaaaaaaaaaaaaaaaaaaaaaaaaaaaaaaaggccaggcgcggtgggtcacgcctgcaatcccaacactttgggaggccgaggcggacggatcatgaggtcaggagatccagaccatcctggctaacacagtgaaaccccgtctctactaaaaatacaaaaaattagccgggtgtgatggcgggcacctgtagtcccagctacttgggaggccaaggcaggagaatggtgtgaacccgggagacggagcttgcagggagcagagatcgcgccactgcactctagcctgggcgacagagcaagactacatctcaaaaaaaaaaaaaaaaaagaaaaaagaaaaaatgtaaatactcctgtgttttactgttttagaycgtctgccatttcartggtctgccatttcaatgtactatggtaagtgtcactttttctaaaagtgggtggggggattaaccttgcactcttgtggttgtttttcccattacaggtagagttggctttgtgggacacagctgggcaggaagattatgatcgcctgaggcccctctcctacccagataccgatgttatactgatgtgtttttccatcgacagccctgatagtttaggtgagtggccctgcaccctgatatttgtcactgcctgtgtagctagttggcatctggtttctgggcatcaagtggctgaaaagcagacatgaacttcagagaagcaatcatcgtcagtggccggagtcctggagtttgggattgtagagcgtgggccttgggtccctttcagcctaggtctcccatgggtactgtatttaaaatgtatccacctaggcagggcacggtgcctgacacctataatccctgcgctttgggaggtccagacgggtggatcacctgagggtcaggagttcaagaccagcctggccaacatggtgaaaccccgtctttactaaaagtacaaaaaaattagccaggcatggtggtgcacgcctgtagtcccaggtacttgggaggctgaggcaggagaatcgtttgaacctggtaggtggagattgcagtgagccgagattatggcactgcattccagactgagcaacagagcaagactctatctcaaaaataataattattattattattactaaataatattaaatgttatttaaaaatctaactgccttgtaaactagatgaattccagatacaaagatgagtaaactaaggctggtgcggcggctgacacctgtaatcctagcactttgggaggccgaggctggcagatcacctgaggtcaggagtttgagaccagcctaggcaacatggtgaaccccttgtctctactaaaatacaaaaattagctgggtgtggtggcgtgcacttgtaatcccagctattccaggggctgaggcaggagaatcacttgagcctgggaagcagaagttgcagtgagccaagatcatgccactgtactgcagactccatctcccaaaaaaaaagatgagcaaactagatgagttccaaatgtaaagccatctcttttggggaaagactttcttttttttggttgccctgtcttagcctttttctgaagtgtcttagctgatagaagcttgaatgtgatcatttcattagcctaaacacagccacataattcagaagtcagtaagtcagtattcttttttttttttttttttttttttgagagggagtcttgctctgtctcccaggctggattgcagcagcttgatctcagctcactgcaagctctgcctcctgggttgatgccattctcctgcctcagccacccaagtagctgggactacaggtggccaccaccacgcccggctaattttttgtattttttagtagagatgggatttcaccacgttagccaggatgatcttgatctcctgacctcgtgatccgcctgcctcggcctcccaaagtgctgggattacaggcgtgagccactgcgcctggcccagaagtcagtattctttagaaaaagactgaagaatgctaacctgacattctgtgaaaccaggcttgaaaaaacttgctttaggtttgtgctgaagatgatgaggtatctattaataaacttgtgctgcagccctccctgtcatgacagggcagcaggtgggtcaaggatgttgtcgtcattaccacaaacagcctttgagggtctgcttgtggcctcgggttgcctggatagttagtgttagagtgattgtgttgttatggttgtccctaccttaatgatgataactggggttgctccaagatattgagccacttgtttaaggtcatgctggcccaaggagctgagctaagattgagtcctctgtgcagtatgtcccaggacagagaaagagcacgtattccatgccgttggttcacttagatcattttcagcagttatgattgattgattgatttagaggcggggtctcgctctgttgcccaggctggagttgagtggcacaatcttggctcactgcaacctccgccttccaggttcaagcaaatctcctgtctcagcctcccaagtagcttggactacaggcatacgcccccacgcctgggtgatttttgtatttttagtagagaccgggtttctccgtgttggccaggcttctctcaaacttctgacctctggtgatccactcaccttggcctcccaaagtgctgggattacaggtgtgagccaccacacccagcctagttttggttttcaaactaatatgacttccttttgtgaagctgctggaaggccctggaggctgggcagagctttaggccacagagaaaatttgagctagttgacactctcctatcagatacacacataaataacttcacctagatcctattggaatgagaaggactgtgtgcctttgccctcgttatctagtgtataattcttgagggaaaaaactgcctccagagcaaaacattttgtctcttcagtctcacttttttctttttgagacagggtctcgctttcttgcccagtcttgagtgcagttgcagattcagtttactgctgcctcgacctcctgggctcaaacaatcctcccatctcagtccccacccagtagttggtactacaggcacacactgctgcgcttggttaatttttatattttttaggccgggcatggtggctcacgcctgtaatcccagcacttcgggaggctgaggtaggcggatcacctgaggtcaggagttcgagaccagcctggccaacatggtgaaatcctgtcgctactaaaaatacaaaacttagccaagtatggtggcatgtacctgtaatcccagctactcaggaggctgaggcaggagaattgcttgaacctgggaggcagaggttgcagtgagccgagatcgcatcactgcactccagcctaggtgacagrgtgagactcttgtctcaaaaaaaaaaaaaaaaaaagtttgaaaatttattcaccaaaagtggcgacagtcaatttattcaaattctatgtacctcaaactccaggaagggggtagactattggtataatttcacatattcaggaaataactacagcacctactaacagaacatctattctaggccaggcactgtggctcacacctgtaatcccaccactttgggaggccaaggtgggtggatcctgaggtcaggagttcaagaccagcctgtccaacatggtgaatccctgtctctactaaaaatacaaaaaaatcatccgggcgtggtggcgagtgcctgtaatcccagctactcgggaggctgaggcaggagaattgcttgaacccgggaggcagaggttgtagtgagctgagattgcgccactgcgctccagcctgggcgacagagcaagagtccatctaaaaaaaaaaaaaaaaaacttctgttctagatgagggaagacagaataggctcccctcaatgcccccaaaaaagtaaatcagaaaataacaacagtaaacccagtaacagtaaatattacaaataacatttgtagaggtgggtcatggttgtatgctgttttgttttatttatttttatttttgtttttttgagacagacttttgctcttgtcacgcaggctggagtgcaatggtgcgatctcggctcactgcactccgcctcccgggttcaagcacttcttctgcctcagcctcccaagtagctgggattacaggcatgcaccaccatgcctgactaatttttgtattattagtagagacagggtttcaacatgttggccagactggtctcaaactcctgatccacctgcctcggcctcccaaagtgctgagattacaggcctgatgagccactgcgcctggtctatttatttttatttatttatttatttatttattttgagacggagtctcgctctgtcgcccaggctggagggcagtggcacgatcttggctcactgcaacctccacctccctggttcaaggaatttccctgcctcagcctccctagtagctgggattacaggtgtgcaccaccatgcccagttaatttttttgttttgttttgttgtttttgagacggagtttcgctcttgttgcccaggctggagtgcaatggcacgatctcggctcactgcaacttccgcctcccgggttcaagcgattctccagcctcagcctctcaagtagctgggattgcaggcatgtgccaccacgcccagctaattttgtatttttagtagagacggggtttctccatgttggttatgctggtctcccaactcccgacctgaggtgatccacccgccccggccttcacagtgctgggattataggcatgaaccactgcgcctggcaatctttttgtatttttaatagagatggggtttcaccatgttggccagactggtctcgaactcctgacctaacgcgatccacctgcctcagcctctcaaagttttgggattatagacgtgagccactgcgcccagcctatttatttgtttttaagagatgaagtctcactttgtcaccctggctggagtgcagtagtagcgtgatcatagctcactgctaccttgaatcctggactccagtgatcctcccacctcagcctctcaagtaggtgggaatgcaggcacatgtaccactgtaaactgctaagtttttgtatgtttttgtggagatggggtttttgacttttttgatacagagtctcactctgttgcccaggctggagtgagtgtagtattgcgatctcgactcatcacaacctccacctcctgggttcaagtgtttcttctgcctcagcctcccaagtagctgggactataggtgcacgccactgcgcccggctaattttagtaattttagtagagatgaggtttcgccatgttggccaggctggtctcgaactcctgacctctggtgatccacccacctaagcctcccaaagtgctgggattacaggcacgagccaccacgctgtctggagatggggtttagccatgttgcataggctgttcttgagctcctaggcccaagctgtctacttgccttagcctctcaaaagtgctggaattacaagtatgagtcaccacgcccagcctcttttggttattttcaaaagtcacttttttttatttgagacggagtcttgctctgtcgcccaggagtgcagtggcgcgatctcagctcatggcaagctctgcctcccgggttcacaccattctcctgcctcagcctcctgaatagctgggactacaggtgcccaccactacacccggctaattttttttgtatttttagtagagacggggtttcactgtgttagccaggatggtctcgatctcctgacctcatgatccgcccaccttggcctcccaaagtgctgggattacaggcatgagccaccgctcccggccaaaagtcactcttcagccatttgaaataccagtaaaccccatagggtagaagttatgctgagagttgatgaacaagttagaaaaagarcatgtggaccctgggtcagctgctgccctagaatggggaccccttctgtaagctatgtcagaatcatctaccagcagtgacagatgtcctgtaaagtgcctgcctttgtggggcaggaagtgccccccgtgaaactaccttgtgttgtggatcttttgctcctccagagcccttactcgggccccacctacagagatgctcagcaccactcttggctggactgagaaaaagctgttggttctctgtttaaaggaaagggattatatttcctttttatggttttgaaactagtgagtttcattaaatgtctagcatttttctgaagccacaaagaaagtgtctctgcaatttcactgaggttcttggaaagtcttcaagatagaattgtatgtatccccaaattctctacatttttctttcagaaaacatcccagaaaagtggaccccagaagtcaagcatttctgtcccaacgtgcccatcatcctggttgggaataagaaggatcttcggaatgatgagcacacaaggcgggagctagccaagatgaagcaggcatgatctggggcaggactgtcttgtagtattcttgaactagggccccaagtttggaggtttggggagcccagcaggaaccttcacaggccaggttgttttagaggctcagaagcccctctgtggccctctgaccctcattaattgggatcttcacagaagatccctaagatagttcaccagtcctgtgagatggaatgtttttttatgaggtagtgctatgcccataaggactgctggcctgagaatgaaccatttcattagtagctagtaatcagtggctctagatgtaggaactttcttttttttgatatggagtctcattctgtcacccaggctggagtgcagtggcgcaatctcagctcactgcaacctccgcctccggggttcaagcgattcttctgcctcagactcccgagtagctgggactacaggcaccctccaccatgaccggctaattttttttttttttaatagatggggtttcaccctgttggccaggctggtcttgaactccttacctcaagtgatctgcccacttttgcctcccaaagtgcagggattacaggtgtgagccactgtgcctggcctctgttagactctttatttttattttttgagacacagttttgcttttgtcacccaggctggaatgcagtgatgctatctyggctgcaacctcagcctccaaggtttaagtgattctcctgcctcagcctcccaagttgctgggattacaggcatgtgccaccacgcctggctaatttttgtatttttagtagagacgggttttctccatgttggtcaggctggtctcaaactcctgaccttaggtgatctgcccgccttggcctcccaaagtgctgggattacaggtgtgagccaccacgcccgggcctgttagactcttgattgccttccccagctattactttggtacatgtgaggccaaagataaattagtggcaactgaaagataaggaaatcttgaaggctgggagtccagatagaaagccctaatgccttccctctcctccactcccaatgcctttttaaaagtgatgatggatgtggcatcttggcctctcagaaaccagctggcctaatggcagggcttcctcactggaggagaagcattgagatcttcaacctaagttctcttactcaggtttctctgtctgaatgtcaagggtaggctttatttccttcagggcatttagtcctggattggtagcttgagtaattttgctcttgattgactccttaaccttccagggctcctctgacctcttccctctacttcccagtgaataccatgtttattagagattttatgtttggtagggggtagttaccatatgtcagtttaaaaatttcataagtttagcagtttgttgttttttttttttgttttkttttttttgagaaggagcctcactgtgtcgccaggctggagtgctgtggcacgatcttggctcaactgcaacctccgcctcccagatttaagcgattcccctgcctcagcctcctgagtagctggggttacaggcgcccactaccacacccaggtgattttttgtattttagtaaagaggggtttcaccatgttggccaggatggtcttgatctcctaaactcgtgatccgcccagctcagcctcccaaagtgctgggattacaggtgtgagccaccacacccagccaagtttaacagcttttgaaagtcttttttttttttaggctgggtacagtggctcatgcctgtatcccagcactttgggaggccgaggtgggcagatcacttggtcaggagttcgagaccagcctggccaaaatggtgaaaccccatctctactaaaaaattacttgggcgtggtggtgggcacctgtagtcccagctactcgggaggctgaggcgggagaatcccttgaacccaggaggtggaggttgcagtcagctgagatcatgccattgccctccagcctgggcgaccgacgagcaaaactgtctcaaaaaaagaaaaaaaaatcttttagatgaatttgaatactttttacttactatatgtatgccacactattagctaaaaggactatttttttttctttgctaggagccggtgaaacctgaagaaggcagagatatggcaaacaggattggcgcttttgggtacatggagtgttcagcaaagaccaaagatggagtgagagaggtttttgaaatggctacgagagctgctctgcaagctagacgtgggaagaaaaaatctgggtgccttgtcttgtgaaaccttgctgcaagcacagcccttatgcggttaattttgaagtgctgtttattaatcttagtgtatgattactggcctttttcatttatctataatttacctaagattacaaatcagaagtcatcttgctaccagtatttagaagccaactatgattattaacgatgtccaacccgtctggcccaccagggtccytttgacactgctctawcagccctcctctgcactcccacctgacacaccaggcgstaattcarggaatttcttaacttcttgcttctttctagaaagagaaacagttggtaacttttgtgaattaggctgtaaytactttataactaacatgtcctgcctattwtctgtcagctgcaaggtactctggtgagtcaccacttcagggctttactccgtaacagattttgttggcatagctctggggtgggcagttttttgaaaatgggctcaaccagaaaagcccaagttcatgcagctgtggcagagttacagttctgtggtttcatgttagttaccttatagttactgtgtaattagtgccacttaatgtatgttaccaaaaataaatatatctaccccagactagawgtagtattttttgtataattggatttcctaatactgtcatcctcaaagaaagtgtattggttttttaaaaaagaaagtgtatttggaaataaagtcagatggaaaattcattttttaaattcccgttttgtcactttttctgataaaagatggccatattaccccttttcggccccatgtatctcagtaccccatggagctgggctaaktaaataggaattggtttcacgcctgaggcaattagacactttggaagatggcataacctgtctcacctggacttaagcrtctggctctaattcacagtgctcttttctcctcactgtatccaggttccctcccaraggagccaccagttytcatgggtggcactcagtctctcttctctccagctgactaaactttttttctgtaccagttaatttttccaactactaatagaataaaggcagttttctaaacttcctgtatcctgttgtttgtgttgctctctccagggctgggggtaggaggatgcaaggacttcctggcctagctcaccctggagaggtttgttgagtgcaaaggactagcttgtgccccacctcccacccacccagcagctaatctggtccctcccaacaacatggaaatgattaccctgtaccgcattctggttcagatttgggggtagggtgaatgcagcctgaggaggccagggagggaggactccggcagcgtttccttggcctcggcgagctactgggctccacttaaggaggctggggcagagcttccaggactctgcccggttagaaaacccgcacgagggcggtgccgctttggagacagggaggagggagaccggaagcctagatccctctggctgtcccctgcactgccggtaacatggcacaggagaggagggctgtttgtgcacgggcagctcctgcagctgctgccgtcgcccaccagcctcctatgccaaaccccacatcctaactcaggaacctctgagaaaaaacggagccctcgagggccccagcccttggaagggtaacctggaccgctgccgcctggttgcctgggccagaccagacatgcctgctgctccttccggcttaggaggagcacgcgtcccgctcgggcgcactctccagccttttcctggctgaggaggggccgagccctccgggtagggcgggggccggatgaggcgggaccctcaggcccggaaaactgcctgtgccacgtgacccgccgccggccagttaaaaggaggcgcctgctggcctccccttatagtgcttgttcggggcgctccgctggcttcttggacaattgcgccatgtgtgctgctcggctagcggcggcggcggcggcccagtcggtgtatgccttctcggcgcgcccgctggccggcggggagcctgtgagcctgggctccctgcggggcaaggtactacttatcgagaatgtggcgtccctctgaggcaccacggtccgggactacacccagatgaacgagctgcagcggcgcctcggaccccggggcctggtggtgctcggcttcccgtgcaaccagtttgggcatcaggtgcgccgggcggagcggggcggggcgggggcggacgtgcagtagtggctgggggcgccggcggtgtgctggtgggtgccgtcggctccatgcgcggagagtctggctactctctcgtttcctttctgttgctcgtagctgctgaaattcctctccgcccttgggattgcgcatggagggcaaaatcccggtgactcatagaaaatctcccttgtttgtggttagaacgtttctctcctcctcttgaccccgggttctagctgcccttctctcctgtaggagaacgccaagaacgaagagattctgaattccctcaagtacgtccggcctggtggtgggttcgagcccaacttcatgctcttcgagaagtgcgaggtgaacggtgcgggggcgcaccctctcttcgccttcctgcgggaggccctgccagctcccagcgacgacgccaccgcgcttatgaccgaccccaagctcatcacctggtctccggtgtgtcgcaacgatgttgcctggaactttgagaagttcctggtgggccctgacggtgtgcccctacgcaggtacagccgccgcttccagaccattgacatcgagcctgacatcgaagccctgctgtctcaagggcccagctgtgcctagggcgcccctcctaccccggctgcttggcagttgcagtgctgctgtctcgggggggttttcatctatgagggtgtttcctctaaacctacgagggaggaacacctgatcttacagaaaataccacctcgagatgggtgctggtcctgttgatcccagtctctgccagaccaaggcgagtttccccactaataaagtgccgggtgtcagcagaactgtgtgtatgtcctgtgtcattgtcatttgggaattctttttcttttctttttttttttttttttttgagacggagttttttgctctattgcccaggctggagtgcagtggcgcaatctaggctcactgcaagctccgcctcccgggttcacgccattctcctgcctcaacctcctgagtagctgggactacaggtgcctgccaccacgcccggctaattttttgtatttttagtagagacagggtttcaccgtgttagccaggatggtatcgatctcctgacctcgtgatccacccgcctcggcctcccaaagtgctgggattacaggtatgagccaccgcacccggcctggcgatactttttctaacctcattgtcatagtggtgggaacttaatcctccttcccttatcctagccaagtctgaactttctgtccttttgtctgcagcgtgtaggatccactctttcctttgtgggaagtctggctcctggcctgcatttctgccttcaccagaacatgcaaagggccatctcaagacccagttacaacaaagtccttacttcaaaaaagacacaaggcaatggttgactgcctaactcaaatgatagacttctgactacttgctgcacgctgaaatgactgtcacaaaataacatgagcccccactcacatttggagtcatggcctctccaattgttaggtccacacaatcccattttacacggaagctcatgcaatgttataaattctgttatctggctagatctttccatgttgctaccaagtgcctgtatctgctgtgacgatgatcttacaagtttctgcctcatatattcaagagtgagaaaactataatttaactggcccttctgactatgccctgcccaacacttaacgtgcaattaattgcacattcaggcccaggataagggcttgtctttgaagccagctgctgcttctcgggcaccactcaggtccagcctctccatctgttgaccctgctgccaataatctttaattttttttttttttttttttttttttgagacagtcttgctctgttgcgcaggctggagtgcagtggtgtaatctcggctcactgcaagctccgcctcccgggttcacgccattctgcctcagcctcccgagtagctgggactacaggcgcccgccaccacgcccggctaatttttttctattttttagtagacggggtttcaccgtgttagccaggatggtctcgatctcctgacctcgtgatccacccgccttggcctcccaaagtgctgggattacaggcttgagcagcaataatctttcaagacagatttggagccatttcctaacgcagtgcaggggactgcagggcctgggtgtagcttccgcttgtgcaaacaggtacccagagacatggtagtgctgttcacccgctgactgtggaccagaggttctggagtcccagcatttgtgttcaaattcgtgactcaaggtccttcttagtctgaaccaactctcaaggacttttcctcttgccctaagcagtgatctttgctgctgctttccccctttgtctgcccttaggtcactaaggattgtagggccttctggacctgctctggctccatcctgagaactcctgaacaggcccacctccctctggttctctctgccccagcctttgagtcccccttggggtgacccaggtagaactatcagcttcccctttggacctcactctacttgtgttgttccttggaactctcaggagtctcactcttgcccaggctggggtgcagtggcatgatctcagctcactgcagcctccacctcccaagtttaagcgattctcctgcctcagcctccccagtggctgggattacaggtgcctaccaccatgcctggctactttttaatatttttagtagagatgggatttcgccatgttggccaggctggtctcaaactcctgacctcaggtgatctgcccgcctaggcctcccaaagtgctgggattacaggcgtgagccactgcgccctgccagaatggaatgttattatattaatagatcaatatttgtgatgaatatcannnnnnnnnnnnnnnnnnnnatgccgggccctgtgggccctgagatggctagcccctgtacccctcctagactgttaacttctggggaagaagattagtcattcataaatgcaatcaaggctcctgagtggccattcatggacgctcacgcctataatcccagcattttataatcccaagtaatccgaggagggcagatcacttgaggcaaggagttggagaccagcctgaccgacatggtgaaacccccgtctctactaaaaatacaaaaattagccaggtgtggtgtcgggcgcctgtaatcccaactactctggaggctgaggcagggagaattgcctgaacctgggaggcggaggttgcagtgagccgagattgcgctattacactttagcctgggcaacagagcgagacactttctcaaaaaaaaaaaaaaaaaaaaatccactcaaatggtaccaaggctttttgacatttgtagacttcaaatctgactcctggaatggagaatagcaacctgtaaatctgggtggacccagattgcctgtgacccctaatgtcctacatgtctcttccccaaaagcactttgctccctcattcattcataatccagtcctgtgccgtgtgctctgccaggtgcctgaagaagtcagaaggacagtatataattatcaaaaaagcatgttttgtgctttgagaataggaaaaaaagacaagaaaaaaattgtgcaccttacactagttaaaaaaaaagaataggccgggtgcggtggctcacgcctgtaatcccagcactttgggaggccgaggtgggcggatcacgaggtcaggagatcgagaccatcctggctaacaaggtgaaaccccgtctctactaaaaaaatacaaaaaattagccgggcgtggtggcgggcacctgtagtcccagctactcgggaggctgaggcaggagaatggcgtgaacccgggaagcggagcttgcagtgagccgagattgcgccactgcagtccgcagtccgacctgggcgacagagcgagactccgtctcaaaaaaaaaaaaaaaaaaaaagaataaagaagaggaccaggcccagtagggaggctcatgcatgcctcctggaaaaagtgacagtgaggctgggtgcggtggctcacacctgtgatcccagtactttgggaggccaaggtgggcagatggcttgatggcttgaggtcaggagtttgagatgagcctgcccaacacggcgaaaccacgtctctattaaaaatatgataattagctgggcgtagtggcgggcacctgtaatcccagctactcaagagtctgaagcaggagaatcacttgaacccaggaggtggaggttgcagtgagccgagatggtatcactgcactccagcctgggcaacagagcaagactccatctcaaaaagaaaaagtggctgggcgcggtggctcacacctgtaatcccagcactttgggaggccaaggtgggcggatgacaaggtcaggagatcgagaccatcctggctaacacggtgaaaccctatctccactaaaaatacaaaaaattagctgggcgtggtggcgagcacctgtagtcccagctactcgggaggctgaggcaggagaatggcgtgaacctggggggcggagcttgcagtgagccgagattgcaccactgcactctagcctgggtgacagagcgagactccctctcagagaaaaaaaaaaaattgagactgaaaagaagtcaagaagcagttggttaaagaataagctgatggcgggtgagcaggcagggagtatagtgtgtgagatcctgagatgggaaggtggcattcttgactaagtcagcaacaggaggagcaggttttgggggtaggtggatgtgttcagattcagctatactgcattagacatccagacagaggtatctggggcaggca

SEQ ID NO: 97161 - DNA, 20157 bp, Homo sapiens
ggaggcgggtcccagtcgccaggtgcgggactgctgcacctgtgactgggcgaggcttccttccctccgtaatcgcgaccacagcctagggacggaagggggttctgagcaacctgatagaagtgccaattatgagaagccctccgagcttggtcagagggttgaagatcagaaggacttccctaccaccgtggagcatcagtgggggtgtaagtgatcccagcccttctatttgcttcctctccagcatttcccccgtttcccgaggggcatccagccgtgttgcctggggaggacccacccccctattcacccttaactagcccggacagtgggagtgcccctatgatcacctgccgagtctgccaatctctcatcaacgtggaaggcaagatgcatcagcatgtagtcaaatgtggtgtctgcaatgaagccaccgtgagttacacatatctatgaaatgggccctgtttcctggatcctctttctgatgtcttggttctagaccctgaccttccggctattagccaagtgcttttgatgatacccaggtttcagttccaggtgtctcacacagccatttccccagaagccactcaccaaagctaatgttcactttctctcacttttacacctagcctagttcctatttgcaaatctcatgatatagtctttcttttatttctccttcctggttagcaccttatttttctgatctcataaagtgtttttggagggaagtggaggggattgggattagaggtttgcttgctgatgaccctattattctctagccaatcaagaatgcacccccagggaaaaaatatgttcgatgcccctgtaactgtctccttatctgcaaagtgacatcccaacggattgcatgccctcggccctactggtaagaggcataaggtggggaagggcctaagtggggaactggaaagtcaaaaaaggatgagcgtatacagagaatgtaaaggtgagagagcctagtgtttatttaggagaaaaggctttgaagcatgtgcctcaggaatgttatagctgtctttctcgtttctcaataaaaatattgagatgaaatgatgtcgtttcggagaatagagagccttggggactgggtgtgttatcctgaggtcggaggggaattggggacctgaagtttaaacagtgctctttctttctcaaggattcttgagggtatacagttgggggacagagtatcttaagtacagagaagtcgagtgacttaatagacagggagtgggggatgtggaacagggactgtgaagatttttaggattaaaaatttttcaaacacaagtttgaaaatacaagtctttttcttttgtatagcaaaagaatcatcaacctggggcctgtgcatcccggacctctgagtccagaaccccaacccatgggtgtcagggttatctgtggacattgcaagaatacttttctggtgaggaaggggtattgggaaggggaggggaaaggagactaagagtcatttcgagtatatttcttagagtaatggtaatgacccctgaaaggtctgtcctatgggaacatgttctgcatccccaccccaaggttctcattgagggagaccctgcttgtgctattatttttgttttctttctccatagtggacagagttcacagaccgcactttggcacgttgtcctcactgcaggaaagtgtaagtgattagggattgagctggtaattgatgtatggagtaaaaactacaaggccatagaaagcatccatttctatttgcctccccacaggtcatctattgggcgcagatacccacgtaagagatgtatctgctgcttcttgcttggcttgcttttggcagtcactgccactggccttgccgtgagtacccttgccccaacctctttcattctgcagcctcatctccataggctaagatttgggaaactgctaccctaaaaaaaagtggaagaaacttgggggactagtttgttttgttttaagatatggatgagctaaagtgcaaagtggctgatcaaacagactttattactactacaagagtgaaaaacagccttcctttctctgtaggatgaggataggacagtgaaattcttaatttaagagttgctatttttcaaacctggctcagttgtcagatattaagaaaaactgagatacagtgtgggatgggatgagtatgttacgcctaagggaaggaagctgatcagctctgcctttaagaaggtccctgagggtggctacatgtggataaggaacaaggactgaagcgtgagttattactgttcttagaactaataggaggtagtggagaccaacattaaccccatctttcttttcttctccctccttatcttcatcagtttggcacatggaagcatgcacggcgatatggaggcatctatgcagcctgggcatttgtcatcctgttggctgtgctgtgtttgggccgggctctttattgggcctgtatgaaggtcagccaccctgtccagaacttctcctgagcctgatgacccacagactgtgcctggcccctccctggtggggacagtgacactacgaagggagctggggtagttaaaggctcccggggcttctagaaggaagccaagcagctgccttccttttccctggggagaggtaggaaggaaccaggccctcacttaggtttggaggggcagataagagcactgctgaccatctgctttcctccaagggttgctgtgtctagggtgaagtaggcaaaacgttgcccttaaaactgggccctgaagacggttccagccttgtccttcctgtgtgctccctgagagccattcctgtcccttacacattccagggcagggtgggggtgggtagccctgggggttcccctccctcttgtgcaccattaggactttgctgctgctattgcacttcaccagaggttggctctggcctcagtaccctcagtctcctctccccacattgtgtcctgtgggggtggggtcagccgctgctctgtacagaaccacaggaactgatgtgtatataactatttaatgtgggatatgttcccctattcctgtatttcccttaattcctcctcccgaccttttttacccccccagttgcagtatttaactgggctgggtagggttgctcagtctttgggggaggttagggacttatcctgtgcttgtaaataaataaggtcatgactctacgctttttcagttgttaacttgtgtgcatgaaaatatgaggaagagaatgtgtagccccacgaaggggtaagacacgaagacagcaaggctgaaactatggctctttattttcatgtggataattcaaacaaagtcattagtagtctttgttcaatttttttttaaaaaacaaaaaaccctcaaataaaaaatcttgggcttaaaagaactctatcacaggagcctggttggaggattcctagttttatacatgagaaatagaatgcagatttctctgaagagtgtttaaagaaggaatggtagttgagggggcttatttcccaggctcaaagtgatttaggggtggtgtcacagtgctaggtatagggtgataggacagtgatcactgccgagggccttggaacggatcttgctgtcacacaatgcaggtaacagagagtgggacaacaaaaagtaatcaaggcgccaaccaacattcttggatcgagcattcatcatataagtccaaaaggtgtaggcatagggtgtgttggggtagaggtgcctaaagctgtcagccagtggcacagcctgcagtaattccccgaagccttggcgctcttgtggcgtgaagccagcattctttttgttccccttggggttgcgaaggtcaatttcttcatgtgccacattgaggtctccacacagcacaaggggctttcgggaagccaggcccttcaggaacttgcgaaaggcttcatcccagcgctgccggtactccagtcgtaccagacctcggcctgcattaggtacatatgctgttaccagcacaaacgagtcaaattcagccacaatcacccggccttcctgatcatgctcctcatcgcctatagaaatgaaacagaattagcataaaaaactataagaaaagggaaagcaatcaagaggtggggcagagatagagaattagcaattggttttgaagagttcaggcattaggcatcaatagggtctcacctatgccgtaagaaactttgagtgggcactggcgggaaagcaggcccacgccactgtacccttccttgtccgaaggagctgaccagtattgatgagagagtccaggcagctcctgaagttcagctggtagtttgttctctgaacatttggtctcttgaaggcacagtatatctggggcttcttcctttacccactgtaagtgaaaagaaaggtggaaaacgtattatcaattcagcagaacatttattgaataatctatatgctaagtcatagatacgcacgggttaaacagtctcttggcctaaggagttcgagtcaagcagcacaatattcaaacaattctaagctagataaatgaaaacaaatatagagaggtaagaaagtcttacatgctatgccaaggagatgtgttttttctataggcagtggatagcaagctaagatttttaagctatggttaatggaatggaggacatgcttcatatggaatgcaatgcaggaagataaaatggaggaagtatagtgaagaggtttttgcaacattctgggaagaggagagaacactaaaaaagaaaatggcaatggaagtgaaggaacagacatttaggaaatacaactggcaagactggggaagccccacagaaaactacgggcaggagaaaaataaaacagcctgaaggctaaacggagaaaaggggtgactaaaccctaagaccattcaatactaaaaaatgtctctttccctcaaattccactcacatctaatcctttcttcttaatccaggctcgaagcccatccacattccaagagcagatcttgagtgtggcaggtttgccactgggtgaggttttctgatctggggggtcctcatacagggctgggccctctcctgctgcctctttgtcatttttctttgcggccgtcttactcttcttggcctctggctctataaaatgagtaatatatactgacaaaaagctggtggtttccaactgcgatccggcgttaactatagacccaacgaaagcctacggttcctgcgacttcttcacaaacccctgcaaaaatgagtcggcccgtacttaccgtacatcaagggaatgacaaacacccccgccgcagcttctaggaagaagggctgatttcattcccttacctgtcctgagctcatccccgtcttccgccaccgctccctttttcccacgcttcggcattcccgttacgaacgcccttgggcagctgtaccgcgtcacccaccgaagcaatatttttaccgcgttgcctacagacgcaaagaaatcatgaaaccagctaaggctggggagaagactcctcccaagagcgtccccgcaccaggtcccgcctttcaaaccacgttatctctaaatcctttccccgcctccgtgcatcataggcccttcagcccctcacccacgaaactagatcatttcatagtgccttgtaccctactcgcgagatctgccctccagccaattgaggatcttaattaagggtcctgactcaagcttgccgttcagactgccagcgaagcccctcttatgagcaaaagagcaaccccgtatctgcaccggcccgatggcagcctagctcctcctaacccgagcacaaagaagggtgcacgctgagcccccacgtgggtagcggacctggtcacgtgatcagaggcgcgcttgtcgtggccgaagaatgcgcgtgattggtctgtctgacaccacgtgacggagacgcttagcctcgcctccctcctctaattctctaggacacttaggtccccaaccctccctcgggctgtttatcgttgtgccagatgcacagcacattgtgtgacactgacttaagattctaactmtrtgcaagagggaaaaaaacagtggagaaggctgggctggaccacgggaaagagataggaaaacggatacgaatgtaaggcacagagttggctcggcgtccctggcagttaggaagacaggtccctggaggggccttggcgkgtctccgctcgckggagttccgcggtgtctttcycagtgctatctgcaggctggccagcttcctctgcgctccggaaagctgcggcccagcgcggactagtgaggacctccacagctcctgacattgccaggagtcctgtcggcgttttctcccagcctccgccatgccggcggtgctgggttttgaaggcagcgccaataagattggcgtgggcgtggtgcgggatggcaaggtgctggcgaacccgcggcggacttacgtcacgcctcctggcacaggttggtgagtaggggacttaagagttttccgcgcacttccccgcacagaatcagccttccatcttcctaaatactagtgaggtgcagctttcgatccgagtctcattgaaattatgtgacattattaacgtcacaaggctgatgactagaagagttacaggcacttggacgtggatctgatgagttcatttaccttttactgagcgcattttatgtgctaagtattcagaaatagatgttatactgctgtggagtcagacatataaatagatgtttatactacagcatgataaacagtataatagagatggactcgaaatattctgtttaaaaaacgcttagcaggagtatagattccagttgccctgaatatacactccctttttaaaaaaaaattattttttgaaatattctaggatgagtagagagatgagagtggaaagactcccggcttacatgtcagacagaactggctggctttgctatattcatattaaatatttttgttttggacatttggtctttattttttattttattttatttttttgagacagagtcttgctctgtcgcccaggctggaatgcagtggcacgatctcggctcactgcaatctctgccttccaggttcaagcgattcttctaccccagcctcccaagtagctaggactataggtgtgcgccaccacatccagctaaattttgtatttttagtagagtcggggtttccaccaggccaagctggtctcgaactcctgacctcagatgatccgcccaccccagcctcccaaagtgtggaaattacaggcatgagccaccgctcgggcctggtctttgtttttaaaatgggaataatacctgtatcattaggtcttgaagattagatgaaagtaccaaacacggctgggcgtggtggctcacgcctgtaatcccagcactttgggaggccaaggcaggcagatcacctgaggtcggggttcgagaccagcctgaccaacatggagaaaccatgtttccactaaaaaatacaaaaaattaactgggcgtggtggcgcatgcctgtaaacccagctacttgggaggctgaggcaggagaattgcgtgaacccgggagacagaggttgcagtgagccgagatggtgccattgcactccagcctgggcatcaagagtgaaactctgtctcaaaaaaaaaaaaagtacaaaacacattacaacttttaattgatattttaaataagctattatatcttgctactctcccctcaaacacttgcatacataggagagggcagctgacttgcatgtatctgaaaagcctccctgaacaggtgatgttgtgacagatactcactagaaatatatatgtatgtttagcattcactcctctgggcacttgggcactgggaatacaaagataaataaaatactcaatgctttgagatattcatgattaagctgagcaaaccacagaaaattataatgctgtaattgttakgttaaataaatgacatcatcatgcatagagttctgtagggtcacagagaaagaagatcaccaaaggccaggcacggtggctcaggcctgtaatcccagcactttgggaggccgaggcagacggatcacgaggtcaggagttcgagaccagcctggccaatatggtgaaaccccgtctytactaaaaatacaaaagttagctgagcgtggtggtgtcgcctgtagtcccagctactcaggaggctgaggcagaagaatctcttgaactcaggaggtggaggttgcagtgagccgagatcgtgccactgcactccagcctgggtgacagagctgagactgtctcaaaagaaaaaaaaaaaaaaaagatcacgaaagggtatgaggtagatacyacttgcattgagacctgaaggctgagtagggtaagaagaagagcatttctgaaagttgaatagcctatatagaagccggaaagagtagatstgaaaatgtggaagataggatgcttggggaaagtgaaaggactcttactacatcactaaaactcctgttgctttctttaacttcctacctacctttgctacagaaaatccctgtgatctctgacctatgttcattttctaggattccttccaggtgatacagccaggcatcaccgagctgttatcctagacctgctgcaggaggcactaacagagtctggattaacctcccaggatatcgactgcattgcatacaccaagggtatggctgggagagtggtcaacgatggaggaatatacctgcaacctggctaggtcaaaatagccaacaccttacctctgccaccatcactacccctaccccacctcacatcccttatgtcccccactattgtttttttccaatctcyaggattataacttccatttctatctccctaggccctggcatgggtgccccactggtttctgtggctgttgtggcccgtactgtggcccarctgtggaataagccattggtgggtgtgaaccactgtataggccacattgagatgggccgcctcatcactggagccaccagcccaaccgtgttgtatgtgagtggaggaaatacgcaggtatttagagggctctacccactccatctcaatttctgaggcactgaaccagtattttctktgttctatctgagtcatgggaatgtcagraacaaagatggacttatctgaacctaaaatactgtagaccagaaaacccccaacagagtttgtaacattgcaaattttggcagcatgatcagaacattagatggcttatcattatcagactttatatctgattataaagattaggaatttctacttcaggaaaggaatgaatgggattgaaaaggattgaaatcttcaaaataatgaatatctgaaagctcttgcattattttgaagcttattttttctataaatcttagcaattgaaactaacagttgctgggtatggcaactcatgcctgtaattccagcactttgggaggtcgaggcrggtggatcatctgaggtcaggagtttgagcccagcctggccaacrtggcaaaaccccatctgtactaaaaataacaaaaattaatttgatgtggtggcaggtgcctgtaatcctagcaactccggaggctgggcaggagaatcacttgaacccaggaggcggaagttgcggtgaaccgagatcgcaccattgcattccagcctgggcaacaagagcaaaactccgtctcaaacaaacaaacaaacaaaaaacaaaaaaaaacaactaaaggacactacctgatttattattttggggcaagtacatgttttgtttttatattactgggaatgattatgtagactttgttattctaagagtttagaaatataaataactttaaaaaatactttgtaaattatagaaggtattttattttatcttatttatttatttatttatttgagatggagtttcgctcttattgtccaggttggagtgcaatgatgcaaccttggctcattgcaacctctgcctcccrggtycaaactattcttctctactcccgagtagctgggattacaggcacccgccaccatacctggctaattttttgtgtttttagtagagacgggrtttcaccctgttggtcaggctggtcttgaactcctgacctcaggtgatccacctgcctcggcctccctaagtgctgggattacaggcgtgagccaccatgcccggccagaaggtattttaaatttataggtgaagctaaagttgtttgggttaccttatatgacctttttaaggttgggattggattcttttccaacagaacacttgattatcattagaaatagttcagcattgtccccagctcatgaaagggttgtgtcgagaagatgaggcacatgtttcccatgaaaatgatgcagaaacttcagcaggtagagggcaagtagttggttgaggcctgaaggatgacatacaaggtcagagacttgggttgtggaaagtataatggaggctacaagagttgatgaaaggagcagtgacggttttgtcttcctcttctcttttaatgtttgcttaggtgtaagaaacagggagggtgattaggtggagaggagtggakagcagaagcagaaaggcaggatttttccttcgcctttgttactgtctttttgacagcagattaagatctgtatcagaaagggaagaaatccctaacagcactgggaagggaaagggacttcttaaggttcgtaggaagccctcggtgttataagtctgcagaatatgtgtcagtaagggacagatattctctgtgctaaaagttggtcacatatgaagaacggccttaatacaaaaaagtggtggtgggtgcctgtaattccagctgcttgggaggctgaggcaggagaattgcttgaacctgggaggcagaggttgcagtgagctgagatcacgccattgcactccagcctaggcgacagaacaagactctgtctcagaaaaaaaaaaaaaagaaaagaaaaatggccttaagtgaattgccattgctgacttggctgggccattagtctgactccatatgagatttttgagttcttcagctctgcttcttggttctaaataccactgcccagctgcatacggtggttcacacctataatcccagcactttgagaggctgaggcaggtagattgcttgagaccaggagtttgagaccaggctgggcaacatagtgagacccccatctctacaaaaatataaaaataagccacacatggtagcccagctactcaggaagctgaggtgggaggatcctttgagcctaggaggtggaggctacagtgagctatgatcacaccactccactccagcctgggagacagagcgagaccctgtctcaaaaaaaaattaccactgccactgtgtcataatttagaaggattcatgttctctgcctccaagcagaaaagccrgttacctactatcaagactgcatttaagggatatattaggaacttctaagccggaaaaccaatgtatttgaaatgacartttatttctgcctgaacctacactgtctaggaatctgttcctggaatcctcagggtatacagatttcttctcaaatcagagctgtaaaaactacccattcaccatttgggaaacacctttcttccacttcttattggaagccctggtggtcatgttgatcctctgctatgtttttctcccaaagccaaataatcctctttacagacttggggtttcatggacwtcctcatcacccttaggtgattgcatactcggaacatcgttaccgtatctttggggaaaccatcgatattgcagtgggtaattgtctggatcgttttgctcgagtgctgaaggtaagccagtggggctgcagagaacataaaatgtgggtgaatttttgggaagccatggaggtggagggaggaaatagtaaatgagcttcttatgcttcctgcatatctgatttcatcctcttccattccctccttccttatttttttcttctgctagatttctaacgacccaagtccaggatacaacattgaacagatggcaaagcggtaaggggacataaggtggaagcaggctggctgctggggcttcagggatttccccatatacggtatatattaacaaaatttgggacgggctttggagggtgagaagccagctgactgtaggcttagtgcctcgtaygcttattcccacatagaggcaagaagctrgttgagctgccatacactgtaaaggggatggacgtctcattctcagggatcctgtctttcattgaggtgagtgtgagaggtgatgagacgggcactttcatgctttttaaatgaagcatatctgttttacttacgattatatttcgtatagctcagtatattcatgtagcacagtactggtccatatcatgtgctgggtaaattcatttagaaggtattcattgaatatctctgtgtgccasatgctgttctagatagtagagatgcagcatggagcaaaacaaaaatccctgtctacatggagcttagattctaaatggggggcgggggagataagaaagaggaaaataatgaagtgccagatgatgatgagtacaggtgaaaaattaagcaggakaagtaaggggtgagagatgtcaggacaagtattcaaaaagtaatgattgcatcttaaatgaaagctgctcattctatgccatgatgccagtgaagggaatgtggtacaggatgtgctggtaacttgaattgtggtgaaacatgatgaccctccgaatgcattaatttttgctctcgtgtaatcccaaaaccatgatttgttgattcttttgtttttccctttaattgtaggatgtagcccatcggatgctggccacaggcgagtgtactcctgaggatctgtgtttctccctgcaggtaatgcagtaaaaarctgggacagaaagttggggctgaaggttttatattgtasagcagaactaatctgggatgcccctctaatattttctccttatctgtccctgacaggaaactgtgtttgcaatgctggtagagatcacagagcgagccatggcacattgtggctcccaggaggccctcattgtgggaggagtggggtgtatgtattattgaaaagtgttcctctttcctattcttaacactatgcgtcttcctcctggtactctaaatcattaagcgtttggagtaggcttcccaatccttgcccctaatcccctatgtcattgttctaagtgagtgcacatgacgtgttctgctggaccatgaagagatggctaaaactaagctaatcctgttccctgcctctttgtaggtaatgtgaggctacaggagatgatggcaacaatgtgccaggaacgtggagcccggctttttgctacagatgagaggtaaagacactttccctttggtttcttttttacttctcctgttatagtgattttccacccttagatcccaattttcatctctcttgcatcccagattctgtattgacaatggagcgatgatagcccaggctggctgggagatgtttcgggctggacacaggaccccactcagtgattctggggttacacagaggtgagtgattcacctcttggtgagggtagattattgggacatagacaaaaacagcagggaagagtccaggaacatgagggcagagaagaatgaaggatgttaagggctygctctccaccatgtttcttctgtttttccacaggtatcggacagatgaagtagaggtgacctggagggactaataagatcaacagaatcagagtagatagttccttaatcggaacccaaaggaccccgtgcctcaatctctatcctgatgtcatgggagtcctagcaaagctatagactccaagcaaggcttggggtcctttatggaaccccaggatgactcagcaataaaatatttttggttttttggttttgtatgttggtgattggattgtgttgttcaggaccaatgtagatttggtgctggataaattcttgttggagcttgctgctgtggaaccaagaatgaggtatctttttttttttttttaaraaacggaatcttgctgtgtttcccaggctggtctcgaactgggctcaagcagtcttaccacctcagcctcctgagtaaggatgccattgtgcctggcaacaatagtagtatcataactattattatagcatcgggtcccgtgctaactgctttacattcattctctcatttaaattctttgaagtaggtgtgcaagacttctctcaaaatagcctggaggctcacacctgttatcccagtgctgtgggaggccaagtcaggaggatcccttgagcccaggagtttgagcccagcctgggcaaatagcaagacaccatctatttgaaaaatgtaaaaattatctgggcatggtggcgcacatctgtagtcccagctccaagggaggctgaggcgggaagatagcttgagcccaggagtttgaggttgcagtgagctgtgattgagccactgcattccagcctgagtgacagaacaaaaccttgtctcttaaaaacaaacaaacaaacagcctggagattggtctaacttgtaactctaaaactgcctctactccgtatactttctcctacatgcacatccatcggcaggcttgaggaatgcccgcagatgcacatccctccgtaccacaaacaacagaacgaatctcatacccttaatcttattgatgttgatatcaatcatcacaattagtcctaaactactgagtcatctcatcttttacacttaataaccatgtatctccactctgttttgtctccatctacctaccttttccaactctagaagctcttccactgtgccctctggaactgatggccagtcatttgtcaaattctctgtgtcctcaacctcttctctgaacgttcccttcacatttatgctcttcagacttggtttcttatgaggactctgcttctcctaccacctcagtagtggtggcattttcccttccacacccagtgtcccactgggcctggaggtggtgcacgtgtcctcatactgtttccagaccattatccctcatccctagtacccttctgctttgaaagaaactaccatacgaacaccacgtttgtcataaatcttatttcagtattcaggtagatcatactaacacccgcttcagccacttatttccttggtcatgttctggagctgcagatcctccacatctcagtttcagacgtcccactctcgactaccaccacctcctgttcttccagttcattttctttagtatgctaaatccaacagttcatcccttcaccaggacctacggtccattgatcatacttcctttctgcagattttatcccccacgtatttttatttccctccttcagctaaattcccataatccacctcatttcccttcccctcttttgcttttgtcatattcaactcatcacctactttagacccatgcagctgaaagggctagtaaaaaatagccatgctgactgatcttacttcaaacttacgaccatgacactaaaatgggtcctttatgccacccagaaatatgccatctctctagtcctttcacttgccctcttttctagtgactgtttcataccttctgacccctcaaatctcttaacatctccccctattctgactcttaccttagttcctatttcagtaagaaaatagaaacaatcagtatacatttacaagcttttgcccctgaaactaaccatcttccagtatctgtacccatgtactctgccttcctcctgttaccataaaccagtggttctcaaccagagctgattttgcttctcagaggacactggattgtcaccgtcgataggaggatattttactgattagaagtcagggctggttgcagtggctcacccctgtaatcccagcactgggaggccaaggcgggtggatcacttgaggccaggagttcaagaccagcctgaccagcaatggtgaaacccctctactaaaaatacaaaaaatcagctggcatgatgttgcatgcctgtaatcccaactacttgggcacgagaatcgcttgaacccaggaggcggaggttgcagtgagccaagattgtgccactgcatgccagcctgagtgacagagcaagactctttctcaaaaaaagggataattctccctcttttcctggagagtcagtatttccttctctcctgaatcctgccgtccacaaatatgccactgttttcctcattttacaaataatgcctgcttgtccccatttgcccttccagctgcttcccatttttctgttccactttacagcaaaacttagaaagacttgtcttcaatttctctccaccagttccctattaaatctccaccaaaactattcttatcacagtcactgatgacctgcacatagctaaatctaatggcgtattcttcatcctcagaagctatcagcagcatttgacactccctctttgaaaagtttccttacttggctttaggatgcattctctggtctgcctcctagcttactgactgccctttcttaatctcctttgctagtttctcctcatctccacagagtttagtcctcagactgctctctttacacatacacctgtagtgacttcatctagttgtatacattaaaatcattttgatgggggttactcccagttatagttccaacctggacttctatcccaaatacctagctgctcattggcacctccacttggatgcttaataggcgtctcaaatttaacatattcaaaattgcacttattctttccccaacttagtcctgtagtctttcttatttctgtcaacgacaactccattctagttgttcatgtcaaagtatctttgtcagttttctttcttctccaattaatcaaatcctcttggctctaccttcaaaatacatccagaattccatttctcctcacttccactgctgccactgtagatcaagccagaattatgtgtcttcaagattattgcagtagctgctccttctcctttccccattgccaacttagagtcaattctccacatagcagccagagtgaatagtgttagcgtggaagccagatcatgttactcttctgctcaaaaccttcagtgctttcttacatcaaaagaaaaaccagagtctttttatttatttttttttagtatttattgatcattcttgggtgtttctcggagagggggatttggcagggtcataggacaatagtggagggaaggtcagcagataaacatgtgaacaaaggtctctggttttcctaggcagagggccctgccgccttccgcagtgtttgtgcccctgggtacttgagattagggagtggtgatgactcttaaccagcatgctgccttcaagcatctgtttaacaaaacacatcttgcaccgcccttaatccatttaaccctgagtggacacagcacatgtttcagagagcacggggttgggggtaaggttatagattaacagcatcccaaggcagaagaatttttcttagtacagaacaaaatggagtctcccatgtctacttctttctacacagacacagcaacaatccgatttctctatcttttccccacatttcccacttttctatttgacaaaaccgccatcgtcatcatggcccgttctcaatgagctgttgggtacacctcccagaccgggtggcggccgggcagaggggctcctcacttcccagaaggggcggccaggcagaggcgccccccacctccctcccggacagggcggctggccagtctatttaaaggcctgtgagaccctctgtgatccactctgcccttccctgcctaccactttgatctgctactcaattccttgtttgcgctgctccagcaacacgggcttttctgttggcctttaaacaccacagttgtcctctgaggtgggaggagagtattgggtacttggtaaatgcagagttcattttctagtcctttctggtttatatgtcactatcttccctctcctattctccctggaacttggagaacttgggacttcctggggagccatggagtccctaccttcatcatcaccgagccagtacacgtccactgccctccggccttgcttggattggaacattgaggctgctggaataaggatgctgcccgagaaaagagaagaaaagaatgagacaaactcctttccagctgagcagttgctcctaattcagtataatacctctcctcccctatgagaattattgctatcctagagaaacgtcatgtggcttctctccgcattgactaaccgcatttcctttttattttccttggtgtctgcttctctaacccgctctacaactctgttattcctaaaaacaggacatgttttagaattggtctcctgcctgctaagtatccatccctatgacatccaaatatgctgggtgtactgggaaaagtgggggtataacacaaaataatgttatctttttgctaaggatgcccaaaatttaactgataagatgtgtaatattattagaattggggtagtgccagaaacccttctctagaattgggccatagcccttcctgaccacactccagcttaccctgctatgttgtatcttttgatccaaatttctcccacctgaatttagaagatacctttaaagttttcccccaccctgaaaatttcaggagaactaaagctcaagcaaaattcatttctctcgcatcctggtacccaattctattcagtcttaggtcttggtaactctagatgagttcatttgcctcccagactgtctttgagagccaatttctatacctcccacaccacatccttctcttaggcccacctcttttcactcaccttgagcttggtgttgagtagccgggcttaaccctcctggcatccttatgaggcctatgccatagttgtagtcaaagtcatcactttatggagaggagagaaaaagagatataggaggaagagatgaaggggtgggggtctctttcctggggacacaggcactgctgggcagctgttgggaacaagggcttcaccacgattatatttcctcttctttctagttcctgaccatttctatgtccatcttacccttctctatctcacattcgcactagaatgcctatgtagtactccatggcagatacaggccctttctcccaattttgcttatatcccaagaccagcacattggacttcagttggttcaaacatgagacctgaaaggagaagcaatgaggaaagaaggggatatggtatgttggatgagaggtgacaagaaggcttcctttttctccactaccccgcccagatttcaggaagctagtttccttctgtgtctgagcagataaccctgcagaggttcatggttcttgccatggcctttcccaaaaaagccaaaagtttgcaagaaccagtcatgtagtattaaagaataaagtggaccaagtgggaactgtggcaaactggagagcacctgccttgtcccatgggacaggagctactcagccccagctaactgtgtcatgtgggttggaggcccaggattagcagatgcctggatcttaaacgttggtagtttattttaaaaattgtaaatgctgtgcaatcaaaaaactcatttccaggcaacattccgtccataggccaccgttttcaatctctcatctacagacttcctgactggaagttcttaatgtgatcttacacattggtgaggctcactgagtaggacagcgccatttggtaggtgtctgcctgggctgaagagccccagttcacaactgtgcagagaaaggggtggtgcatcaatggtgaggtagaagaggaaacactgttcgtagttctgggcttcttctaggggccagcctcctgttgtaactcacttcctgactccctgcacacccgcctactcactcaccaggttttgtagatcatataacagcagaagggtaagcaacacagtaatcagtgttgcccgccatgtgaggaggaatgtgatgagcaggcagagca

SEQ ID NO: 97162 - DNA, 19270 bp, Homo sapiens
gggctcagggagggacctacctgaccccacccagcaacttccagggaaaggaggagaacatggacctgggcaggacttacctgggcctcctcaggcaggagggtgggtacagactcctgggtggcagctagaggcccagactccaggaaatctagagaggaaaactggtatcaggcagcctgagtgagtttccaccccactgcccttcttagtggtgtgccaggtgctgggatgcagagaggtgggattcttggttgtgggcttgggttggggagggcagtgcagggtagctgagggcccagctcaggggctgggtgaagcagagtaccctggaaggccaggggttgagctgcagtgggatgagatgggctgaggtttgtgcccctgtagccgtatgtgaaccatggggcaaggtggtcagcgggggtcagaggtattgtacaagggtccacataggaatggcagggtgtgagcagctagttcaggtgccctgcctgggaggtgaaaggggtcatacccctaacactacgaggtcctccctcagcagctcctaattatacctctgcctgctgtctgttccccagtgacaagcacatattgcctaacgcatctccttggggactgaacaccacatgccatctgtactgggaaaccccaacagcctgctccatgccatggggttcgtgggtacagggctgtggcagtcaggcttggtgtgtgaggggtagtgacagcactggctgcggtggaggggagacctgactgggtagaatgtgggggctgctggcagatggaaaccattccatttataacaaacctggcccagtggacttcagactgactgctcaggccaggttccctggcccacccaaccagaccttaggcgcgcccaccgtgcatgccctcacctgagtcctctgtaacctctgactcctctttcacctgcaggcccagtggtgattcctgcatagtcctaggaggtgtcttgggcccaggctctggagttggaggctcagtttcaggtaggggctggaaactggagggctccatcttctctgataggacctcctggccctgcacctggactgtgacctggggaggtgcccccaccatcagaagtcctaccagagagtaaggctggccgcaacctggggtttgtgggtgcccatcccactgtaggatcccaggggcctgccttgtaaatacctactgactaggtcctccaaggacctacctcccctaggccctgagcaaagaatgaagggaccacctgcagtccctcccctgctctgacatcgtggccttccagtaccttccccatattcccctagcctgcagctcctatgtccacgtgactgcaggtgatgcaggaatgggctggggagtctggccctggaatccctctgccctgggcagccttgcacagggtctctgttgcaggtggccacttctgtaccacaagggagaacgtgtgtctggcaaagcgtggtgctgcccagggtgaggccgagctggatgatgctccagtcctgaaccccactcgtggacactcactcacccatctccggggtccgcccggctcccggcgcagcccatctactagggcagcagcctcctcggggctgcctggccgctgcccctgcacacgggcctggatctcagggggcagtgcgcccaggaactgctccagcaccaacagctccagcatctgctccttggagcgtacctctggacgcagccactggcgacacagctctcggagctgggccagggcctcttggggccctgtggcctcctcatagcggaagcaccggaaacgcaggcgtgcagcttcagggcctgggtcccataaggcagcctcaccctcctcctcagagtcctctagcttcaccatgacaggcccctcatcttctgggggtgctcggtctggggagcccagcaccgcaggcctcatagagggtaccaggtcaggtatctgaggccagtgtctgcccctggtgaagaaataggatgaggctgttgcaaaaggagtacagtgaatgcttcactgcctagtctatgctgtaccgtttgatcctcagacctaccccatgtggaaggcagatgaggaaacaggcaaagaaaggccatctacaacccacagacttatgcagctggaagccctcccttagccacctgtatccctggtcttctctccgcttgggcctgtgcaaagtctctgacagtctccctgctccaaacacaggcttttttttcttttctttgagacatgctgtcagtcagttgcccaggctgaagtgcagtggcgagatcatgcgtcactgcagacttgacctcccgggctccagagatcggcctcccaagtagctgagacaacaggtgtgtgccacgacatccggctaatttcttaatttttctgtagggatgggatcttactatgttgcctaggctgttcttgaactcctgggctcaagcagatgatcctcttaccttgacctcccgaagtgctgggacttacaggtttgttccaccatgccagcccacaggctgttttttaggactagaagacacttctctcccctgtatccttcccttcttctacatgtgcaacctcattcctgcgctacagctctctctttaccaggtggatggcacctatacacctacagcctgggcatcagcatcactgctggcgtctccccctacccaacgccagcccttacttcaccttctattctctcatctacttcgatgtggctcctcatttgggccccaccatcattcccctccctgcttggaagcctcactccacctaatcctccatgtcaacctgtgcagtcacttgtatggctcagctcccaggcagcaccctctctccctactcagccccatcttctaagcccaacatcacactacgcaatgccccatctcagcttcctgatttagctggggttggaaggggatgggggagcttcgcaatgggtgggggggcggcaaaggctccaagactgccggaacaggagcctgcaaggaagtcccgagactctgattccgcccatcttcagatcactgtgccttcgagaacttgtttccccatttgcaagtggggctgacctccctcctcgcgctgttccttctgcagctgcggctttaggaaggaatctgcgtttatgaaggggatggcaccgcagaatcattcccccgtgggtggcatcgatttcgagggccgcctcatcctgggggccaagcctccactcttcaaggtgccaagtcaacctgaaaccctgggagagacttgggtcatagccaagatggcaggtacctacggagggtcccgaaatacacttcccagaagtccaggcggcaacttccgctccagggtgccaaggtaggtccagacgacgcctaggcaaccgggggcggggctcccaaagcctgtcgtcgtggcaacgagtagtgattgacaagcctctcgctctagccctgggcgctcccgcaaggactgcccggattcgttccccgcgcttccggtctcactggggagccggaatccccgagtctgcagccaccgcccccgtccacacgatagccctcccggttaagaggaccccgccctcacctctgcgctcagcgggccgctccgcgctcctgagcacgcgcagtcttcgacttccccctcccgctggactacgtctcccaggatgctccgcgcaccagctcgagcgcctccttgcccttcccccaccctcgtccccgtttctacaccctctcctcccttcccctagcggtggtcgcaatgatcaggtcatactcctggccgcttcttcccatgctccccgcctcgaatccgtgcgtcggcatgcgcaagcctctcaggtacaacagacggcagcaccgcctaccagatcgcgcatgccccccaccacgttttcctcacttctctacgggccttcctgagattagcaggatcctgcaccaatcacggccgtcattagaactccgtcggtgccccaccgcgtctccatggcaactccctacaggaaggggcctctgctacttcctagaccgcaaaatggagaaaggcttggcccgatgctttccggcagatgtagtcagcaggcccttcgtgtgtacgtgcgcgcgcggcgcgatgacgttcctctgtgatcatgggcgaggggcgggccctgaacgtctccatggtaacctggggacacgactcgacatcgcctgggtaacccggagacgcggcgggcgttgaaaatgcaatggggcatgtgggatgaagaggtggggaagggtactggggcagagagatgccgatcgatagaaacagcgaggagagacggagagagaccagagactcaagggcaaagagagacgaaggaccggcgggaggaagagagagagagacagagagacagactcacagactgggaggaccggagactcgacgcgaggagagacagtgaaaataagtgaacaaacatagagacacgggtccaagttataagagggctgagtggatcagagggtcagggccgggcaaacaggtgtcagaacagttagcaagagagaggcagatcagaaagggatgcagatgaaagagacacaaagaaggaaacgcagaatgggttcacagagacaagaaatgcagatatccagactcaagaggtagacaagaagggagagggacagaaacaagaagggagaaaagggacagaaattagagatacagtaagatggattgacagttttcgaagacctagagaaagatgacagcacgaagagagacagggagaatccgaggtaaaactgttaggaaaacttaggagtccagatgctgtccagttatatgctaccctgtacaggttgataggttgcaaatgctttctgtccagtgtatcgctttgtagctcactaagcagttttgtatccaactttgtgcttttatttcagtgtttttctttttctttctttcttttttttttttttttttttgacggagtctcgctgttgccagactggagtgcagtggcacgatctcggctcactgcaacctccgtctcccaggttcaagcgattctcctgcctcagcctcccgagtagctgggactgcaggctgctccaccacacccggctgatttttgtatttttagtagagatggggttttaccatgttggccagactggtcttgacctccagacctctggtgatccgcccacctcggcctcccaaattgctggaattacaggtgtgagccaccgcggccggccagtgtttattcttcctttcctgtcttcctagaatcatcttgctgcttccctcagtacggtaaataaatcttttgacacatgctcactgagagtcatgtttttaactgttttgaaattatatttggcagtctgaagggaacctgttctccgggctaggggacaaacagggaaaaagaaaatagtggccgggcgcggtggctcacgcctgtaatcctagcactttgggaggccgaggcgggcggatcacgaggtcaggagatcgagaccatcccggctaaaacggtgaaaccccgtctctactaaaaatacaaaaaattagccgggcgtagtggcgggcgcctgtagtcccagctacttgggaggctgaggcaggagaatggcgtgaacccgggaggcggagcttgcagtgagccgagatcccgccactgcactccagcctgggcgacagagcgagactccgtctcaaaaaaaaaaaaaaaaaaaaaaaaaaagaaaatagtgacacatacccaggaaaggaaggaggaagggagggtgatgtaagacaaagacattaggcggcgagaaagccagcctttggtcagaagcagcttctggcgcccctggctggactctgtgcggtgcggcctcgttgccaaactacattttccggcagtacccgggacgccgggcgcagagcggagagcgtcgcaaggggcgggcctgacgcagcctcctccctgcccggccgtcgccaggcaaccttcccccttcgcggccgagatggaccctgggctcggcgtcctccggaaaactgcactgtgaggcggggcgatggggaagggccgaagccccgccagcccagctaaagcagacggctcgcactgcgacccgaaggtgaggttgatcggccgcgctggggccccggcttcggggcaggagctgcagcccctcctcttggttcggtcggggaactgggatatgaggccactgtgtccgcagctggcacgcacccgagtgggccaatcggagccttcggcggccccacggctctctgggaaatgtagacccgctacacgggacggtacccgcctaagaccatactgcgcaggtgctgatctgagtctgggtccctcctgggtcgaggagttctttggcccagatctgcgtggaggcgtgttcgcccggccctaaggtcccttgcgggccttctcggcctcacagcgcgtgtccgctgttcgttccccttccctcctctgtcttggaaatgtagtctcgagggaggagcttggtcatccacccagacttcgtgaggcccccgggcttggggctgcctgttgagagtgggagggagagaatgtgtgaatgtgtggatgaattaatttgcaattatgggagcgcaggcgaaggtgtgaatgtgggagagagaaggatgggcccaagagtggttcagatttcggggctttccccgatttcaaagcttgagtttgagccttccccatgtccacccgcctttccctgtcactctagctgagggccctgtgtgctgtgcctccttgtttcaaggcaggtgcatggtccatggaggtactcatcataggtgtagtcattccacaaagaacggtcaggcggcatttgttccttttttccttccttcctccctccctccctccctccctccctccctcccttcttccctcccttccttcctccctctcttcctctcttccttcctccctctcttccttcctccctcccttcctcctttcctcccttcctcctttcctcccttccttcctttccttccttcgttcctgtcttttttccttctttccttccctccctccttccttccttccttcctttccttcccttcctttcttctatcttttttttttttttttttttgagatgggagtcttgctctgtcgcccaggctggagtgcagtggcgcaatctcggctcactgcaacctccgcctcccgggttcaaccaattctcctgcctcagccccaccgagtagctgggattacaggcacacgccaccatgcccaactgattattattattattattattatttattattatttttttgagatggagtcttgctcttgtcgcccaggctggagtgcaatggcaggatctggcctcactgcagcctctgcctccctggttcaagcgattctcctgcctcagcctcccaagtagctggaattacaggcgcacgccaccatgcccggataatttttgtattattattattactattttttttgagacgaagtcttgctcttgtcgcccaggctggagtgcagtggcagaatcttggctcgctgcagcctctgcctcgcctccctggttcaagcaattctcctgcctcagcctcccgagtagctgggattacaggcacccactaccatgcctggctaatttttgtatttttaatacagacatggtttcgccatgttggccaggctggtctggaactcctgacctcgtgatccgcctgcctccacctcccaaagtgctgggattacaggcgtgagccactgtgcctggcctgttcctgtttttcacaagcacagtttttaaaaaaaatttttactgttttgaccaggtgttacattcacatggttcaaagtgtaaaagagacaaggtgagacagacgcacaataaataaataaataacggtgggggacggccctgtctcataaggttgtgtttgaaaagaactgcagaaggtgaggggaaaaagccatgcagataacagggaagagtgcctgctctgggccaaaggaaccataggaacaaaagtccctttgtagctggcacagtggctcacgcctgtaatcccaacactttgggaggccgagacaggtggatcacttgaggtcaggagtttgagaccagcttggccaacattggtaaaaccctgtctctactgaaaatacaaaaatcagctgggcatggtggcacacaccagtagtcctagcacctgggaagctgaggcaggagaattgcttgaacctgggaggcagaggttgcagtgagccaagactgtgccattgcattccagcctgggcggcagagcgagactctgtctcaacaaacaaacaaaacaaaaaaagcccctttgctctgtctggaagatgtggtcaggagtgagcagagtagaggaggaggctttgagtcttacaaaggaggcagtgaggactgtggcttttacttgaaggcctgggagggctccaacagaggtcaggatctgacttagtttcactgaatcattcttgatctggtatggagaaccatcatccccttctatcattgggtactccacggtggtggtaccaattagggacggccctgcaggatgtacctgggtgtcctgccacctgccatctgtgtctgggtggagccccagtgccctgagagcagtgaggaggctatggcgctggtggaggacttcacccagatgttgaagactggtgagccacaggggtccaggggttggccagagggataggggaatctatgagggatcacagctcatgaccttgggccctgagtgtctccctccgtctgcctaggccctcaatatccctgtcttggggaggaggacctagaagctgtgacgcatttggagacttctgcagcctctgagccccccaaaggcatgagcttgaggttgatgtgacttctcctctcttggggtagaccaggcttcctttcycatccttctttccttccccgcaaggtcactaagtgcctgccatatgccaggccctattggtccagcagggaaagacacttggcattcatggagcctagtctggttggagaaatggaccatgagaccatcagtcacaatttaggtatcctttccctgaaggaggtgggggaagaggaggtgagcacagagactggcctggcagggagcagctttgtagttttcagtgtctaacatcttcactgtgagcttgggttccacacgtgtgtatgcgtttgtgcttgggagggggtgacaactacaagatatgagagaagggtggttacagccaccattcatcctggcatttgttcctctgttcactcgattgctcatgcatgactgtgcagtgtcttctgcctacgcgattctctgtcaggaggtagaaactatatcacytttttttaaaagcacacctttaccaagttataattgacataccaaaaaagtatacaattcaggtatttttagtatattcacaaggttgtacagctatcaccaccatttaataccagaatgtaatcacaaccaaaagaaaccccatgcccattagtagtcacccatcagccccctcctctaagctcccggcaatcastaatctgctttgtgtctctatggatttgcttattctggacatttcattaaatggaatcatactttatgtggccttttatgtctggcttctctcagagcataatgttttcgaggttcacccatgttttaacatgtcagaacttcatttttatgagcaagtgatattccattgtatggatatgacccattttgtttattcatgtattctttgatcagcatttggcttgtatttacttttcggctattatgaataatgctgctatggatgttcatgtacatgtttttgtttggatgtttgtttttatttctcttggttgtatacctagaagtggaattgctgggtcatatgataacactatttgaccttttgaggaactgctaacacaccacttgttttaacagagggaaattaaggtaaaaaatgttaccgagatattgaaggagtaaaaaagtacaaaaagaaccctaagatgtcatgttggtaggaacttcagggaacaacatccattcctagagctttatgaacaaagggaagaggttgggtttagtctttgagagaagctcaaaggaggggaacgtggtggtgggggcactgggatccagatccctggggaggtgttgctgcgggctgacgctggggtctccacagagccttcatgaagctgattctacacatactggaatagctgcaagctggtttcagctactgctaaggggattgaaagccttgcttttgcaggactggtttttccttacacatgaatatgaggggcgggggagacatcttggatgcatatatctatagtcactgtggggtgttgtttttttttttctgtagtgctgggctctattttctttccttccttccttccttcctttccttccttccttccttccttccttccttccttccttccttccttcctcccttccttccctctttctttctttctttgatggagttttgctcttgttgctcaggctggaatgcaatggtacaatctcgcctcactgcaacctccacttcccgggtttaaccgattctcctgcctcagctcccaagtagctaggattacaggcatgtaccatcacacctggcttattttatatttttagtagagacagggtttctccatgttggtcaggctggtctcgaactcctgaacttgggtgatccgcctgcctttgcctcccaaagtgctaggattacaggcatgagccactgcacccagccatgggctctgttttctaagcatgtccaccagcatttgaggcatagtgtctcctgaacaatagctagcatatgcctgctctttaaggactagcccccagttctggttcccagtgtcccattgaacagatgcctagataatatgcactctaaatagggattttgggctgggtacgatggctcacgcctgtaatcctagcactttgggaggctgaggtaggtggatcacctgcggtcaggagttcaagaccagcctggcctatatggtgaaaccytgtctctactaaaaatacaaaaattagccaggcattgctgggcgcggtggcttgcgcctgtaatcccagcaatttgggaggctgaggcgggcgtatcacctgaggtcgggagttcgagaccagcctggccaacatggtgaaaccccatctctacttaaaatacaaaaattagccgggcgtggtggtacgcaccwataatcccagctactcgggaggctgaggcaggagaaatcacttgaacccgggaggcagaggttgcagtgagccgagattgccccattgcactccagcctgggggacaagagcgagacttcatctaaaaataaacaaaaattagccaggcatggtggcgggcgcctataattccagctactcggaaggctgaggggggagaagttagggttagggttaggctgaggggggtgatttggaaacccgatgttcagtgtgaggggcagggaaagcttataaagtcctagtgtgtttacagaagcttgctgcattcctgagagtgaagttagtttagtgtatggggcaaacatccactgggaagtgagccctgtgaccctaatatggcccgaatctgctccttaaagagagagacttggtaaattatctttaccaggtgttacccaagcctgtcagcactccccaccagtaagccttgkgtcctcattttacagcgcgagtcatggctggggccttagtggcaacaagtgctgagatcagcgggctcagtagcaggaacacaagcacccccttgcggtgtctggaggaagcggcgcggacagtctcccgctccaccgtgtcgggcctgaagaggccgctgaacgctcgcgattactgaggcatctggtaggatcgcaaggccrtcaacctacaggtgaagctcgaggcgctgtggcgctttgaagccggagagaagctcagtagaatcgggaaggcgctggggctgtccaactccaccttggccaccattcgtgacaacaaggaaaagatctgggcgagttcccaggaggccacactgcaggcggccaccaagttgacgcgtggccgcagcctggtgatggagaacatggagcagctgctgagcatgcggatggaggaccagagccagcgcaacatgcccctcagtgtggtgctcattcgggagaaagcccacagcccgttcgagaaccgcaagcaggagcagggcgagggcgcctagcccgagagcttcggggccggtcgagggtgattcgctggctttaaggcgcgccacagcttgagcagcatcggggccagcggcccaagaacgcagcgtgcaagaayccagcgttaatgcgcagggtgatcccggagggcggctacacactctggctggtgttcaccatgaataagctctggctggtgttcaccatgaataagcccaggttcctctgtaagcgcctgccgagaggacgttcattttcctgtggaagatgagtcggcccctgggtcaaagccgccggagacctcctgaccctattgctcggtggcaacgcagccggcgacttyaagctgaaggccctgctggkgtacccctcggagaacccgtgtttcctcaagggctccttcaagcccaacctgcccttggtgtggtgctcgcacaagaaagcctgggtacagcctgggtgacagagcgagactccgtctcaaaaaaaaaaaaaaaagcctgggtaaccatgagcctcttccaggagtggttcctgcacttctgctctacagtggagggcgctgcacccagtacgaccttccctacaaggggctgcccatcctggacagcactcccggccaccctgggtgttgagacagagtctggctctgtcgcgcaggctggagtgcggtggcgcgatctcggctcactgcaacctccgcctcccgggttcacgccattctcctgcctcagcctcccaggtagctgggactacaggcgcccgccaccacgcccggctaatttttttgtatttttagtagagacggggtttcaccgtgttagccagaatggtctcggtctcctgaccccatgatccacccgccttggcgtcccaaagtgctgggattacaggcgtgagccatggtgcctggccctttaattcccccaatatttttttatctgcattaatttattatttcaagtgaacttccatctcaaatacatggttctcagacgcttccatgaactctcargtgtgacttattacagcctggggctccttggagcacagtgtgccagtgacctagtggaaggccatgagaaagccaggttcactgttcactgtgcagcatctccctccatggtcttcctggagcctattcccactgcactgagcattccgtgtgtccagaggtagggttagcagggatagatggacttcctgcttattttctgttcacatttccactgaccttcaatcctgtagactgcaaagattgagccagctgagcccccaaagagactcagcagtgcagaatgtgggcctgagtgggaggactgcccagccgcmcaccttccagctctgttcttcccgggccctggatgcttcttgccacgctgtcctctgaaatgacgctctgccccagcagacctgtggtaggtgagctagtgaggaagcacacctgggctcttcccaccaggcatcccagccctggtgtggggtatccgcatggttgcaggcatcccctggccaggcctgggtgctcattctccctctctcttcttgtctcctcccctctccctgctttctctgccctgtcctcctcctttttgctgttttcccccggactcctgccatgcccccagactttctttttcccacggatatgggctcattccaaggaaagggtggcatttggacacaaggccctagatcccacgatggaggactggggggtacctgatgcccctcagaaagaggcctgcagggacagcacatgggaaagccccatggctttgtgatccatctggggatgtgatccatttgggtaaggacttgggtttcagggcatgagttggcttccttgcaggatgcaggtccttaggtgggtggcctctgtctccagctgtagggccctgccaggaagcctctatatgagcctacctccctcctgcaggaccagagaggggttgttatgaacagcccaggggattggttgcactaagcttgtcttgaagctttkgctggggagtccaggtgcccatgtctctcacctgctccccatacacatctctgcacacctggctgaggcattcccagacctaacctcagataatgtgcatgtgatgaacactcccaagtggctaggcctcttgcacctgagcaggtggattctgccccagcactggggctttctctgggctgtccatcatgggtatatctctggattccaggattgctagttagcacctcacatttgagggtctgtgctattcagtctagaatcagagttggatgagaaatcaactttgaacaccacctttggggtggctgcattggctcacrcctgtaatctcagcactttrggaggctgaggcrggaggatagcttgaggccaggagttcgagactaaccggagcaacatagtaaggccacatctgtacaaaaaaaagaaagaaaaaattacccrggtttggtggcatgcacttgtagtcccagttgtgggctgaggattatgcaggtgacaaggcaagagactgaaggcacaaactgtttcagtataataaagaaaatagaataataatagtcataattatatatagagatgatcatgaacaattatcaatcattataataaacattattaatcattagcttttattattactctttgttgtgttactaatataacctaggaataaacggtgtgctgaagggacattgtgagaagtgacctagaaggcaagaggtgagccttctgtcacactcacataagggctgcttgagggctccttggtcaagtggtaacgttagtgtctgggacagcaccgttacttagcagaccacaaaagggagtctcctttccttgggggagtgagggaacactctgctccaccagcttcttgtggaaggctggatattatctaggcctgcccgcagtcatctggaggccgaaacccctccctgtggtgctgtgcttcaatggtcacgctccttgtccactttcatgctcctctcacactcctggttcctctttgaagtttgtagtagatagtggtagaagaaatagtgaaagtcttaaagtctttgatcttataagtgcagagaagaaattgctgatgtatgctgccttctctctctgcttcagctacctaaaagagaagggccccctgtcctgtaatcacatgacttgcttcaccttgtcaatcacttagaagattcaccctccttaccctgcccccttgtcttgcatgcaataaatatcagtgagcccagctgttcggggccactactggtctccgcatcttgatggtggtgttcccccaggcccagctgttttctctttatctcttcgtcttgtgtctttattgattacaatctcttgtctctgcacatagggagaacaccccctaagccccgtagggttggaccctacatctagttactcaggaggctgaggcaggaaggttgaagttgagcccaggaggttgaggctgcagtgagccatgattgtggcactgcactgaagcctgggtgatagagtgagaccttgtctcaaacagcaacaaacaaataccatctttgggtatattaatcagatggggggagtcacactgacatcagttggcacccactggttagtgtgtgccaggcagggagactgggctgttttcagtaaactgatcacagcagtgagctgtgatcgtgccactgtactccagcctgggtgacagagtgagaccttatttccaaaaaaaagagaaggcattggagttcagcttgtggttttgacagagaaataataggataaattaatgaaacaaaaaagttaacagtagaggattaataaaactaagttttttttttctaatttcttttcctttcctttcctttcctttcctctttccctttccttccttcccttcccctccctccctccctcgctccctcccttcttcccttcctacctccctccctccctccctccctcttcccctcctcccctcccctttgtatgtaagtgtagatgagggtgtctgtgccttgtgtttgtatatgtgagtatccacatgagcatgcctatgtgtatgagtgtgtatgtgagtgtggtgagttgcttctgtccacacatttgtgtatatgagtgtgcatgcaagtgtgctgagtgtgaaagtgtgcctgtagacatgtttgcctgtgtgtgcgtgtgtcaaacacagctgtttctgtgtgtgagtgtgccttatctgtgtgtgtgcacgtgtgtgtgcacgtgtgcacgtgaatgtgttgagtgttcctgtgtgaacacaggtgtgttcctatgtgtgttatgtgagcatgtgcatatgtgtattctcgagggctgagggacccagccctaccttcagcacctgctaactgtccccacacccacagcgggcccagcacagggatcacattgtcggggtgacctggatcctacttgaagcctttgagctggactgtggctttatccctgaggccaggcttcatgtccagatggccatgccagaggttgacgtggcagagaaggagtgtgacacaggccagtggagcgagtggagccagcctgtgtgcttccaggctccccagagacaaggtgggtgcttctgtggctgctgcacttccagaatctgggctgggtgtcttctcccatgatgacctcactcctccaacctttcacactcctggaagcccctccctgaggcagccatgccccagttgacttgcttcctctgaaggtctgaggtctatagggaggacacaagctcctgccctaacacatctctgcacacctggtggtcttaggttagggttagggtcagggtcagggtcagggtcagggtcagggttagggtttagggtcagggtcagggtcagggtcagggttagggtagggttagggttagggttagggttagggtagggttagggttagggttagggttagggtattgtaaataatttcacattactaataataaattattatttgtattacactattacgtaatgtaaaggctattaagacatgtttgtcttcaaagaatggccttggtttctgtgggcagtgtcctcatggaaaggtaatgcgttcctgctaaatcatggacaaaacgggcttccaggagctacaggctgcagcagcagcttctcctctacgtccttcactgcctcatactgttgttgactttgaaagcttttttcagtctagttttatcaacagagctagtattttcatgaggttctactacataccaggttccagaaagctaaatgccttttgtttgttattattcactaaatagaaatcacaactctctcctcattactcacacaacaaaatttagctgagggagactgagtgactgtcccagggtcacacagctactaagagcagagtcatgtttagattcatgtgggaatactgaacacagacatgaaccagtggaaacatcctacgttccaaaagcctactcaagccatttgttcttattttaaggaaaatctttatgctaattttaaactccaaatacttatgaatggcagagatctacagatttgattctgatgtaagaaatgatggtcaccagctggttactgctaccaccccacaaccccgagcatactggacgaatgtctaagccttgtggttagtggggacaatgctggtggagtctgaagttgtcatgcagtgactcatgcaagcttaggcagatttggtgatatatgacacagagatgcaaagaaatgttgtagctgacacacaccggctggctctgggagatgcagaaggagcacgtcacccaaaatagagccagacagacatccttaaggaaagagccaaggggctgcatcttaaagaatgaagaaaggatttgtcatgagagatgggacaggaagttcttgagaggcagagggagattgtgagaatgttgggaagggaggagagattctcgcacatctgggaagctgacaatccatcagcatgtccagaaggaaaataaggaggaggagcagaaatagatgaggctggatatagaagcagggctgaagctgtgtcgattgtggtaaagagttgtgattctatccagaaggcaataggtagcattctaaacagagatcttttaaaacaagagtcagcaaatattttctgcaaggggctaaatgttaaatatttcaagttttccaagccatatggtctctctctcaatgactcagctcttccattataccatgaaagtagccagagacattatgtaacacatgtattggctgtgtcccattacaactttacttacaaacgcagactgtgtcagacatggtccatgcatggtagtttgccacactctgttttagaaagctcaggtttatgatgtgatggagaatgcctacaagagctcttgttttaaatggtagagtgaacatacactggaattctatcctgcttgacccaagctcttgatagcaaaaggtagaaaagatagatggtaaacagatagatagatgatagataaagaaaatacatagctgttccagaaaacagaaatggataacttcatgaaccaaaagcagagtaatatactttagaaggaagcaggccagaaaacccacagttgcaaagcaaatagaatttccagctgcctcttgtagccccttcctggaagtagtcacagcccagggtgtttgacttcttcctctgttttttgtttgtttgttgtttgcttttctctggggtttttgttgttgttgtttgctttttttaaaaaaaattccctttccctgcttttttgtcacagtagcctttgtcacttcaaacactgcaagtgttctttaaaaaaaattatatcaacctttcaattaaaatgcaacatgtctgaaacttggtatctggagaggtgagttggacaaaggagcccttgttactgcacgttttcattcttcaaat

SEQ ID NO: 97163 - DNA, 44009 bp, Homo sapiens
tgctgggattacaagtgtgagccaccacaactggccttgtttcattttttatagttaaaaacaacacttcatagagtgtttaaaaagtcagaaacataggactaatttattttcaaacaatgtattagtaacattttgatacgatatgctcaatatattttccttcaacttccacataccatctcaggtaagtgtctctaaagcaataaatccaatagttaatctaaagtatgatattaaaaatacaccatattctctgtgtttccagactttttttggacaagatttggggtatttttacaattacttattatttccttgaataggcagatatttaagcatttagaaattgggaaaaaaattcagtggaaaataaatgcgtggcttccagatcttatgccctacatagaaagtaatacttggaaagtgatacattagctcagagccatgatcaaccttttcctgtgtagtttctggctttggtgttatgtttatttatttattttttagaattagccattttttatatattttttatttttccataagttattggggtacaggtgatatttggttacatgagtaagttctttagtgattatttgtgagattttggtgcatccatcacctgagcagtatagaatgcacaatatttgtagtcttatccctcacccccactgccattcttccctccaagtctgcaaagtccattgtatcattcttatgcctttgcgtcctcatagcttagctcccacatatcagtgagaacatatgatgtttggttttccattcctgagttacttcacttagaataatagtctctaatctcatccaggtcatcacaaatgctgttaattcattcctttttatggctgagtagtattccatcatgtatatataccacagtttctttatccactcatttgttaatgggcttttgggttggttccacaattttgcaattgtgaattgtgctgctataaacatgtgtgtggaagtatcttttttgaataatgacttcttttcctctggatagatacccagtagtgggattgctggatcaaatggtagttctacttttagttctttaaggaatctccacactgttttccatagtggctgtactagtttacattcccaccagcagtgtagaagtgtttcctgatgactgcatccatgccaacatatactattttttgattttttgattatggccattcttgcaggagtcaggtggtatcacattgtggttttgatttgcatttccctgatcattagtgatgttgattattttttcatatgtttgtcggccacttgtatatcttcttttgagaattgtctgttcatgcccttagcccacttttcaatgggattgtttgtttttttcttcccgatttgtttgagttaaaccatccctgcatccctggtatgaaacccacttgatgatggtggattatctttttgatatgttgttggattcggtcagctagtattttgttaaggattttagcatctatgttcatcaaggatctcagtctgtagttttcttttttggttgtctcctttcctggttttggtattagggtgatgctggcttcatagaatgaattagggaggattccttctttctctgtcttgtggaatagcgtcaaaaggattggtaccaattcttctttgaatgtctggtagaattctgctgtgaatccgtctggtcctggactttttttttgttggtaatttttaaattaccgtttcaatcttgctgcttgtttttggtctgttcagggtatctaattcttcctgatttaagctaggagggttgtatttttccaggaatttatccatctcatctagattttctagtttatgtcactgaaggtgttcatagtagccttaaatgatcttttgcatttcagtggtgtcagttgtaacatctcctgtttcgtttcttagtgaggttatttggattttctctcttcttttcttggttaatcttgctaatggtctccgcatgcagctctgtctggagcttcaatccagttctgcctcccatctgccatgatcccgaaattgaagtagcataaacactttttattttaagaattgtgtatatattttaaattattaaatttatattataactaggtctcatgaaatgtaggatattgaccaagaaagaaaggaatcctgacatctggaaagtgatatctggaaatgtttggaagatttggagaaagctaaaccttaaaacttagaatcactcacttttactccatgtcttgaggaagtaatccctgcctctgactttcctgaaaacagttgaacatttctctttaagaaagtgctgcttttaatcagttatcagaatgcaaatttataagttctgagggataacatgcagatttatattatgaaaacaaaatgttacaaccagaattggctaattgatatatatatatatatatatatatatatatattttaaaatttcagtattgcatttacttattcactgtaataaatatttattagtggctatgatggcaaggtattgtgttagtttctgatccttagacttcaaggagaaaatgatatagcaaggcagtcagaaaataattcaataattttccagccaatataaaacggcatttgtgacaagtgcttccaaggactggcctgctgatccatgagcagctataataggaggtttgacttattgggggaaggtttccctgatgggttacagttaaagtcgtctcttgatattcataaatgatcagttccaagactcccaaggacaccaaaatctgtggatgctcaagtcccgtatataaaatggcataatatttgtatgtaagcaacgcacaccccctcgtatactttaaaacatctctagattacttaaaataccaatacaatgcctacacatcacttcattcctgtgtattcgatgtagtacttggtgtgcagcacattcaagttttgcttatggaactttgtgggattttgttttccaaatatttttgatctgtggttacttgaatctgtggatccagaattcagagataaagggtcaagtgtaatcaggttaaaaggcaggccgggcacaatggctcaggccggtaatcccagcactttgggaggccgaggtgggcagatcatgaggtcaggagatcgagaccatcctggctaacacggtgacaccccatctctactaaaagtacaaaaaattatcagggcttggtggcaggcgcctgtaatcccagctactcaggaggctgaggcaggagaatggtgtgaacctgggaggcggagcttgcagtgagcggagatcctgtctctgcactccagcctgggtgacagagcgagacttcatctcaaaaaaaagaaaaaaaaaaaaggcaaagacagcattccagataggcaggatagcgtgtacgcacgtgctatggtggtgttactggaaaggggtcctgattcagactccaagagatggttcctgaacctcgcacaagaaagatttcggggcaagttgataaagtaaagtaaaagcaagtttattagagaaataaagaaacaaaagaatggttactccataggcaaatcagtggtatgggctgcttgactgagtacactgtgaaaggaaaatacatcttggggcccccaaatcactaagctaaagggaaaagtcaagctgggaactgcataggataaacctgactcccattctgttcaaagtcatccctcggctcactgagataaatgcatatctgattgtctcttttggagaggctaatcagaaactcaaaaagaacgcaaccatttgtctcttaactacctgtgacttggaaggcctcttccagcttcgagttgtcccacatttctggaccaaaccagtgttcatcttacatatgttgattgatgtctcatgtctccctaaaatgtataaaaccaagttgtgctttggccaccttgggcacctgtcgtcaggaactctagaggctgtcaccggcctgccttctcaaccttagcaaaacaaacctctaaattaactgagacctgtctcaggtattcaaggttcacaacacttatagttattccttggttatatgctaaaaaaggggtggattattcatgagttttccaagaaagggaagaggatttcctggaactgagggttccttctccttttagattatatagagtaatttccggacttagctatggcctttataaactgtcgtggtgctggtgggagtatttttgagaaggctaatgcattataattagcatataatgagtagtgaggatgaccagcagtcacttgcataggcatcttggttttgatgaattttggctagcttctttacatcatcctgttttatcagcaggatctttgtgacctgtatcttgtgccaacctcctatctcatcctgtgactaagaatgcttaacctcctgggagggcagctcaggaggtgtcagcctcattttacccagccctattcaagatggagtcactctggttccaatgcttctgacagcagtagagataacacagataggagggatttaaagaacgtcaccgtagctaagatacagagaacagcataggggttaagcaaggtccaatatgggactagctttgttaagcagctttgcttgaagtgataaatcttatttcttcttcaaaaattcttttgaggaattttgtttaatacctaacagaaaaatcaataattaaaaaattatggtagatatcttcaagtcaactttatattaaaaagtgttccttctttgaaaggaaacacccttttcaacacccttggctttttaaaatttcatttttatacttatcagagttttaagagtcagatagatagttctagaagactgaaaatacggtaacttgctagacttctcaactgctgcctcctaattcccactttcagagtcaatcattttaaattatttcagaagtttcttcaggtatttacctctgtttttctattataatatgcttatagtgctatttcttattttttcattttagaaaccattcattttctagtattttgtataccataaaagatgaggatttagctctctcatatgctgtgtatcatctctatactttcctactcccatcctcccaatatggttctatcatattataatataagcacttaatattcttctgtaatattgttctataataattatattatataagtatattaatattatattataaaattattctataattatattgtaagcattaatatcttcaaattttaattagcattttaattgtgtggtttctttttatgcagtttttaaacctatctttttattaaaagtaaactagcttatgttttatattaataattatattttttattttaaaatgcatttaaaaatagagtgaacttaaattttgtaataaataagattacatatgttcgtagatttggcaaaaaccatgaaagtgttatggatataatgcaagtctaagaaacagtatgtccggccagtgtttggcaaattatggaccttgggccaaatccaactggctcctgcttttgaagtaacatattattgtaacatccattcaaactattttctgtgactactttctcctacaatggcagagtgaagtagttgagacagagtctgtatggctcccagagcctaaaatatttaccatttggccctttacagaaagtttgctgatctctctcccaggctatactatgaaagcatttaaaaaaaaccttaatcatcagtataatcatgactctataaggcaaagatatatttaacaaatttgtcctacattgtcccttttctacattcaagatggtttagtgcctttctacagatctggagcattccaggacacctaaggctggaggccatgtgacaacactgggctattatgagagtttctttgtttactgtttgacaggacagattctgtcttctcaaattctgtttgatcagaaatgctgtagcataataaagggagcagatgaatgactgaagccctacagctccactaaagattagagtaaaatctgcacttcaaaagatcctggtaaagcagggaaggtccttagctttccattttaagtgggaatgagacaaggggatggggatgaaagaactgggagccatcattgccagatgcatgtttgcagagcagtgtggggatcacctcatctgtccttcaaggttctgcaatgctctgccttcattttccttctcaagttaacagatatattctgactctgtctttcatgctcagtattcttgcaagagaacagagctcctgatcacctgtgtgcgtcctttgagtggatggcagctgcatctctgcattacagctagttagaatgatgagtccttgctatgcctcaagcactgtttcgagtgtttgatgtctattatctcacttcatcctcaccaggaccccatccgaggtaagttctattattgctattttacaaaagaggacactaacacacagagagatttagtaacttgccccaaatcacatagttgttacttggcagagtaaagatttgaatccaggatttcactccataacctgttttaaaattattatatgaatttacctcttttccaatctggatgccctgatgaaaggagagtgtaaagccacactccggtgcttaggggatggaatctcccttgaaagggataaacatggttaatgttaatccctaaagagaacagggtttacgcaggaaactgggactagaaagactggccttggtcaggctggagaaggaatttctggcccccacacttggccttttcctctctaggctagccttttagggaagcaaagatttagactttagttcttgaatgtgggctaccagtcagcccctttacatggaaataaagccttgagctcaaagagcatgtggtatcctgtatttcaaattaaatagtttcaagttacttcgtggattaatttcccttttgttactccctggcaaagtcttatttaaatatcctggcctcatttcacttgtgttaaggggtatcaaagggaagagacgatggtgcatactgaaccagaatatctaaagggagaactatatgccctgactctgaaactaacatgtggatggcaacagtgagcagagaactctaaggggaaatgggactttccagacataagttgaagttacaagccagaaactcctcccacagaaaagcccaatcgctagcattagatgatgaaattgtgagatgcaaaatgcaataatgatgataatgatgatgttgttcccatttggggacatgttcactatctcctagagaaacaaatatgaatctatccatcaaatagtcacacacaatatatgttaaccacaatacaatgcggtgtttcataatatcagtataaacaaagagggtaggggaggggtgctgtgagttatgccatagtggggaggggcaggcaagctggatgaagtgggataaaagttgccgaagtggctaccttgtccggggtatgtaccctgggattcattgtcgtgtgctaggaaacttcaggacacggacacacatgaggagtttaggggcagaggtttaataggtagaagaaaagagaaagagaaatagttctctctatagaggaaggggtctccgagtggaaaggtccggccggtggcaaatgcaccgaattttatagcccactttgaagaggcggtgtctgatttatgtagggctcacagattggttctatcaggtatgacatttacacagtgctcagggaaggctggttgccccaccctaatcttattatgcaaatgggctttccagttgatcggtgccatcttgtctgctttgtatggtacaagtggctggcagggaagaaacggggagccgccatcttggaaagtctagtccatagttcctctcggcatttgtccctgaaagctcccagcttgtaggctgctctttgttagaaaatgatttggggctgcttttcattaaaaagaaaagccttaccgaggacccccatacacttgcttctgcctaagtgatttcttcttaactcctatatcattactttgcacagagacaacagaagacatacagcccagactgatcttgtaggacttggtaagaaatttttaagtgaacaaaaaaaaaaaaaaaaaaaaaagaaggcgttattgccaaagttttagtaaaggagtaatatgtgtgctttaaaaagaaaaaaagggggccgggcgcggtggctcacgcctgtaatcccagcactttgggaggccgaggctggtggatcatgaggtcaggagatcgagaccatcctggctaacaaggtgaaaccccgtctctactaaaaatacaaaaaattagccgggcgcggtggcgggcgcctgtagtcccagctactcgggaggctgaggcaggagaatggcgtgaacccgggaagcggagcttgcagtgagccgagattgcgccactgcagtccgcagtctggcctgggcgacagagcgagactccgtctcaaaaaaaaaaaaaaaaaaaaaaaaaaaaaaaagaaaaaaaaaacctggaagatcttctaggacacattggaaagaaagttgcagtcaagtacaaactgttgcaaatctgcaaaaaggaggaacaggagagcacagtgctgagtgccgctgctggccctgttgcagggtcagggaagatgagactgattgaccactgatttggcaactggaggtcacttgtggcagtgaaaagaaaaatttccttgagtggtagagacaaaacttttcttcaagagaaaaagaacaatgaggaagtaaagactgcatatgtgggaatctttttcagagagttttgctatgaaggctagcagagaaacaaaagctgtaggagatttgtgaaggcagggaagttttgttttgtgtgtgtgtgtgtgtgtgtgtgtgtgtgtgtgtgtgtgtgtgtgttttagaagggagggagctattaaagtacatttgttggctgataagaatgatccaatggagaaggaaatttgatgatgcaggcagtagtgagattaatgtaggtacaaaatcctttagtatgtaagaagtgattggatgcagtgtgcaaggagaggttgggcttatattggaaccctgatgtttactctttaaataggagaaaagccagaatacatgaatttgtattcatgatgcagtgaggttgaaagtttggtggtaggtagatgagacgtcttctactgtcattcttctatttactataagcatctaattgcttctattttctcagttcataagaagtaggtcttcatttgatgtgagaaggggctagcagtatcagaaatctgagggaaaaagagaaactgtgaaatagtaagagaactacttgactagggaaaattatttgtattgcctgtcagcgttgaggcccagtctggttttaaacttaatataaggcctctgagctccattctatctctcattagctgctcgaatgaagkcatgaaataagcagacagtggatttctccacgtttgaaattttggaaatgatgtataacaagagggagagacaagtaagagtggtgagggaatgyatacaaggcactaattatgatgatggatcgtgtcatccaagctgagtagaatggagtgaggacaagaattaggttggaggagtgaggtgcaaaaataagaggtgatacctctcatgctcacatgtatcaggaccagtcacctaatttgtggggcttagtgcaaaagaaaaatttagggccactcattcaaacattattaggaatttcaagagctgggcatgttggagtatgcctgtgatctcagttacttaggaggctgaggcagaaggattacttgaggccaggagtttgagtctgtagtgtgttgtgattatgcttatgaatagccattgcattctaggtggagcaacatagtgagaccccatctctaaaaagaaaaagaaatgaaataaaataatttcaagacagtaacaactgagcattaaatgaagcatagagactgtgtaaacatgggactgtgattgctgcagaggccatagacccatgtagctggccccacatatgagcatatccatatataaaagtctgtttttgaagacccatttttattttttaggccccaataataaatgatcaattattagtagttaaagaaaaaaagaagaaaagaggtggtaactagagagaggggatgatgaaaattagtttgggagagactagctggtctaagatgtaatcatgttagcaagaggacaggattactgacattaaaaggccaaaagacagagaggtgaggatcttggttgtattagttacggggctgttataaccactaggatttgcgacttgagtagcattgacggtggtgatggggagcctggcaagacagcagatgtctacagcaagaggagggaatgggaagctgctctgatggcgtaatcatcaaggttgctgataaaatgggtaagaaaaagaaacaaaggtttggaaatatgaacaaagggctgggaggttattaccacactttcagccaagaggcacatgaaatgccgcagaaaaactgccacatcctgagatggctgcaggggaggctgtgtttttagaggaaagtcaagttcagtggagcaagaaggggcatagaatattcaaagaagagtttgagaatctgtgaagttttactgatgacaaattatggcttccaaagggtacagtgaaagggcttgggaggttagggatgggtagaaggtgaagtcagactagctttatgaggataagaatccaggagataagggaagacctagaaacttggatttcttgtgagtcaccaaggaatataggaatctaggggacagtaagatttatcctgatggtttcttaggtgtaggtgataatcaggtataaatttttaactaagtctccaaaagcaactgcaacagaaccacaaatgaacaaatgggacctaattacactaaagagcttctgcacagcaaaacaaactattaacagaggaaacagacaacctatagaatggtagaaaatatttgtaaaccatrcaccttaaaaaggtctgatatgcagaatctataaggaaattaaatcaacaagcaaaaaacaaacacattaaaaaatgggcaaaggacatgtacaggcagttctcaaaagaacacatgcgactggccaacaaacatacgaaaaaattcgcatcaacactaatcatcaaagaattgcaaatccaaaccacaatgagacatcatcacacaccaggcagaatgactattattaaaaagtaaaaaataaaaccagatgttggtgaagctgtggagaaaagggaatgcttatactctcttggtgagaatataaactagctactgtggaaaacagtttggagatttctcaaagaactaaaaacagagctactattcaacccagcaattccattattggatatatatccaaaggaaaataaataattctaccaaataaacatgcactcatgtgcttattaccatgctattcacaatagtgaaaacataaaatcaacctgggttcccatacttggtgtattggataaagaaaatgtggtacatatacaccatgaaatatgatgcagccataaaaagaatgctatcgtgtcctttgcagtaacatggatgcagctggggccataatcctaagtgaattaatgcaggaatggaaagccaaatactgtatgctctcacttgtaagtgggagctaaatattgagcacacatggacataaatgtgggaacgatgagcattgtggactactagagaagggagggagaggggcgtgggttgaaaaactacctgattggtacaatattagtcagtttttgcactgctataaagaaatacctgagaatgcataatatataaagaaaagaggtttaattggctcatggttacccagactgtactggaaacatgactggggaggcctcagataatttacaatcatgacagaaggtgatggggaagcaggcacattttacatggccagggcagaaagaagagagggagagaggaggtgctacacacttttaacaaccaaatcttgtgatcacttactgtcatgagaatagcaccaaagaggaaatccatccccatgattcagtcacctcccaccaggacccacctccaatactggggattacaattcgacatgagatttaggtggggatagaaatccaaaccatgtcattccayctctggcccctcccgaatctcatttccttctcacattgcaaaatgcagtcattccttctcaacagtccctcaaagtctgaactaattttagcattaactcaaaattctacaatcaaaattctcatctgagaaaaggaaagtcccttccacctatgagcatgtaaaataaaaaacaagttagttacttgcaagatacaatggaggtacaggcattgagtaaagactctcattccaaaagagagaaatcagtccaaacaaaggggttgtagtccccatgaaggtctgaaagccagcagtgcagtcattaaattttaaatctccaaaataatctcttttgactctgtgtctcacatccagggcataccggtgcaagggatgagctcccaatgccttgggaagctctstccctgaagtttttcagggtacagcttccacagctgctctcaagtgctagtgcctgtggcttttccaggttcatggtacaggctgtcagtgtatctaccattctggggtctggaggactgtggccttctcacagctccactaggcagtgcttcagtggggactctgtgtgagggctccaaacccacatttcaccttcatactcctgtagtagaggttctccatgagggctctgcctctgtagcaggcttctacctggacatccaggctttcacatacatcttctagggtttttatagtttggggttttacttttgggtctttaatctatctggagtcaatttttgtatgtagtgtaaggaaggggtctagctttagtcttctgcatatggctcgctagttatcccaataccatttattgaatagggaatcctttctccattgctttttttgtcagctttatcaaagatcagatggttgtagatgtgtggccttatttctgtgctctctattctgtttcattggtctatgtgtctgtttttgtaccagtaccatgctgttttggtcactgtagccttgtagtatagtttgcagtcaggtaacatgatttttccagctttgctctttttgtttaggattgctttggctattggggctctttcttcattccataaaaattttaaaataattttttctagtggtgtgaagaatgtcattggtagtctgatagaaatagcattgaatctgtaaattgctttggacagtatagccattttaatgatattgattcttcctattcatgagcataggatgtttttccatttgtttttgtcttctcttatttctttgagcagtgttctgtaattctcattgcagagatcaaagagaaaaaaatgttccttgtcttttttgatctttgttggtttgaaatctgttttgtttaaaattaggattgtaatacctgattttttgttttccatttttatccatccctttattttgagcctgtgaacgtcactatatgtgagaygggtttcttgaagaccattggwtcctgctttttcatccagcttgccactctgtcccttaagtgggtcatttagtccatttacattcaagtttagtattgatatgtatggatttgatcctgtcattgtgctgttagctggttatatgttggcttgtttgtgtggttgctttacagtgatagtggtctgtgtgtttaagtatgtttttgtattggtagcagcctttcctttctatatttagtgcccctttcaagatctctggtaaggcaggtctggtggtaatgaaatccctcaacatttgcttatctgcaaaggatcttatatctccttcacttaggaagcttagtttggctggatatgaaattcttggttgaagattttttttaagactgttgaatataatgtttgtaattctcattgcagagatctttcacctccctggttagctgtattcctgggcatctaatttttcttgtggcaattctgaatgggattgcctttctgatttggctctcagtttggttgttgttggtgtataggaatgctagtgatttttgtacattgattttgtatcctgcaactttgatgaagttctttatcagctaaaggagctttggggccaataatatggggccccaatctcttctaccttatagggtttcagctgagagtttcactgttagcctgatggggattcctttgtaggtgatctgccctttctttctgtagctgcctttaacattctttcattttgaccttggaaaatctgacaattacatgtcttggggataatcttcttgtgtagaatcttgcaggatttctctgtatttcctgaatttgactgttggcctatctagcaaggttggggaagttgtcatgggctatattctgaaatatactttccaagttgtttcctttcctcctttccctttcagggatgccattgattagtagatttggcctctttacatgatcctatacttcttggaggtttttgttcattcctttttaacattttttctttattttgtctgactgtcttatttcagagaaccagtcttcaagttctgagattctgtcctcagcttggtttattctgccattaatacttgtgattgcattgtgaaattcttgcattctgttattcagctctgtagatacattagattcttttttatacaggctaytttgtctttcagctcctgcattgctttattgtgatttttattttccttggattgggttttgccatcctcctcctgaatcttgatgatttttgttcctgtccacattctaaattctatttctgccattccagccagtttggcctggttaagaactcttgctggagaagtggtgtggtcatttggaggacatatgacactctggccatttgagttatctgagttctggcattgattctttctctgtgtgtgagtgttcatttaactgcagtgtagattgagtacagtcaatagacttctggatcttttcactgggctgaggctttatgtagggtctttatttgaagctgacttcttgtctctggtttcagaggtgggtatgttagtaaggtatttttggtgtggaagctttggggtatgatccagcaggtgacacttaggcctattggtcagttggtagattcttgctctgttgtgtggctcccctatatttcctcacagttgcagctgtgttacccctcagtgctctgaaagtgtggattcctctccccattgagtgctggctctagttcatgacttggcactcctgagctgcccactgcagctctagggcaatcttagtgtttatgttccttccccagcttagaggcagcaaagcaagggaccttagtagtggctgtggccaagggtcatttccttgactcctgggggccccacccmagagagatgcagatcatcaatcactcagtgcagtcagtccaggatagagggtttgtgctatggacccaagccagggtttccctgtctggtgatgagccatgggtggtagggggtgtggcacccatgggagatgaactggccttctctctttgggttgactgcagattgttggaggtgtggataagacacaaagggcctttgcgcctttgttagtccaaaggtggcaagggcagttcttctgcagaggcaggggccragaggctttcagttgcccttggatgctctgtccagggagttcctgagttggtgctggctcaatagctctggtaggtggtggctggaggcccaggcctagaggacctgcctggtgaggagatatgggaacaggtamccacataacagctgaccacttttctgtacggctgctgcggtatgcttggggcccactccagtctctggtcacgttggattttccagaacccagaggtgtcaccagtgaagtctaaaaaacaacaaagaaggcagcctgtccctccctctgrgagttttgtcccaggaaggtatgaacctgttgccagcccaaagrcacctgtaggaagtgtctggagaccctggttgggaggtcccacccagtaaggaggactgggattgggcacctgcttaaagcagcagtctggctacattttggtagagtctgtgctatgctgggggatcccttccacyccaggttaactcagacactccaaagcctaaaggttggaatggctaagtcacccaaacagcaaagatggtggcccacccctctgtctgggagtgctgtcccagggggaattcagatctctgtcagttagagagcttgggtgggggtggctagaggccctggttgggaggtcctgcccagtgaggaggaaagggatcaggcactcgcttaaagcaacagactggtcactttttggtagagcagctgtgctgtgctggggaatcccttcctccctgggttggctccaattctccaaagcctgaaggctggaatggctaaagtgcctggactgcaaagatsgctgcctgcccctccccctgggagctccttcttagggaggtgcaatggtgctcctgatagctggctggaattctaagccagtgggtcttaccttgtgaggtgcactggaggtgggagtggagcctgtgggctgttgctgcttagccccctggattcagcctcattcctaacggtatgtgcaggagcctaacgtcccaatttccacattcttaagcttaccaattagtccaaagttattttttctcttagagaaaccaccttcctggaacattccctcctctctctctctctctgtctttcaatctctcccaatctctctttctgtcaccttttttaaaagtcttttcctgtcacccaggctggactgcagtggcacaatcacagctcactgcagcctcaaactcctaagctcaagtgattctcgcacttcagcctcccaagtagctgggactacaggtgggtgtcaccacgtccagctaacatactgtttttatgctgcaaattgaacaggctgtgaatatgggatcaaatagattaaatgtgcaaaggtcatacagctagtgtatgacagaactggaactgaaacgcaggccgtctgttcattgcatttcctattggtggttgtattggttatctattgccaaaataatgctgtgtaacaaactacctccaaattcagtgcctccagaaacatttccttaatttttctcatgtgtccaggcttggctgggcttgactgacatagctcattagaggcagatctgttccttttacctccagtctagcccagtcctgttctcatggggatagcaggagtgcaggaaaacaaacaattttgccagtgcttttccttttcaaactttgatccttacttcctcttaatgtctcattgatcaaagcaagtcacatggccaaagccaaagtcaaaaggcaggaaaattcagtccacccatgtagtaggggggaaggagggaatcaatacttattgataataactgaatctactacaatgcctaagtagcaagatatataaatgacatgcaactccactaaaatgtctaataattaagaaattaactaaccttaagatttctcaattagttactttttgctgaagcgtaagcagtttcctcagttctaaccacaaattcttacataaaatatgtaagcattaaaatcatatattaatacagtattaaatatatttcaataatatgtcaaaatatttcaatttgattttatttgctttcttctcattctcctttatagtttctgaattttgtgccatatgtatggcaaatgcatttgagaaatgaaatgttataaaaaataaaagtttactaatttatttgaaccttaaaacagagcactaaagtatcttgctctgagaccgtatctatatttaaatggtaaaaatacacagatcagttttattccaaattagtattcctagagttaaactatatccatactttttacatttatagcagggcatattttaaaaacacatgactataacatgcgaatgtaatcattccttatgggccactgaataataagtatatctaagaagaaagcaaggatattttaaaaggtaaaaggcttgcaaatttctgtttgaaaattttaagcaaattaagatatgcttgtctgtgaaaaaaatgtaaaagttcagctgtataaatcacttaatatcccatgcaaagtaataaaaaaaaaaacttggactaaaacatgaaagttactattatacatttatatgtattgtgtttatatacacctgtaaatccagtwggaaatagtctactactaaatcttttcttcttgtttacacttctacagcctatggctaaayggatttttcactttttgtttggacaatgtggaagtaccaggtaccaggactctcccttgtcataactcccatgtaggtgaatgaattgagcatggttagtctgtaacaggctctagtatacatgcttggtggggttaaaaaaatagagatccactgaaggattctcagccattaaacttgggactttacccagcacctctgtgccctactctaaaagtatccataacttagctctgatcacagtgctttcctgcaagctgcaattaggtgggatgtcttagctgtcttgctaaaaatacacactttgaaagatagtcttcagcagtctgcgggaggataagagagggtgaggcacaaaccgtctgtttaccttgctcaggagcgctgcttgtgcttattttctgaccccaggtcctggcacttgccagcaccaatctttcaattctgttatgtcctcctagggagagactaaaattgcccagacctgctttatgtttagattacctctgaagccacttaatttgcagttgccaatagttgctttgtctttctcaattatgctctaaattggtgtgaaaacattaggattattgtgctaattaaaatatcttttgcacagctgtactttgccaggagtgggtgaaggaaagccccatgggcagccccaaagcccctccagggagcaggtttgtcatctcaggtggcccaatgtgacaccttgaggggcttctccaatgcacctcaccctcaaccactaccttgtcaggttgtctgggacccttggtctttaaatatcacacaatatatacaaaacaccttagaagatgagacaaaccagcatctggccaagtgagtgtttattaaaataaaatacaagaaaaataacttatgcaagctatctaatactatagaatcagaaaggtcatgagatatttttacataaggtaattctatcagctttgacaatactacgttttaggataagaagctagctaaaaacgtgaaaaaagaagagaacgagaaagaaggaacaggatgyggatgatgcactgtttaatctgtcatatacttaaagctaaaaatcttgaagtcacaacccttcctgtcaggcctctgagcccaagctaagccatcatatcccctgtgacctgcatgtatacatccagatggcctgaagtaactgaagaatcacaaaagaagtgaaaatggcctgttcctgccttaactgatgacattccaccataaaagaagtgaaaatggccggtccctgccgtaactgatgacattaccttgtgaaatttcttctcctggctcatcctggctcaaaagctcccccgctgagcaccttgtgaccccctcccctgcctgccagagaacaaccccctttgactgtaattttccactacccactcaaatcttataaaacggccccacctctatctcccttcgctgactctctttttggactgagcctgcctgcacccaggtgattaaaaagcgttattgctcacacaaagcctgtttggtggtctcttcacacagacgcgagtgaaacttcctatgcctcttttgccatatccaggatgtttccagagcctactttccaaataacattctcttctgccataagcttaactgaggctctcagcatttcttacttcgatattacagtgacttcccaggttctctttcatttactatgtccccctactaataggtataatttttctaaaaccatatctggttacagatggttcactttcctgtttcaattaatacccaatatactcaggataaatttgacctcagcatggtaaacatatctcttcatagcctgacccctacgccggtttcaccactcctaccttgattctacctccttgcttctgattggaacattccattacgctccatctctatgccagttaagtgtttatccctatgcttggttaaacagagaatttgtgaaggattctgtttcttattcccttataggtacagaggggatactcaatacatagctactcccatcaatcaatttggaattatggtataattctaatcaaactttaaaagaagtcttacaagtgtagaattttgagataaatgagcgtatttatggaagctaaagtgattcctgactccattatagtttggatgtctcctccaaatcttatgttgaaatgtgatctccagtgttggaggtggggcctggtgggagatgtttgtatcttgggggtagatctctcatgaatggcttgtgccatctccttggtgataagtgagctctcactcttgagttcacatgagatctagatctggttgtttgaaagtctgtggcacctcccctccccactctctcacttcctcctgcttttgccatgtgaaacacctgttcccactttgccttctgccacgagtaaaagctccctaaggcctccccagaagctgagcagatggcagcaccatgcctgtacagcctgcagaagcatgagccaattaaaattcttttctttataaattaccccgtctcaggtatttctttatagcaatgcagaaatggcctaatgcaccccaataggtaaaaatatacttaaaattttctattaagaagcagctggtatttaaattaaattagatctggcccatgggaaggaagagggaaagtgcagtcttatatacaacagagaaaacatgttaggaaaaggtaatggcggccgggcgcggcctgtaatcctgtaatcccagtactttgggaggccgaggtgggcggatcatgaggtcaagagattgagaccatcctggccaacatggtgaaaccccgtctctactaaaaatacaaaaaattagccgggcgtggtggcaggctcctgtaatcccagctacttgggaggctgaggcaggagaatcgcttgaacccgggaggcggaggttgcagtgagccgaaatcgtgtcattgcaccactccagcctgggcaaaaagagtgaaactccgtctcaaaaaaaaaaaaaaagtaatggcattttttattgtgatttataaaataagttttcatccctgataaatcatagctatggatttcattaatttaagagcaaatttttaatgggaagtgaattaaagagtcagcttaaacatttacatatttaattttaaattaacctacttaatctctgtgtgaaaattttgcatcactatttcattggccaataaagagagaattcaaagatggatgaatacaaaaagataagattaaatctgaatttatctgtataccaacatggactgatcccaggggagtggatcattcactaatcagtagtaatggatcaccttagtgtccaactggttggcaccacatctaggtcagtacattccacagagaagacacaggagggagcagggagagttaaaaggccttcaacagaggaaagcctctagcaagaaagagaagaaagcgattatgggactctaaaaggcaccatcagataggggaatacatatcctgttgtttctgaacaatggcaggctttcttttcagggtctcattcgtttctattccacatattcattgatattaaaacctgcacttacactcatttccttcaaattcataattttgttttcatttcaaagtttggtctcctaaggactttactacgtgaatacagaatacagaagactctaacaatgtatgagggtttgaatttcagacttattcagtcagtttacatttcttcattcttttcatctccacttttccaatttcctcctagtctcataaggagaataagaaatgcagtggtgttaagaagagtattctataatgcctagtaaatgccaggcatgcagatgtagccragtttgaaaacattttaatgggttgtttaaaagttttgttctgatacagccacagcttggggttatgaagctcttccactaatcagattatatcaaaaactgaaagttgcaaaactgtttctaaatttatgtcacatactcccattaaagagaaaagaattattgtggaaatgatatctatcattaatttgcttaaataatagaaacgggcaaaaccttgtgtttatagctcttacacaaatataaaacttaaacgaatctatacattaatataaagcaagccataaagcaataatgttaatttaacatgatggatgatattgcttgctgaaagtcaattacagatattgggtgtagagtaggaagatgtagcttcggatattgtcccctgtttgatctgtttctatgcatctgttcacataaatgttgtatttccacaattcactagtattggtgcctttgagatgcttataatgttgttacttcaagataaccaaatccactgagtaatcaaaaaggccaatttgaatgaggtggtacgaggcaactctgaaaagctgttcttttgtttagttgaagataaatttgcatgtagtgttaattaaacttactttgattagtgatctaaattattaccacatttgagaacagaaaaatatttttggtgctaataaagtgaagtgatttggcaattcatcctgtagaatgagtatggtaatcattcatctgggttcaatttccctgtaatatcatgtacattgtgataaatcaattttcctgtcatgaaccttagttcatttggtgtaccttaaagtcattagcttttcacttggcacagcctcaagagcgacccccataataactaaaattataaacatgggcaataatattgtaatgcaaaattataagatacaggacttagttacatcaataaaataaaagtgcaaagattaacaaaaaaaaccttagaaatgagaaatgacaaccttcagatcacattttacaataagcagacttccaaattaatcaatcttggggaggccttgtgactctatggtgacattctgtctctcagtaaataataaattcctcaaatggttatactgatcaatgtataacctgcagacactaaataggatgctgatttattttaagatttgctgaagcatgaagttctgctgatggtcctacatgtagacatttttaactcatatgatgttgtctgtagccgatgattatgccttttgtattgtactctctaatgaagaggggacaactacattatgaggagtctccctttttttaaaaaactttctttttttttttttttttctggtgatagaatctctgtcacccaggttggagtgcagtggcctgatctcggctcactgcaacctccgcctcctgagttcaagtcattctcctgcctcagcctccccagtagacagaattacaggtgcccaccactacacctggctaatttttgtatttttagtagagatggggtttcaccatgttgtccaggctggtctggaactcttgacgtctggtgatccacccgccttggcttcccaaagtgctcagattacaggtgtcagccactgcatctggcctaaaactttcttataaatatctttcaccttgtgacaggctgtggaacacccccagctctgctggtgtgtcttcctgggtcaatcctcacatttggcttccaataaacctttatgtggccgggtgtggtggctcacacctgtaatcccagcactttgggaggccgaggtgggtggataacttgaggtcagaagttcgagaacagcctggtcaacatggcaaaaccctgtctctactaaaagtacacaaaaattagccgggcatggtgatatgtgccagtaatcccagttacttaggaggctgaggcaggagaattgcttgaaccaggaggcggaggttgcagtgagctgaaattgctccactgcactctgcctgggcgacagagtgggactccatctcaagaaaataaaataaataaataaataaataaataaataaataaataaatctttatgaaattatttctatctcaacagccttaatttcagttgacagtaactaktggatccccaggaatatgtttgcatatttggggagaaaatactattggaggggaacagaaatgctactaaggtaagtttttgtgatatacacatatacattatataaaaatatatcaatatatacaaatattatcattattataaaaatatatgattatataaaatatatacgatttttctagtgagaagtaggcttgctgtaacttgccctgaaaaagacattttctttcatggaaaaacagctacatgatttgactgtggcaaactgacctttctttatctggagaagagaaaaacaactctgaagacatggcaactaaaatcctttgaagacttattcagttaacgagttgtaaaagaggacagttagagaaatgaatccaagcatagctgattgtcaagtaatgccagcttcagaggagccctggagtttaagtgataaaaaaagacatgataagaaatggtaggctcatcattttaagtggtaaccactgatagttcccacgaagaaaagtcaaaatcagacagaaaaatctgtttggacctctaagagctttcctaggaagtatttgattccaagccaaatgattaggctgcctttgttctactttaatttgagaataaatcaagaattgaaaaagcaataattcacaatcttaggcatttaatgaccagttagttaatagtggctaatctaattatttttctactagacaaaatttgataaaatgctgctttaatttcttcttcaatgtgatgactatggtaatttaaagtttagttcagacagattgaattacatagaaatgggcacaagtaacgtaaactacatgatttatgatttggctctgtgtccccacccaaatctcatctcaaattgtaatccctatgtgtcaagggagggacctggtgagagatgattggatcctggaggcggattttcccctttctgttctcgtgatagtgagttctcacaagatctggtcgtgtgataagtatctggtgtttccactgctccctctctctctcctgctgccttgtgaaaaaggtgcttgcttctcctttgccttccgccatgattgtaagtttcctgaggcctcctgagccatgcagaactgtgagtcaattaaatctcttttatttataaattacccactctcaggcagtatctttataagcagtgtgaaaatggactaatacactataagactgttgcattagatgtctattccttctgaagactgagggaatgaaaagaaatgaatataaactataatttcaaagatgtgataagaattgattactggttccatatacagtaggcaagaaggaataggtttttttgctcttcaattttgatactttttgaataagtttatgtcacaggcaaaagggctgttatagagttaccaagagtaggaagattacagtgaaacatgggataggtagaagattagttgatacatttagggaatgtttctcagagcatattgtgtgagaggccaaaacacaagacaaaatgaaaaaaaatcaagaaatctattctgtactcaaaaagtttgggaaatagtgtatgctatatcaagctcttggaagctcacaatgagcattagctaacatgatttctggtaagttctacagtaaggaaacgtcttgaatgtttttaaaatcagtttctcagatttatttggatgtcaaacttttttattcccaagtgctgatttagggagaagcagcaacaggttcacaaaaaatccaagaggaaaggaattaaatcagttttcaacttaaaagtttgttaagttaatagcaatcttatatacttgctttttttttggtttttagatgccaaacactatctaataatctgggttatctgaagttatttaaaatgcctttttttctgaaattcttttctgaattactttttttttttttttttgagacggagtctcgctctgtcgcccaggctggagtgcagtggcgcgatctcggctcactgcaagctccgcctcccgggttcacgccattctcctgcctcagcctcccgagtagctgggactacaggcgcccgctaccacgcccggctaattttttgtatttttttttagtagagatggggtttcaccgtgttagccaggatggtctcgatctcctgacctcgtgatccacccgccttggcctcccaaagtgctgggattacaggcgtgagccaccgcgcccggcctctgaattacttttgtttaaactgaactgaaatattttgattacaaattaaagtcaaaattaaggtgatgatagacccaagtaaaagtggtacactttcagtagccttaatggtaatgattaacttaagacaacacattatttttcagttttttatttttcaaaagtatgggtttatggtctgaattaagtctccctaaaagatatgttgaaatcctaacccctagtacctcagtatgtgaccttatttgggaatgggattgttgcagacgtaattagttaagatgaggtcacacaggaggtcacacaggttgagggcactttctggctgatagactatgtctttttgctgtgtcctcacatgctggaagggatgaacctgttctccgggatctctttcagatgggcactagtcccaatcatgagggctttgctctcatgacctaatcacttcccagaggccctacctgctaatactatcacattggggactaagatttcaatatatgaattttgtggggacacaaacattcagcacagcaacagacagagagaagatgaccatgtgatgaagaaggcagagattggagtgatacatctacaaactaaggtacaccagtgattgctggtaaataccggaggctagaggaggcagaaaggattctcccctgcaggctttagagagagcatggcgctactgacacctaaatttcagactattaacctctaatagtgtcagatagtaatttttggtgttttaagccacccagtttgagtcactttttctaagagccctgacaaactaatacatatagactagagctgtagaattcaatacagtaaccactagctacgtgtgataacttcattttaaattagtcaaaattaaatagaatttaagatttagctcctcaggtasactacctctagtccagctgttcagctaccacatatgtttagcggacattaaatagtgcaaatgacatttgtcattacataatattctggatagaagtggtataaagtcgattttcaaattatctatcaacatttaactggtgtagtgagtgggcctattcaagaaagtttggtaatggaaaacaaagtggctttgtataaagaccattttgaatagctaacttcagccactcaccttttctattttgagttttgatctcattaaactatgtgggtgcaggttgacccctaacagaattccytaacattaagatacccatattatctcaaatatgtaatttgtgtggtaaagtcaaaaatctggaatttattttatcttcatatggtacccatgttaaggtacctatatttcctcaaatatataattggtgtggtaaagttgaaaaatctgaaatgtatttatcttcataaaattcacctcattgcttcaacagaaagttttcttcactcaaactattttcattttttttcagaggctaatgatttctaacacaaagaatgataccagggatgtgtctctttactatgttgtgctttaattggagaaggaacacactgaacatttaaactaccaacagtggttccttagaaggacactatttccctcggacattgtatctaaattgcctgatttgcacacagcttccaaagtaatataagattatctggactaaaaaaaaataattcatttgcctaagaaagccaaataccttgttatctgtgttatctattttatgccctaaaaagcaaaacattgataagcacatttggagttatttatagatcatctagaaatacaattaggaattcatgcttccaaaatgaaaataaataccctataaacttaatggaaatgtagttacccatttatgatacaccatttataatgcattgaaaattgattttgtactcctgaatatcattggtcaaatattttaaactctcatctcaaaacatgttccatgaaattaaggaaattggctctgagtatagttgctctccaaggcctctgtctcagctctcagaaaggcctggagacagagtgtctgtgattagatgtttgcagagagctaattttctgagtaacaaagtagacagactcagaagaaaaaattaaaatggcaggggagggggctgatttagcaatctgtgtacaaattgtaagaaaggttaaaattaggcatagacaaaatagagctcctcccaagagacaataaaaaagcaatgacaatgagattatataacatagtccaaggataaaactaagaggatgctccctctttctctttttggatgctcttttcccctgcctagtgacacagccctgaactttctgagggacatataatgttgccaaacaagaatgctgaaatggagtgttattcctgtctcttactaactgtatggcaggggaagtctcagtggctttatccatgagttgtagataataataataatgataataacaattatcacacagggtcttggttggaattaaaagaaggaattaaaagtgctgtaaatggaattgtgttccctccaaatccatatgttgaagccctaaccttcaatgtgactgaatgcggacatagggcgtttgtagaagcaatgaagattaaatgaggccataagagcagggttctgatctgataggattagtgtccttataaggagagacactgaggagctcaatctttttccaccatgtgaggacccagagagaagatgactgtctgcaaaccagaaagagcggcttcgccagaaaccaactctactggaccttgatctggggcctctagcctccagaacagtgagaaaaaaaaattactgttgtttaagccactcaatctatggtatttttgttakggcagcctgagccgactaatacaataaggtaggtaatcaaggtgtcgtgtcagacttgcttgttttttattcctagagcattcctagtgtctgcttctgttatatagcaggtgctcaacaaatcattgctgatttatttatttaaatacttacggatttaaattccctttgagtagagctgacttcagaagctttctctgggttctgcattggattgtataagatgggcagcgtgcaaattcagtgcagtgctagctccttatgtctttttcccctttcaatcctatgttgcttttctgtcaatgtggatgtttagagaatgcagcttggtatccagactgcctgagtccaaatcctcactctacccctatggccttgggaaatacagtcagttctcctgtgtcccatttatagcatatagaaaaatggagataataacagtgcctacctcatcagattgctatgagaactaattatgcttagaagataacttgtaaactctcaataatgttggtagctatcaattattcttaagcatgctttaaccgtgagactttatgtcctttttatcttttgtatcttcaacttctatactgggttgcattctttctcaccagcatttatattcacacaaatctcccgatttaggatatagaaattcttccttgactccacacacatgttgagctacaggccccatcctttttttccactatataatcaaaatttcaaacaagtcatttatgccattgtcaccattttctcaggtcacactcctcaatatatttctgtactttgcctttctgaatatcctgaaatataatggtcattgaccttggtcttattttaattttatgccaaatttgatgataatgaacacatgcccytcctcttcctcctctcctcttgctgtggtctgaatgtttgtgtccttcaaacttcatatgwagaaatcctastccccagtgtgatggtactaggaggtggcctatggaaggtgattagatcacaagggagaacccctcatgaatgagattagcgcccttataaaagaagcctgagagagcttgcttgtctctttcaccatgtgaggacacagcgagaaagtgccatctataaatcaggaaataggccttcaccagataccaaatctgccagcgccttgatcttgaacttcacagccttcagagctacaagaaatacatttttgttattttgttaagctactcagtttgtggaattttgttacagcagcccataaggactaagatgcttccattgtcagtgacactacattctattggtcttgcccatctgactgtatttattactgtatttcttgcaggcttcctgttttctcttactttgggaaattctcaagtctctgagtcaaccttcactgacatggagtccaggagactcaaaatgtcactgtggccctccaaagtagaggcttatggaggtcaggtggccagtaaagttttaggtcaggtccatcttacagggggtccagggggttgctgaacacattctgtgattatttccccagttccagaatgcataattggaatagacaaacttatcagttggcagaatcccctcactggttctctgacctgttgagtaagggctattactgtggaaaaagccaagtggaagtcattagaattgtgtttatctagaaaaatagtgaatcaaaaacaattccatatccttggaggaactgcagagattagtgccattattgaggacttgaaagacacagggtggtgatttccaccacatccccattcagctcttcagtttgacctgtgtaaaacacagatgggtcttagagaaagasagtggattatcataaacttagccaagtggtgactttaattgcagctgctatactagatgtggttttattgctttagcaaattawcatagccccgatacctggtatgtagctgttgatctggcaaatgcctttttatccatacttgctgataagacacaccagaagtaatttgctttaagctggcaaggccagcaatatacttgcactgtcttatctcatgagtatatttattctccagcattatgtcataatttagttgtcagggatattgattgactttcctttctttgattgacttagatatcacactagtccattacattggtgaccttttgctcattggacctaggatcaagaagtagtaaatactctagacttgttggtaaggccatttgtgtgccttaggatagaaattaaaactagcaaaatttaggcaccttctccctcttgaaaattctagggttccagtggtgtggggcatattgagatctctctcctaagtaaagaataagttgttgtatctggtctacaactcctacaccaaaaagaggcacaacagctagtgaccccctttgtattccacatattctagtatgttactctggcccatttactgaatgacctaaaaagctgccagttttgagtggggcccaagacagaagaaggtcttgcaacaaatacgagttgctgtgtaagctgcttagctgcttgggccacagtgatattttgggcctcctggactcaatgtcaatgaatgtagtctcagagacttgaggactttccaaagtacaagaaaacaggaagcctgcaagagatacaggaataaatacagtcagatgggtgagagactcagagattgtggtgtcattgacaactgcagatccaatggtgtttgaaatgtcaatggcagatagggatgctgtttggagccttaagcaagcccccataggtgaattgtactgtagggccttaggattgtagagcaaatcccagccattctctatggatagctactttttttttttttttttttttttttttttttagaaataactcttggcctgctactgctactgtgtcatagtagatactgaatgcttaaccatggttcaccaagttaccatgtgacctgagctgcccatcatgaactgggtgttatccgaccaccaagccacaaagttgggcatgcaaaccagcactccattatcagatggaaatgatatatatgtgattgggcctgagcaagccctgaaggcataagttagttatataaagtggctcaaatgcccatgttgcccacttctgctacactgcctcctctctcccaacttttacctatgcttcatggggtttccttataatgagttgacagaggaagagaagacttggacctggtttataaatggttctgcatgatatgtaggtaccacccaaaagtggatgactgttccaatacaacatttatctgtaaggactgtatgaaagaaaggacagtgatgaagaaaaatccttccacataactttgagcagtgtacttggttgttcacttggtttggaagaaggaatggccagatgtgtaattatgtaacaattcatgactgtggccagtgatttggctggatgatcaggggcttggaaagaatatatttggaaaattggtaacaagaaaatttggggaagaggtatgtgaataaaactcactgaaagggcaaaaataattaaagatatttgagtcccatgtgaatacacaccaaaggatgacatcagcagaggagaattttaataattaattgaataagataacccattctgtgaataccagtaagcctctttctctcaccacccctggcatcacccagtgggctcatgaaaaaatgtctatgatggtaggaatggaggttatgcgtgaggtaagcaacatagacttccactcaccaaggcaggcctggttactcctgctgctgagtacccaatttggcagcagcagagatcaacattgagtccccagtatagcaccataccccaaagcaatcagccagccagatgatggcaagttgattacactgggctgcttccatcgtggaaggggcagcattttgcccttattgaaatagatgctcactgagaatataaatttgtgtttcctgcatgcaatacatctgccaaaactaccattcatggaattacagaatgtcttatccattgtcccggtattcctcaccgcattgcttgtgatcaaggaactcacttcagagaaaatatagtatgacaatgggtccacactcatggaatttactggtttaaccatactttcctccatcttgaaacagctggcttgatagaatggtggaatggccttttgaagactcagttatagcaccagctggatgacaatgccttgcagggctgggacaaggtttagcatcatatgaattatatgagtatttctcccatagccagcattcatgggtccaagaatcaaggggtggacctggattacacatggtgacccaccagcaaagtttttgcttcctgttcccatgaccttatgctccactggcctagaggtcttagattcaaagggagaaatgcttccttcaggagacacaacaatgcttctattgaactggaagttaagactgccactcagttactttggattcctcatgcctctgaatcaacaggcaaaaaagggagttactgtgctagctggggtgatttattctgactaacarggggaaatttggactgctgcttcacaacggaggtaagaaagaataggtctggaatacaggagatcccttagggagtctcttagcattactatgcctagtgattaaggtcagtggaaaaccatagcaactgtccagtccaatccaggtctgtaatgacccagacctttcagaatgaaggtttggtttacaccaccaggtaaagaactacgaycagctgaagtatttgctgaaarcaaagtgaatacaaaatgaataatgaaagaaagtagttatgaatacctgctgtgcccatgtaaacaattacagaagtgagaaatataattgtcatgagcattttcttcttgttccattcaggaacacataatgttttgtcctgaatggaatcctgggaaaggacattaggtacaaactaaggtaatctgaataatgtgcgggctcttgttagtaatataggtacctaaataataacaaaagactcatactaatgcaagatgttaatgggtatgtaagagctgtgtactatcatcacagttttcttgcaaatctgaaactgttctaaacaataaaatctctttttaaaaataaaaaaataaaaatagctgcaaactgagcaaatcagtctttagagaagagtcacatcataaaacatactctttccaactagttcacatgaacatcagtttttctttctaaattcatggttcagaaataatgtttttaacggtagctaggttctttgactagcctacaaatttaaaagtccaccatgtagttaaactctcttagagggctaactgagctttttgcctgggtaaagaagctgctgagcagagtagagaaaaatatgaaaaattaaaaaattcctacctctttttctaggcacaaggtgattcttgtatatgttctataaataaatgtcctattgaaatcacatatgccacctggtagtatttctaagttctgcttccactattatgtctgacataaacattcagaaccaacaaaaaatttctgagcatctactcttagctatgttctttactaagtgttgagaaaacagggaaaatgacattacatctaatcccaggagaagagagcaggaaaacagaagaaacaaaagaaatgaagagtaaattcaagggtaacttttcccttcttcactctacttgctgtcacttctctctaactcactttcaggtcctagtcatgcagtattggaataacagagatccatgtccactatctttatatgaatgtataagtgcataaagaggaccagctggcttaatggtagttcactggaaggagacctagggtatttcgagaaatgaaaattcaactgaaacaatggcagagttgagctgcaaaaatggccaattgtgtgtaatgttgtttcctatttgcagagataaaatttctagaccaagttggaaatagctccatcattatactttattacatattgctgcaatattttgggatatttaacctggagtaagacaattatgacacacttggaaactttcttcaaatctttggtttttggtggattataaaacatgctgctctaaagacacatgcacacgtatgtttattgtggcactattcacaatagcaaagacttggaaccaacccaaatgtcaaacaatgatagactggattaagaaaatgtggcacatatacaccatggaatactacgcagccataaaaaagatgagttcatgtcctttgtagggacatggatgaagctggaaaccatcattctcagcaaactatttcaaggacaaaaaaccaaacaccgcatgttctcactcataggtgggaattgaacaatgagaacacatggacacaggaaggggaacatcacacaccagggcctgttgtggggtggggggagggggagggatagcattaggagatatatctaatgttaaatgtcaagttaatgggtgcagcacaccaacatggcacatatatacatatgtaacaaacctgacgttgtgcacatgtaccctaaaacttaaagtataataataataaaaaatctttggtttttggtttgtccatgaattgaaaactccgaaaaatgactgagttacagatgtggtcttatcgtttggacctttctaacaatctaagctgtagaacaaagaaacacattttcttgggagatctgagtaagtacaatgatctctgtcattgaaagtgatcatgaagatgatggatggacacatgtccaagatgatctagaaggaattaccgtatgggctgggagttgaactaggtgaccattagttatcttcttaagctctaaagttctgtgattttagattttcaataagttgtggtctctttactcatgcactgagtagacacttcaataacactattattaaaactttcatagcatgcccaataacatcattacacaaaaaataaactcagaaattccactaaataaatattaataaagtatacatttggtattctgtcaaacctagggtgtgcagtgtttcctgaacccaaaatttactttggaatgcaaatctgctagaaagatatagaataacattcacatattccaattattttacccatagaaaattaacacatgtgccctctatggctatcgaatagtatccttctcaattgatcttcagtttctgccttaattattcttttgtttctgttttgttttgtttgctttaaatatcagcattatgggtaagtactatgatgaattttattaaactcttgcttttaagtatttggaatctgattgctctctcgtacaccagggaactcttttatttattttttcttcctcttcattcattgctactaaggaaagrattagactaaaatagttcttcttcagaagtgtacaagagcctatttaattttgtttttgtcctaaaagttagtaggtaatcataacaaaatgatataaactttctgcatgttctcaatattattttcccccagtaatgacttttcaatatttgaagtttggaatctgagatcctataaggctacttttgtttttgttagggatattaatattttaataaaatatcttgtatatagtataaacatctgttgaaatcccatgaaaagtggagctaattttctccttaatatggtaagaacaatttcttggatggatgatcgatggaatctttcacccttctttggctagctccttgtctctgtgacacctatggcctctcaatttctttcttggtacagctgtttaggtctgcgagggtaagttaccaggaaacttcaccaggtgatgttctgtaggttgaccagagcagttcgccaaaggcttttcttggcttgaaccaggttgagactccaacgactcaagcagaatgtctagaatttagtcttctaaacctgcaatcaatgtatttttttaattttccgaagtaatataattamgctaaaagctctcaaagacttactgcttagactccatgaatgaagcatcatttgaaaagctacaataaagaaaataaagagatcataagtatcatgacaaaagaatgaaacactgattttttttttttttttttgatacagggtctcactgtgtcacccaggctggagtccatcaaagctcactgcagccttaaccttctgtgctcaagggatcctcccacttaagcctcctgagtagctggaactacaggcatatgccaccgagcctggctaatctttgatttttttgtacagattgtgtctccttatgttgctcaggctggactcaaacttctggtctcaagcgatctttccatcttagcttcccaaattgttggaattatggacatgagccagtgtgcttggcctgatttttttttttttttaatgagaaaaacgttccttaagaaaagtttcattgtagtaagtaatcaggatgaatagcatatattagctccgaaaaactttggaagccttcttacttcactgaaagtggggtttatcaactcagctgccaacggctttcctcccatttagcctttgtgtgaaaaacacaattaatactttcttgagtagtacaagctgagccgagaaaccatctttcagaggtgtaaattcttgccttgggtggaaggctggatgttattaactttcacaatttctttcaacacttgattttcctcaatcatggtaaagacatattatttatttttctttttagttgggaaagttgattcacgtgacttttgcattttgtagaatttttaagaggtaagatgaaaattaaacatttgtgcgtgttaaggatccatgtttctctgtcagatgtctggtaatttgcttgacgatttttgcaaagataatttagaaattaaggaaaccattctctacgtttttctttacattaaaagaaaaaagtctccaataaaaaatttctctatccacattacaggttaatttacaatttcagctgctggtggctggcttgaggcctcaatgttaaaaatgagaatgaggctaattctagtgaatagaggtccacacagacaattgctatctttgttagatgctccagtaccaagcctaagaataggaaaaaaactaaaaacaccctggaaatgtaacagaatcatcttttgctgccatctttctcttcagtataagctgagcatgtgtttgatgcatagcggtgtgggaactatatactttcttcttactttccttcagtaaaggagcttagctccattaagcattgttcaagatagtgtatttaaaattaacataaaaggtaaaagattttaatgccttttaatataaggaaaattgattttattaaaatgctttaagatactacaatacaattacttatttatcactctaactctgtattgtgagtgtagcttcctttccaagtatactgatttttttatgggttttggaagtaggaaacgaaccaaagtagtctatcaaaattctcattcaccgtctttcttaagcagaaccaagtccatcatgccgacggagactatttcaagagtagaaattctttttattcaaaggggtaggattaaacaatgaaagacaggttatatttttctaacctgtgttttgctgagctgaagcatgaaatatcaaatatttataataaagtattcatagttaagtacactgaatcattaaaatgttggaaatattgaaatggatgatcgatcttattggagtccttgtgtgatacaggaacttctgtatttactgttaacaagaaaaactcaaaaggttacattcctttttagattcagagctcaaatagaattgatttaaaatttaaagcacttctaataagacatttcagcattgcataagttaaacatggagaaaaaaataaatacatttatgtttttctattaatacttactctaagttgtttactagaactcagaataaatgtctctaaagatttagttttaatttttggctgcttagctcttacaatgacatttattctgagtaccatattaaatgtgtagtaataattatatgtatttttcctagcttgtgatatgaggtatcttgcattttggcatattattctgattttagagacagggtcttgctctgctgcccaggctggaatgcagtgatgtgatcacagctcactgcagtcctgtactcttaggcttaagtgattctcctgcctcagcctctgaagtatctaggattacaggcatgtggcactatatctggctaatttattttttaatttttttgtagagacgaggacttgctatgttgccagtttggtcttgaactcttggtctcaagtgattctcctgccttgggttcccaaagcgttgggacggcagatgtcagccaccgcgcctggccttattcttataaactcaaaattatctgaattcaagcaaggtaatgtatttcacagcatcactgaaatataaagatgtatcatctcgggataagaactaggctgatgtcagttatgcatcctgctattagctcccttgttatttaataccatggaataaaaaggcagcgtgaaagtctttttgccactattgcctggcttttattgcagctactcttgcatctataatagtggaagggaagagcaatacggattgtaaaatgaactccatagaagatccactgtggtcagtagatcaaggcatgacagtattgacgttaagaatggacactggagtccagtatatacggattcaaatctgaatgctcagtagctgtatgacttgggcagttacttaacctatttgggtttgagttttcttgtcttcatctgtaaaagtagggctgttagaggtttaagtgaatatatgtgcacatatgtatatatattaagagatatacatgatatatataaataaaatatatatctattcccttgagatatatatatgaatatgtgtattcccctgagatatatatgaatatatatatattcccctaagatatatacatatatatattttcacatatttctttacacacacacacagacacacaccccttagaagagttccttgtaggtggtaagtgctaattagatattaactatcatcacattgccgtctcatttctgtatttgaattactaattagtaacacaattgaatgatctgatggttccttcttttccctgctttttccttaaaggatcaaaggttgcagcaaaatgtcacatttaagaagctgagtaaacacagaatgagaagccctaaagcgaggtgctgtgttaatagacaggctaatcacttcctgaatacataagaactagctctttgtagaactagcagagagactgctaacaggtttttgttttagattgatggattgattttccaggaacaggcctgatgagagccctcataaaaattgcctctcatagcctattgcaaataagtataatcttacataaatcaaagcactagtacgtaagcatcccaaggacagagattttgtctgtgttggttcacagctatatccagagttcaggcaagtgcctggcaaatagtggaggctcagtaagtatctcttgagtgaactgaatgaatgaaaaccttgacttttcctttaaataggattaacattaaaagcaaaacaaaacagcatgctttcctacttccttgatggatttctgaccctaagaatgctgttaggcaagtaagaagggctggagagcagcatgtgaagggcacagtgcaaatgtgtacatttagcaagtatttcagaaatctcggatttggtgaagtatttgctggagtgtgtggtgtgatgtcacacttaactcagatacatgtgtcacatttgaattacaaatattctgtccagcatctccctaacttgagtgactatgcttatacttttttctacacagggttttcataaatctttgatccttgaccaagtgtcatagagaacttttcttaagtgaaactctctgcaaacagttagcttatatttaagtttctattcagctttgagtatagtattttggctaaaataatgttttgcatggtccatttcacaggtgaggttgattatatagcattcattactcttaatttagcttacaacctcagatagtggtttaaaatatataacactcataactatgtctaagttaatcaaatttaaattattttctactcctgtagcaaacattttttgaaaacagaaaaaagtccctttttacagcataggctcgctgataatttgaatagaaaaccactcatttctatacatgaaattttcctgattgtctttgtaataaaaactgagaggatattcgtcatccctggctgagctgcactgaattctactcttttatacatgtaataaaacagcaaacaacatcaaaatacattattaattaggcatgaatttcttaaaatggtttacatcatctcatttaacttcagagcttgcagacattaacagtaagtcaccacaaagctaccattgatttataatgcacattaccacatcaagcctggcccaaggactctgggcccagaaggaaaaacagccatggcagaaatataatgaaaacatatctgtattcacagaaaacaattaggcttaatgtaattagagtgaacattcaggttcattttattcaaaggtaatgtttctgcccttgaagttccatgtagaaaagggtccttggagttagaacactgtggaaggtgatataatttcacttggccctcggctatgtaaggtaaacattttacattattgcacagtaacaaaaatttacagccatagataacacaggatctgatcaacgttaacacacctgctgtttaaggcttacccacattggaaagcaatcatttccaggatggagatcaaatatcttaacacagtgtcacctgtgtgagttgctagaaaagacctctcatttaaaaatctgttcatagaacgtgctttcacatttttcagcctcttttcacttgtgtgctagacggaggcactttaagagctattaactgtagtctcaagagtacaagacattgagtttcttcagtcattggtaaatatggcaaggaattaaaatgaaattagattaaaaagaaagtaaaacaaatcactgaatcagaaaatttagccaaatcttgtaaaaatcactggtctctgatttaaagatccccccccgccaaaaaaaaaaaaattagtagctgtcactcatctgttgccagatgggtaaacactactacatcattctgatgttaaggtataacggttttgctgtttgggcgtgtaaacgtttgggcttgtaaatgttttaaaacattggcaaataaagtactttgaattatgtttcgagtagtgtttcaaagtatattatacacgggtttcaaatagaaaaactaaaaggtggaataaaacaatttggaagagtttagtaaagcgtataaaaattaaaggactaaaaaacccacttcattttaaatgtgtaaaaataaatcgcatccattcgtgggaatccagtgactttttccttttctttctttcttttttggttttagttagctggtacgtactgcaccctccacaacacgttggaaattaggtcctggtacacactaaggaatatccagccaggtaaatacatcagggtgatgaggcccataaaattgagcgggtagtgagaatagtcccaggaacaagccccgcacgtgcggagtcccagaccccaggacagctcccacacgtagatgaagatcacgtagatgggcacccgcttccaagtgccccaaccgcggctgtagtggaggtggaagtagagcttttccaccacgaaactgcagctgccgtacataaagaaggaccagagcgacgtgtggccgctggttgtcccgtccccctgccccagtacgttgaagaagaaggtgaagaagatctcatccagaaagccgtgcattccgaagaaaagaaagcggggtaggtcgggcagcccctggctgggggctcccccggcgcccctggggccacggggtcgtcgccgccgggctccggccgcagtagggacccgggcgccgggagggacggggagcgcgcccctccgctgctgctgctgctgctgctgctgctgttgctgctgccgccgcctctgtcgcccgtaccgcaagcgcaggaagcgcttcaggaacacttggcagtggtagagcgccagcacgtactgcagcgccaggtccagcgcccctggcgccaccgcgacccccgccccgccgcccaggctgagtagtagcgcctggcccgctagggtctgcagccccacgtgggccgaggggtagaggaggaaattga

SEQ ID NO: 97164 - DNA, 40710 bp, Homo sapiens
  misc_feature (1)...(40710): n = A,T,C or G
cctgacctcaggtgatccacctgcctcggcctcccaaagtgctgggattacagacatgagccaccatgcccagccgattctcctttttctaacgtctgcagtgtgtgttggtgcggcccccttttctttcctgattttgataacagataacagccatgttttatcagtcttgcaacaggtttttccattggattagcctttcaaaaaaaccaacttttgctgaattgtgcccccaaggttggaccaatctgacactcctccagcactgccggagagagcctgttttgcggggatggtgcggggagaagcccacctatcccgaacagaggttggagtgggcactctgctacccaaggccctggggtgtgaattgtggggaaagggaaaggtggatgggcgggtggctcagccgtcctcctgcctcatttctctccagggtgatgctgacagggacactgtctgaccggcagccggctgaactccacctcttccggaactacgatgctccagaaactgtccgggagcctcgtttcaaccagaacgttaacctcaggcctccagctcagccctcaggtttaaaccatgtttgatgcatccatgggaagcgactggcccgagaggctgtggggtggtgggtgggagtcgtgcacttgccatcaggcaccctcaccgtgccaccagcccacccgctgcactggtctttattggctgaggacagggattgcgggggagctgtcaggcccctggcaggttagaaaagtccctggaaagtcctcagctgtacctgccttccaccaggacgaactagccagagagtgtggcttcgtgggtcctgcttctgaagagttcccagcctcccctcttcccgcacccccagcccccaacacgcacaccctgagatctggagtgcatgggttttatgccagtcccttgtgccactgggccgccctccttccccgcccctagaccagctggtgtggcgggcggcccgaagcagcggggcagctcctacttacttccgacccaatgggcgcttcctggacggtgggctgctggccaacaaccccacgctggatgccatgaccgagatccatgagtacaatcaggacctgatccgcaaggtgagtgccgtaggccagagggcctggacccactgctccctggagccaatcctgtgtcagcaaaccatgctagggaccgacccccaggacagcaggtggcttttacacacgcactcattcatatgtgcacacagggcaaattgatctcactggaacctgttccatgggtgggatctgcctgaagcactgtgctaagggggatctgaggaccactgtgctctaagtgtgcatgagtggggagggcggcatgcataccatgaacgtgccactcgagccagcctggggacaggacacatgcttgcccttgagctcacctctgtggatagacagtcccacaggaatgcctgtccccacgggttgccggtgctgtggtggaggaccgtgaggcctctgctaaaaggcctgggggctcggaaagggctccatggaacaggggacccatcctgaggcccttggggacagagcagtgcagaatcagtgatctggaggaagagcagcagccctctctctgcagaggtacagcagaggctggcaggacccagcatgctaggggaggccctgtggcgtggcgggcggtgggtgaccggggtgggcgagcgcggtggctgagctcagaccctggagccagggcgcctctgggggtccccgttctgcctgcactcactgcagctacctaatggggccatcatagcgcctgcctggggaggctgcgaggccttggcatgctgttgtctgtgaaatgttcacagcactgccgggagcctgagctgcatccttgctgctgtggtttcccgaagccccagggcgtcctgggcagcgcagcagaggctctgggcagacagagaagcgccctctaggggccagatcgggcagggcgggcttcctgcaggcggcagagaccgtcagactgtcagacactagccagtctaactctcctattgcgtgcggatggggagcctgggacccagagtgggaggcatcacccaagatcatccagcaaatcggcagcagagcttgttcggaagcaaataagagaggcagcggccgggcgcagcggctcacgcctgtaatcccagcactttgggaggccgaggcaagtggatcatgaggtcaggagatcgagaccatcctggctaacacggtgaaaccctgtctctactaaaaatacaaaaaaattagccaggcgggcatagtggcaggagcctgtagtcccagctactcgggatgctgaggcaggagaatggtgtgaacccaggaggcggagcttgcagtgagccgagatcgcgccactgcactccagactgggagacagagcgagactccgtctcaaaaaaaaaaaaaaaaaggcagcacccagggctcaggttcaagccttagcccctacttccctaccacgtggcccctgcagctgcttcccggcctgagcttcgctgagagccctcatttgcaaactgggtgatcagtgccctctccacagactggctggagattaaatgaagtaatgatgcaaatacctggcaaatcaccaacaccaaggaacaccgtctgcctttcctcccctggccacgacttgacttgggccagcatcagatggggtgggcgggatccttcttgcagctggtgtatgtgtggtcctgttggtacacagatgctgtcctgagcagatggcatgtgatgcccgcaccagccgttctggggtcacgtgcaagaggctggctggaaatcatgccaggcatgctcttgccaccagagacctcttgccctgttctcatgtgccccagagcccagtcttgggcctccccttgacgctccccttcgtgccccctacctgtggaaggtctcttctgactgcccctgtcctgttcccaacagggtcaggccaacaaggtgaagaaactctccatcgttgtctccctggggacagggaggtccccacaagtgcctgtgacctgtgtggatgtcttccgtcccagcaacccctgggagctggccaagactgtttttggggccaaggaactgggcaagatggtggtggactgtgtgagtgtgggcccctcccccaggccacttccctcagggtctgtagcccaggtcgatggcttcccctcatcctgtggggcctttggtgttggaggagacagcagggctctgtccatcgcctttagccagctggagggagagagagtccacagttcagagtctcagtgcggggcagggaccctcagtgaccaccagcaggggggttttcaaacgctttttagctgcggatccctttctgcaaacatagcgcagtgtagaagcccagaatggacaaaggctccagagcgggctgggcgctcaccctgtaatcccagcactttgggaggccaaggcaggcggaccacttgagcacagcagtttgagaccagcctgagcaatataatgagactttgtctctaccaaaaaattaaaaactagctggacatggtggtgtgtgcctgtggtcccagctactcaggaggctgaggtgggaggattgcttaagcccaagaggcagaggctgcagtgagctgtgatcatgccactgcactccagcctgagcaacagaaggagaccttgtctcaaaaagaaagaaagaaagagagagagagagagagaggagggagggagggaaacttcagggagaggggacatggaggcctgtcgactcagccgctaccctttcccccactcatcatccctgaaagggcactgctgagacctctgcccctctgattgcacagctgggacagtccctgcagtcccaggaaggggttttgcccgagccgctctgctgctgtgtggctcagcctgactcgaaagagcctggggctccccaggctggggctccgagagtgcagggcagggccgggcggggtgcgggccgggcggggtgtgggcccggcactcaccaaggctgcttctcaccagtgcacggatccagacgggcgggctgtggaccgggcacgggcctggtgcgagatggtcggcatccagtacttcaggtgagggctcagccgccccagcccttggccccgtgccctggcgtggtcggactcaccgaccttcccctcccagccctagtgtggactttcccttccccaagggtctgctctgttccccaagcccaccctggtcctagctggcgtcccctgcccagcctgagcatcctagggtgaccccctcctccctggcccgaacagattgaacccccagctggggacggacatcatgctggatgaggtcagtgacacagtgctggtcaacgccctctgggagaccgaggtctacatctatgagcaccgcgaggagttccagaagctcatccagctgctgctctcaccctgagggtccccagcctctcaccggccccagctgacctcgtccattcagcccctgccaggccaagcccagccactgccctcccgggcagatctgggcccaggcacctctgagtccatagaccaggcctgggagaatgccaagctgcctgcccgaggctggtcctgaaggcctgtctcccactaaccccgccttccagcactttctgtcattccaggctgggaaagtctagagccccctttggcccctttccctgactgtcaaggacaactgactcccccatcagctcaaacattaagggtacccgggcacaaccgtacccctgcccccagccccagcctccctgagggcctgccgggctgcctctgccccagcccccagcaagggcactcccaggcttcctggtgggtgcagcccactccctctgccctctgctccgttccctgggggctgggactaaagaaatgggtgtcccccaccccatcagctgggaaagcccaggccgcaggagtgggatgcccgttggactttgcccctcacactggcccagcccctcacactgccccaccccgagaaccctcagctctcaaaggtcactcctgggagtttcttcttcccaatggaagtggcttaagagccaaaactgaaataaatcatttggattcaagttcacctgtgttgtgtgtgcagtggtgtgagatccacctgttcccctgacccccggctcccctcggccttgacccttggccttgaccggacttttcctttgtacccggacactctgttttccaggatccctgggcagggacacctcctctttcctctaggcctcccctaaaccggcccttagggtatgcagaggcagctgccaggcccacatacccccggcaggcccaaggagggccacaatcttcaacttcatcttggaggaccagggagagccccatttgtcacccagagaggccggggactccgcgtggacaggcagcgcgtgtgcagggccgaggtctgcccagggctgggcaactccagcgtttgtgctgctcctgctccggcaagtggaggagctgggcgggccagagcggctgtgggagccaagctcagagggcgtggccccactgtgagccgcaggcctgaggacagtgagaagtaaagcggcgttcccctccaggggctgctgctgctgggtctggcagagagagtcctgggggagggcatcgggcagcgcccgcccagtaaggtgggcaatgcctggtataggcaggtgggagggcggggccccccagggttggggtccttgaggagggggtgacccaggagggggctcatccacatgggcacttgtatcagcccacagctccaaggggtgaataattgaagggcaggtcacacgagcctgcccggcacaggatgccttccctgccggatctggttacgccccagatcacattctgacatcccgagttggtgaataattaagctgccactcctctgaggcaggcctccatctccaggtccctctccgaggcttcctcgctgccagctgagtcgtgggcacctgagggactacctaccactgctcccggctgtgccatcgccaccagctcccagcctcctgctcagacccgggacagcccctccatggcccccgagatggaccagttytacaggtccaccatggccatctacaaggtgagcacatgggtggccaagccaggcctgagcccctcctcccagggcacagaaatcaggcccgctctggaggacggagggccagccggggctacagatgtcctggaaagggaagcctggagccaggctgggccaggggtgggtacgggggtaaggatccccgagagcactcagccatacagcgggaacccccaactcccagatgctggacaaggcaggagggagcccaaggcccagggtggggagagttgagtctggatgagaagggcctggctgcccggcctgggaataaagaaagaccctccctctctctctctgtctctccctctctctctctctctctctctctctctccctctctctctccctctctctgtctctctctctctctstctctctctctctctgtctctctctctctctctgtctctctctctctctctctctctctctctctctctctctctctctctctctctctctctctctctctctctctctctctctctctctctctctctctctctctctctctctctctctctctctctctctctctctctctctctctctnnnnnnnnnnnnnnnnnnnnnnnnnnnnnnnnnnnnnnnnnnnnnnnnnnnnnnnnnnnnnnnnnnnnnnnnnnnnnnnnnnnnnnnnnnnnnnnnnnnnnnnnnnnnnnnnnnnnnnnnnnnnnnnnnnnnnnnnnnnnnnnnnnnnnnnnnnnnnnnnnnnnnnnnnnnnnnnnnnnnnnnnnnnnnnnnnnnnnnnnnnnnnnnnnnnnnnnnnnnnnnnnnnnnnnnnnnnnnnnnnnnnnnnnnnnnnnnnnnnnnnnnnnnnnnnnnnnnnnnnnnnnnnnnnnnnnnnnnnnnnnnnnnnnnnnnnnnnnnnnnnnnnnnnnnnnnnnnnnnnnnnnnnnnnnnnnnnnnnnnnnnnnnnnnnnnnnnnnnnnnnnnnnnnnnnnnnnnnnnnnnnnnnnnnnnnnnnnnnnnnnnnnnnnnnnnnnnnnnnnnnnnnnnnnnnnnnnnnnnnnnnnnnnnnnnnnnnnnnnnnnnnnnnnnnnnnnnnnnnnnnnnnnnnnnnnnnnnnnnnnnnnnnnnnnnnnnnnnnnnnnnnnnnnnnnnnnnnnnnnnnnnnnnnnnnnnnnnnnnnnnnnnnnnnnnnnnnnnnnnnnnnnnnnnnnnnnnnnnnnnnnnnnnnnnnnnnnnnnnnnnnnnnnnnnnnnnnnnnnnnnnnnnnnnnnnnnnnnnnnnnnnnnnnnnnnnnnnnnnnnnnnnnnnnnnnnnnnnnnnnnnnnnnnnnnnnnnnnnnnnnnnnnnnnnnnnnnnnnnnnnnnnnnnnnnnnnnnnnnnnnnnnnnnnnnnnnnnnnnnnnnnnnnnnnnnnnnnnnnnnnnnnnnnnnnnnnnnnnnnnnnnnnnnnnnnnnnnnnnnnnnnnnnnnnnnnnnnnnnnnnnnnnnnnnnnnnnnnnnnnnnnnnnnnnnnnnnnnnnnnnnnnnnnnnnnnnnnnnnnnnnnnnnnnnnnnnnnnnnnnnnnnnnnnnnnnnnnnnnnnnnnnnnnnnnnnnnnnnnnnnnnnnnnnnnnnnnnnnnnnnnnnnnnnnnnnnnnnnnnnnnnnnnnnnnnnnnnnnnnnnnnnnnnnnnnnnnnnnnnnnnnnnnnnnnnnnnnnnnnnnnnnnnnnnnnnnnnnnnnnnnnnnnnnnnnnnnnnnnnnnnnnnnnnnnnnnnnnnnnnnnnnnnnnnnnnnnnnnnnnnnnnnnnnnnnnnnnnnnnnnnnnnnnnnnnnnnnnnnnnnnnnnnnnnnnnnnnnnnnnnnnnnnnnnnnnnnnnnnnnnnnnnnnnnnnnnnnnnnnnnnnnnnnnnnnnnnnnnnnnnnnnnnnnnnnnnnnnnnnnnnnnnnnnnnnnnnnnnnnnnnnnnnnnnnnnnnnnnnnnnnnnnnnnnnnnnnnnnnnnnnnnnnnnnnnnnnnnnnnnnnnnnnnnnnnnnnnnnnnnnnnnnnnnnnnnnnnnnnnnnnnnnnnnnnnnnnnnnnnnnnnnnnnnnnnnnnnnnnnnnnnnnnnnnnnnnnnnnnnnnnnnnnnnnnnnnnnnnnnnnnnnnnnnnnnnnnnnnnnnnnnnnnnnnnnnnnnnnnnnnnnnnnnnnnnnnnnnnnnnnnnnnnnnnnnnnnnnnnnnnnnnnnnnnnnnnnnnnnnnnnnnnnnnnnnnnnnnnnnnnnnnnnnnnnnnnnnnnnnnnnnnnnnnnnnnnnnnnnnnnnnnnnnnnnnnnnnnnnnnnnnnnnnnnnnnnnnnnnnnnnnnnnnnnnnnnnnnnnnnnnnnnnnnnnnnnnnnnnnnnnnnnnnnnnnnnnnnnnnnnnnnnnnnnnnnnnnnnnnnnnnnnnnnnnnnnnnnnnnnnnnnnnnnnnnnnnnnnnnnnnnnnnnnnnnnnnnnnnnnnnnnnnnnnnnnnnnnnnnnnnnnnnnnnnnnnnnnnnnnnnnnnnnnnnnnnnnnnnnnnnnnnnnnnnnnnnnnnnnnnnnnnnnnnnnnnnnnnnnnnnnnnnnnnnnnnnnnnnnnnnnnnnnnnnnnnnnnnnnnnnnnnnnnnnnnnnnnnnnnnnnnnnnnnnnnnnnnnnnnnnnnnnnnnnnnnnnnnnnnnnnnnnnnnnnnnnnnnnnnnnnnnnnnnnnnnnnnnnnnnnnnnnnnnnnnnnnnnnnnnnnnnnnnnnnnnnnnnnnnnnnnnnnnnnnnnnnnnnnnnnnnnnnnnnnnnnnnnnnnnnnnnnnnnnnnnnnnnnnnnnnnnnnnnnnnnnnnnnnnnnnnnnnnnnnnnnnnnnnnnnnnnnnnnnnnnnnnnnnnnnnnnnnnnnnnnnnnnnnnnnnnnnnnnnnnnnnnnnnnnnnnnnnnnnnnnnnnnnnnnnnnnnnnnnnnnnnnnnnnnnnnnnnnnnnnnnnnnnnnnnnnnnnnnnnnnnnnnnnnnnnnnnnnnnnnnnnnnnnnnnnnnnnnnnnnnnnnnnnnnnnnnnnnnnnnnnnnnnnnnnnnnnnnnnnnnnnnnnnnnnnnnnnnnnnnnnnnnnnnnnnnnnnnnnnnnnnnnnnnnnnnnnnnnnnnnnnnnnnnnnnnnnnnnnnnnnnnnnnnnnnnnnnnnnnnnnnctctgtctctgtctctgtctctgtgtctctctctgtctctgtctctgtctctccctgtctctgtctctgtctctgtctctctgtctctgtgtctctgtctctccctgtctccctgtctctgtctctctgtctctgtctctgtctctctccgtgtctctgtctctctgtctctgtctctgtctctgtctctgtgtgtctctctgtctctgtctctccctgtctctgtctctctgtctctgtctctctgtctctgtgtctctgtctctccctgtctctgtctctctcatttctgagcccctcagacttcctacttcacccccggggggttgttgcagccgccacagacatttattgagcgcctcctgtgtgcaggaccctttcacctggaggcctcacaccacccacctgtgaggtggaaaatgaccaccctgcttgatagatgagaaaactgagaccaaagaggttaaacagctcattcaaggtcacggagggaggaagaggtgctgctgggatttgaaccgagacccaagtccaagtccaggcccaagtccaggcccgtcttcaccatccrgggagctctctgcccggccccagcccgaggaggcccacactaatccagccacagccttgcccatggggggctgttctcggaggagggcgagagctgcccttgccccgggggtgactgttggcagccccaggcgtgtagcccggcaaggcctggacacagggcagggctgagccgtgcccagtggggaccacagcaggcgggccagcttctgcccagcgggaggaggagaaccttccaggtgcaccatctcgggaggcacctcggtcccgccagagcagacgtaagcgggagctggctgtgaggggaccacagcttagaacaggaccccaaaagatgggctctgaggtccctgcagccaagagccaggattctgggtgagcctaggtttgyagatgggcyccccaaagtctggggcttctcactgggctgggggtgccctgtccctgacgcctggtgacttgactccatccgtggttccttctcgctcccccatctctacacctttttcctcccctgaccctggggtccagagcatcatggagcagtttaaccccgccctggagaacctggtgtacctgggcaacaactacctgcgtgccttccacggtgagtgcctgcccgggccaccgagccccagccctgggcytctgctgttcccacccacccaggcccctcccagattctctgcatcccacacctgttcatcctcaaccctacaccctcctacccaccaccctcaccctcacacctctgcagccagagaggccttatgcacccccactctcctgtgcccacgcaccccagtccacacccagcacccctcattgccccctccttcaggtgcctccagacactcccatgatgcagtaccaggccctgcaggcccacacagccccagggcagcccctgacagtgcatacatttctaggcgtcacctggatgccaccagctgaacccacccctatactcagtcccacctctgcacccaggctcacacagcagctggcttcctcacttcaactggccaccacccacacaccctgcagctggccttgacattcactcggtccccgtgcaaacccttgtacccgtccgctgtggccgctcatacctgccaatagcaccccactacccaccagtgctgatcaaccctgaacctcagggcctcccatccccctgcttcttagatgctttccacgccacctccctgcccccagccctcaccttatgcccctgcacctgagtttcacagctcaactggtcacaccctcctcaggggcacacacagatgcccacaccccacccaggacagacacagtcccctccagatgaaaagagcctccagaagggtggggcagaggcagggctggaccggacctgtcccttctggtccacagctctgtccgaggcggccgaggtctacttcagtgccatccagaagattggggagcgtgccctgcagagccccacctcacagattctgggtgaggctccccctccacagcagaccccattcttgggccctccttttgcacccttgcccttccaggatgtcccgagtccctgacacaggcctttcagcccagggcccagagccagactcttgttctggggcccaggctccccgccaccactccctgccgggctgctcccaggctgggacacacatggcctggctcccagagaaccatatgggaagttcccggactttggtcccaaaatccagtctcgggcaggccctctgttggctttcagcggaagagggtggtgggtgggcagggcaggctgccacacaccaaagccacagctgcatccatgcctccaggggagatcttggtgcagatgtctgacacccagcggcacttgaactctgacctggaggtggtggtgagtatcagaccccagggcctggaggggtcactcgaggaaagtgggctatgttccaaggagagggcccagcctaccagatgcccttcccagggaggatgaccgtggctgcccttcccagcacccggctctgtggggcacggttccctgcaatagtcgttcaagcctctagcagccctaggaggctggtggcatttctgcctccattttatagaggaagaaactgagtctcaaagagctagtcattgcctgagatgccagagtgaatggaggcccaaggaagagaaaggtcctttcactgcagccctcctcactgcagcctcccagggagcagccacatggacctgaccatgtcactcccaggagcagaaccgttccayggccccactgcccgtagaactgaacacaggcttctcagtgaggggtccctggctctgtcgatccagcagcttctcctgacacccccaacacagcccagccccccggaagagtgggccctctgctggtgtccccgctgcggggctgctgtcctgctgtcctctcagcctagagccaccggtccctccccctgccgtccagttgggaagcagctgtcccctccttcccaaagcctcctctgactccctggggcaagtccagtcacccctccccctggactccaacagatgattctgtccgttcttagctcgtggtgggttcaaagcccagcttcaccagtgactagttttgtgaccttggactctatgcctccacttacctatctgaggaatggagagaatcataataactgcctcccagggttcttgagaggatgacgtgaattaataagcataaaccgtttgccctggcccctacttactgcccctggataccttagctatgataaccagaagttaactcacctgcccctatccctcccaagactgggagcrccgcagagccttccttcctctccgtagctccagggccttccgccaagcagggcttcagtgacacaggggaaagaaaagagctgagggagtcagcttggctasatggagagaagagagggctttccaagggagcatggcagcgggctgcgcacagccatgagcgggcagcaggcaggcatgagccagggcttgggcgcaggggctgagtgggagaggtggggtggggcctggtggtgaggcaagtgggaaggttcggaaggaaattttaactaattgttctccctccaatgtgtgaaggggagcccctggaagtcagggtgctctttgggggataccataaaatactagtcagttgggcatggggaacaatctttttttttttttttttttaatttttttgagacggagtcttgctctgtcgtccaggctggagtgcagtgtcacaatctcagctcactgcaacctccgcctcctgggttcatgccattcccctgcctcagcctcccgagcggctgggattacaggcacctgtcatcatgcctggctaatttttttatttttttgcagagacggggtttcaccatgttggccaggctggtcttgaactcctgacctcaagtgatctgcccgcctcggcctcccaaagtgctgggattacagccgtgagccaccgcgcctggcgggggaacaatctttctattagtaaatgcacatcccacgcacacacaacaaggccccaaggcccctgggctccgtggactccttgggcactttaggatgtagcattaagcccctgccacccccttggatgtgggcacggagttatggagcctgtgggttcctgtccttgtgttcaatggctgtccttgtcacttgtggcacacctgggctgggcagggatgagtgtcacccaggcccactctgtaaggagagctgtcctctccaggcagtggcatctcagctgtgataactgggcaggtccactggccagaatcataccagacagaacagtgccagaggccacccccacctgcagctcatttatttgatccctactgactgccctgtgccaggcactgtggtaggccgcgggaatacagcagacaaaaacccctgccatgccaaagagggagccagaaaaacccacagtgagtaagtgaatcgatacgtaacacgttccatgcaaaatacactaggagaaaagtagagcagggaggggatgtctttggggggtgcagtttttaacagacgaggtgacactgaaaaaggcctaaaggtcccggcgcagtggctcacgcttgtaatcccagcactttgggaggccgaggtgggcggatcacctgaggtcaggagttcgagactaacctggccaacatggtgaaaccttgtctctactaaaaatacaaaaaattagccgcgcatgtggtggcgggcgcctgtaatcccagctactcgggaggctgaggcaggagaatcgcttgaacctgggaagcggaggttgcagtgagcagagatcgcaccacagcactccagcctgggtgacggtgagactctgtctcaaaaaaaaaaaaaaaraaaagaaaagaaaaagggctgaaggaggtaagggcattagccaggaatacatctgggggaagggcaatctggacagaaaggacagcttgtggaaagaccgaaggctgcagtagagggcaagtctcagatgaccagccattaacaggtcctgactctgcaggccctggcgggactctggcccttcctctcagtgaaagggacaccttcggagggtcttgagccaaggagggacaggatctgacttagaatgttttaaaaaatgtttgttattgtaaactaaaacacaggcacagaaaatcttgctgaacagattagagcgtaatgaatcattattaggcaaaccagacctgaaactaccatgcagaactttgccagcctccccagaaaccccttcaggtgcccccatcaaaaccacagcctctccctccctctaaaagcggccgctggtctgaggtcgcatttccttgtgtgccttcgtggtttatcactctaccttacagcctgagacactagaatttggtttcactcttaaaaaaaaaaaaatttttggctgggtgtggtggctcacgcctgtaatcccagcactttgggaggccaaggcaggcggatcacgaggtcaggaaatcaagaccatcctggctaacacggtgagaccccatctttactaaaaatacaaaacaattagccgggcatggtggtgggcgcctgtagtcccagctactcgggaggctgaggcaggagaatggcgtgaacccrggaggcggagcttgcagtgagccgagatcgcgccactgcactccagcctgggcgacagagcaatactccgtctcaaaaaaaaaaaaaaaaagaaatttgagtctcttcgaacctmcgggttccccttccgtctgtttcttttccttacactttgtctgttggagaccctgggaccatctgctctgactttcccatagtctggaagttgctgakgatgctctcctagtatgttcagctggtttctctgtcctctggatccggagccttgcccttggcaagaccagaggggctactgagttcttccaccaggaggcatcactgtgtctagatctgccatgcatccggggatacacaccactgttcctcccatgccttttcaaagcattcttagctaggatgcttccagaaagagacccttccccttatctgctattattacccactggcacgtttcatatggagagggcaggagaaaggtttcattcattccctttattcatcaggttccaagataatgaatttgtgccctgtcatcctctgaaggtgaagccaccaattaactttatgtttttactaacaccattatgtagtacttttatttactataatcaatatcgtagatttaaactcatttgacctatttcaatggttggcaattattacgtttactgaagttgaaaatgtcctatttttggccagtggaagcttcttttttttttttttttgacatggagtctcaccctgtcaccgaggctggagtacagtgatgcaatctcggctcactgcaacgtccgcctcccaggttcaagcaattctccagcctcagcctcccatgtagctgggactacaggtatgcaacactgcatctagctaatgttcatatttttagtagagacggggtttcaccttgttggccaggctgatctcgaactcctaacctcagatgatctgcccagtttagcctcccaaagttctgggattataggtgtgagccactgcacctggccattggaagcctctttaatctgcctcctgagtccttgctatctgcctgacaagaggttccaggcttatctgctacttgtgctgtgtgagacatggaatgagccatttcttcatgaagccctgtttttactttttgtttttagtgcaagtggtatttcaaagccataatctgaatactagtggtgctcattgccactggcttgatctttgtttctaggcttttttggtggctgtgcaacgcatagatggatacatatttatatgcaatgtgtgtgtacacacatataacacatattctctcgctctgtctctttatttctattgctgctggacaaattcatcttatttatttatttatttattttcagaggcagagtctcactctgtcacccaggctgaagtgcagtggtacaatcatagctcattgcagtctccaactcctgggctcaaatgatcttcctgcctcagcctcccaagtagctgggactataagaaaatgccaccgtgcctggctaatttttttttttttttaattttgagatggagtgtcactctgtctcccaggctggagtgcagtggtgtgatatcggctcactgcaagctcygcctcccaggttcacgccattctcctgcctcagcctcccgagtagctgggaccacaggcgcctgccaccatgccgggctaattttttttttttggtatgttyagtagagacgggatttcaccgtgttagccaggatggtcttgatatcctgacctcgtgatccacccgccttggtctcccagagtgctgggattacaggtgtgagccaccgcacccggccgtgcctggataatttttaaactctttttatagagatgaggtctcactatgttgcccaggctggtcttgaactcctggcctcaagcagtcctcccatctgggcctcccaaagtgctaggatcacttttagaccattgattcattttcttctgtttcatgggcctttctggtgtgttttggttgtcagtaggaatgttattctcttccatattctcttttttctaataataactttctattggatttcacctcagagattgtctgtggaaaagtaggttttttcctgaaattgtaaaaggagcacagtcaagacagctcttctcactttgcaagatctctttctgttgttcttatgtagttttccaaaaatatggcagctccctttctgcaatttcctggttccgttcatgctcctacttttgttagactttctctttccttttgtgtctgttgtccttgttcctgattttgatcctcctcacggcattctctcctccacatgggccctgtctggatgggagcctggctggtcagtttcaagacttcctagaggctcgactactccagccccttcagactttaccagggacctcttaccttcaccctttggactcacaaactccttggagtttcagctgctgttcacagactggcctactgagcttcccatgaccatctgctggccatgtcggggtgcacctgtgctcaggtccctcaacgcccagctacctcccactgctccatccacatggatgctggtcacactgacctcacagccggtgctgatttttgtttggagggttgtagagatatactgtcatagttttgttctgaatgttgtcttgagtttatttttttcttttggtggttttgtttgttttgttttgtttgtttgtttgttttttgagacggaatcttgctctgtcacccaggctggagtgcaatggcgccatctcagctcactgcaacctctgcctcccgggttcaagcgattctcctgcctcagcctcccaaatagctgggattataggcgcgtgccaccatgctcggctaatttatgtacttttagtagagatggggtttcactatgttggccaggctggtctcaaactcctgacctcaggtgatccacacaccttggccttccaaagtgctgtgattacaggcatgagccactgtgcctggactttttttttttttttttttttttttgagacaggatctcactgtgtcacccaggctggagtacagtggtgcagtcacagctcattgcagcctagacttcctgggctcgggcaatcctctcacctcagcctcccaagtagctaggaccacaggcatgaaccaccacgtctggctttttttttttttttttttttttttttttatgtagagacagcatcttactatgttgcccaggctggtctggaactcttgggctcgagcaatcctcccacctcagcctcccaaagtgctggaattacaggtgtgagccactgtgcctggctagtcttaagttttttattttgctgtctggtttctccattcatttttaggagaagatgaaggaaggttttgaaactacattttatttccaccatcatcccagacctgagtttttttttctactgaggtaaagtttacatacaataagatgaagttcctaaatatgttgagtgttaagttcaacagattttgacaattgtatgccctgtgtggccaccatgttaaacaggatttatttagaacgtttccatcaacccagaaagttctcttatgtcccttttgtcagtgtcgccccctaggggcaaaggctttctgacttctatctctgcagatgaattttgcctgttctagtgcttcgtttgagtggaactgtgccctgtatattcttttgtgtctagcttctttcactcagcataaggtctgtaagattaattcatgttgttgcattgtatgaatctgtttgtgtcactatcaaggaatacctgagactgggtaatttataaggaaaagaggtatattttggctcatggttctgcaaactgtacaagcatggcaccaacatctacttagcttctcatgagggcctcaggaggcttacaatcatggcggaaggtgaaggggtaacaggtgcgtcacatggcaagacagcaagagagagagtggggaggtgctaagctttatttatttatttatttatttatttatttatttatttatttattgagacggagttccactctgttgcccaggctggcatgcagtggtgcgatctcggctcactgcaacctccgccccctagggttcaagcgattctcctgcctcagcctcccgagtagctgggattacaggcagccgccaccaggcccagctgatttttttatttttagtagagacggggtttcagcatgttggccaggctggtcacaagctcggcctcccaaagtgctgggattgcaggtgtgagccaccacgcctggcctgagttcacaaaatttaaggaggcagtgctgtgacattcacactagcgcagggtcgggaaggcttccttttgattggatccagcggaaagcggcccctcagaagcatctacctggcatttctataacaacgcacgtttctgttcaccgttgtatcactctggaaacctacgtgccacttccttcttggtgctgacacccttctctacacacacactggcagccatagctcagggtttcagtaccaaagaggcaccctcaagctcccttgcagactagtgggcaccaaagtttgggaaataactgtgggagaaaaccttaaactttagaaattttattatgtagtgatttttttctgcatattgggaggagattgccagcattccttttctgggcgatcccctagccccgtgggatgatgtgaggacacctagagcaggaggaaggacccactgtgggaaaagggtgtgtggacagaggctgcgcagaggcgggagggcctccagaggaggacgtgtccgcggggttggggaagcacctcttgtgtcccatgcagcctgaaccctcctgcagctggaagggtttaggtccaactgcccaacaacatggagtgactcagagaaagctgatggagaatacagggtaccagggcatcacctgggcccacagaatcgaagctcatcaagctctcagagagcagctggtcaagcctttcctttttctttttttttttcttttgagacagagtttcactctgtcacccaggctggagtgcagtggcgtgatctccgctcactacaacctccgcctccctggttcaagtgattctcctgcctcagcctcctgagtagctgggattacaggcaygcaccaccatgcctggctgatttttgcatttttagtagagatggggtttcaccatgttggccaggctggtctcgaactcctggcctcaggtgatccacccacctcagcctcccaaagtgctgggattacaggcgtaagccaccatgcccaggctggtcaagcctttcctgttacagatggggcaactgaggcccagagatgggtggcaacttgtccaaagtcacaaagcaaataggaggcagaactagaatgaggacgaagcttctgagcctgagcccagcagcctttcctgtcctgccccggtggccagacatccacttgccatgggaacctgtcacctcccaggcccatctgagacctcaacagcttctgagtgtttttgctgggctgtgccctgcccrtggtgctgaggacacagaggtgagccatggccatagcagctccaaggggctatgcatggggccctggccataaattctgtatacaactggaggaatggacaacgaaggaacaaatgtgcacccattccagagacaaaacgagggagcaatggattctgcttgggaaagtcaggaagacaggaagctggcactggaagatagggaggaaattccaggcagagggaatgatgtcatcaaagcacaaactaagaataagacaaaaaataagaaccagaagactctgacacacttatcaagggttcgtttccaggcagcactgcactaaacattgtgaatgtttaaccatttcgtcctccctccagccaggtggtgttcttgtctccgtttctctgacaggtgggcaggtgcctggtatattaggagcacgatgggcagtctgttatagcagaaagtgcaagggggtgctggggcctgggaacagtaggggggccttgatcaccctcaccctgcactccgctcaggtgcagacattccatggaggcctgctgcagcacatggagaagaacaccaagctggacatgcagttcatcaaagtgagtctggcctccccactcggcccccaactcactgcaggcaggaccccctctcccatttgacaggtaggcacacacaggccagtgctgagcactgactgggccccagattatccatgttcccagctgagccccaagtctccaaacttccagggccctgatctctgggaggggtgtcttgagctctctgatgtggggggattctccctccccgactccaccctaccccaggacagccgccagcactatgagctcgagtaccgccaccgagcggccaacctggagaagtgcatgtctgagctgtggcgcatggagcgcaagagagacaagaacgtgcgggagatgaaggtgcgagggccgggaagcgggggtgggccaggaagggcgggtgggcagaccgggccctgggaaccccgaacgcctccctgagctcccccaccgagcaccagcccaactgtgatgagcgtggctggggaggtcagccagcccctggtggggtgggcgtaactagctcctagggccacgcccagcaccgccccttgccctgtggcttactggccttacccagaatccccgggcctctcctgcaaacccatcccacctcccccatctcctacttcaccgagaaaattgctcgcttgaacatggtgccaaaggtgtcatccaccagccgcccatcctcctcccctctctcctgcctggcagaggtatcccgcccccggctagggccattccccttcctgagcctggggccccatccctggcctctgtctccaagatccaaacccatggattaaccctctgcctcccttcccgtctcttctggctcctttaagtgagctcacgcctcccctcctcagaatcttccccccaagtaggggctattaacctactcattcatattctcattaaacccgtccccctgcccccccagcccgtgcttgggcttgtgctgggtgccagggacagagcgaaggctcagacagcagccctgcttgtgagaagcacctgggagagggagacgcagggcccagactcataacaaggctgctgatgatggggcaggctcaggagctaggatgggccgggtgatggggggtgggcttggggagagggcagtcaggaagaacagggggcttgaacagctggcgcctgtgggcgaggggggtgggatgagacacacccaccgcccccagccagaactcccgttccccccaggagagtgtgaaccggctgcacgcacagatgcaggccttcgtgtctgagagtcagcgggcggctgaattggaagagaagcggcgctatcgcttcctagcagagaagcacctgctactttccaacaccttcctgcagttcttcggccgggtgagttggactggggggcagcaagcggggcgcttctaggagctgccccctcctgagtggccgtacatagaggtttccctcccttcttccctcttccctccctgcctgcctgtctgtagaaattcattttattttgctatctccatccatttcttyctttgtttctgggtttgcttgtatcactgtatattcactcatttattcactcgtgatattgtttgtttttaatgcattcacgaattcatgcatttatttattcatgtgtggaycattttttaattcctgtttgtatattctcacaattcacaaattcattgataggtgtgctcagttatcgtctattaattttatcatattatttatttatttattttttgagacagagtttcactcttgttgcccaggctggagtgcaacggcacaatctcggctcactgcaacctctccctcccgggttcaagcgattctcctgcctcagcctcccgagtagctgggactacaggcatgtgctatcacgcccggctaatttttgtatttttagtagagacggggtttcgccatgttggccaggctgatctcaaactcctgacctcaagcgatctgcctgcttcggcctcccaaagtgctgcgattacaggcatgagctaccatacccagccattttatcatattatttaaatcctctatgctcttgcattgttctgtctgctagactagtcagactctctcatctctcattggatttctaatagatttcactttctgaattgagctgccatgttgtttggcgttttttggctataactattctaccttctttgtaaatattgccatttatgtacttaatgtctctcttaagtttgatgcttttaattccgccttgtctgatattaatactgctctattttctcttctctttgcttatctctttgtatgttaagtatactttctgttactgacttttgagtttttgaccagtcttacagtctgtgtcttctaatagaaaaggaattcagcccattcccatttaacataataatgaagatacctgggttttattccttttagataacttgagctaactgtatttactttgtcatttcctctttttctcccacactatttcttgtcagtttggttgagttattatactatacattccccttttccctttattaatttagaaattgcactatttttttctctctacctgtggtgacctcactttgtgactttcataatcacatatatatccacctattttccaaaaatgccaacttcaccctactacagacacacactgttcagtccatcgctccgccaattcataagatgagaccttgatttaaagctttccacaaaaattaggctgggcgcggtggctcacaccagtaaccccaacactttgggagcgcgaggtgggtggatcgcttgaggtcaggagttcgagaccagcctggccaacatggcgaaaccccgtttctactaaaaatacaaaaattagctgggcgtggtggcaggcacttgtaatcccagctactcaggaggctgaggcaggagcattgcttgaacctgggaggcagaagttgtagtgagccaaaatcaagccactgcactccagtctgggcgacagagtgagactaagtctcaaaaaaaaagatgagataataccttaagaagtattttcctgccctccaactattctgaggtggggcctttggaaagcttttactcctgtcttcatccttcccatcctccacttcctggttttgccaagatagtttaggacttagtttcagacctcactagtcatctctgcagcatgacccttgtattttgataaactgattttatttatgtgtgtatgtatttatttattttgagacggagtcttgctctgttgcccaggctggagtgcagtggcgcaatctcagctccctgcaacctccacctcccaggttcaagtgattctcctgcctcagcctcccaagtgctgggattacaggtgtgcgccaccatgcccagctaatttttgtatttttagtagagacagggtttcaccatgttrgccagggtggtctcgaactcctgacctcaggtgatccacctgcctcggcctcccaaagtgctggcattacaggcatgagccaccacgcccggtcctggcttggggttcttatccctcccacgcctcccacgcctcccacgccctccccgagtctctggatctgaacccacgggcccagggatacatgactggatccaaagacccagatttcggctcaggctctcatctgcccactgtcaccgcctcacccggccccaggctcagccttctcgtcccctgctatcccacaaaaggtctgccagggagaaacaacttccttttttgaaaaacagttttattgagatataattcacatacgattcacccatttacagtgtacactttctggtttgtagtatattcacagagtcatgcatccatcaccactatcaagcttaaaatattttcaataccctccaccacagtaacccagtacctcggccaggcgcggtggctcacacctgtaatcccagcactgtgggaggccgaggcgggtggatcacctgaggacaggagttcgaggccaccctggccaacatggtgaaaacccgtctctactaaaaatacaaaagttagccaagcgtggttgtacatgcctgtaatcccagctacacaggaggctgagacaggagaactgcttgaacccaggaggtggaggttgcagtgagccaagattgcaccactgcactccggcctggacaagagcgaaattccgtctcaaaaaaaaaatacaaaccggtaccccttagctgtcattcccaatcctcccactcccccagccccaggccaccaggaatctactttctgtctcaatacatttgcccattctggacatttcatataaacagaatcatacaatgtgtgtgctcttttgcractggcttccttttcactgctggataatattccattgcttggatacaccacattgtatttactcgtttactcgatgtatttactcagatgttagctgatggacgcctggttgtttccactctttggctgtcatgaccactgctgcgctgagcatccatgtacgagtcttcatgtggacatatgttttcatctctcttgggtatataagagtagaattgtggggccatatggtaactctatgtttaactgtttgtggaacttccagaccgttttccggagtgtttccgtgtccatcagcagtttatgagggttccagttgtttcacgtcctcgctactatttgttactgtctttttgataatagccatcctagcaggtgtgaagcgatatctgattgcaatattgatttccggttcccagatggctagtgatgttaaacatgttttcctgtgcttcttagctatttatagatcttctttggaaggaaactctttttcamctgtgttaaactcctttttgcctgtaaatagttaaccatcaacattaagagaagagctgaccccctccttgactgcctcctcgtgggtgagggtccctcaggagggagctgtgggttgaacaggcagattttcccctatgcatggtgtgttagtccgttgtgcattgctataaaggaatacctgaggctgggtaatttattttaaaagatgtttatttggctgtcagttctgcaggctgtacaagaagtgcattgcccgcatctgctcctggcgaagcctctagaagcttacaatcatggcagaaggcaaaggggaagttcatatcacatggccagagagggagccggtggggtgccacactctttcttttttctttttattttaagatggagttctgctcttgttgctcaggctggagtgcagtggcatgatctcagctcactgcaacctccacctcctgggttcaagcgattctcctgcctcagcctcctgagtagctgggattacaggcatgcaccaccatgcccgttaatttttgtatttttagtagagacggggtttcaccatgttggccaggctggtcttgaactcctgacctcaggtgatccacccacccacctcggcctcccaaagtgctggaattaaggtgtgagccaccgcgcccggccactgcaatcttttaaacaaggagatcttgcatgaactcataccactcattaccgtggggtacagcaccaagccatttatgagggagctgcccccatcacccaccacctcccactagatcccacctccaacactggggggtcagatttcaagatgaaatttagagaggacaaatatccaaaccatatcacatagggagcaagtaacatgttgtctgacccagctggactttaaaacatccaagatctaactcctaagatagctaagcatatatatttactwcttgttctatttataagtagaaggcacatttggggtgggcgtggtggctcatgtctgtaatcccagcactttgggaggtcgaggtgggtggatcacctgagatcaggagttcaagaccagcctggccaacatggtgaaaccccgtctctactaaaaatacaaaaattagtcaggaatggtggcggatgactgtaatcacagctactcgggaggctgaggcacgaggatggcttgaacccgggaggcagaggttgcagtgagccgagattgcgccactgcactccagcctgggcaacagagcaaggctcgctctctctctcaaaaaaagaaggcagccttagaataagatttaaagaactctaggtgcccgggcacggtaaattgtctttcttattcatcttcgctaattagtctttgcttagtccaagtctagtcagtaacgtgccttcccacctcatccttagcttctctcgtttactgcagctgtgcaaatgtatctccaggataaattcctagaagtggaattggtaagcccaagaatatagtcattggttgcaccagtttacacttccatcagtgatgtatgagtttctgtgcttctgcaccccttgacaacagtgtatgagcaaactttctgatcttggctaattagaaaggtaaaaatggtatctcggtgtggctttacctcatacttgtcttaaacgcgagcttgacatcttttcatgtttcaaagccattggattttctgtgctgtgacatgccagtatcttttcatccacttattaatttgtaggagctcttgatatgttactgaaaccagctttttcttggtgatgagttgcaaatacaatagccagtttgccattatcatttgcctgtgttatgattggttttgctatayaaaaacattatttttatttagtaaaatgtatcggtcttttcaagtttatgggtttggtgtcatacttagaatggctgtttcacttcgtaaatatatttttaaaatttttcccatggcctctctgatggttttgaaaccgtatgcagtgtttcttctcacccaccatttattttaatttttgtggtacayagtaggtgtatatatttatggggtacatgaggtgttttgatacaggcatgcaatgtgtaatcatgacatgctggagaatgggtatccatcccctcaagcatttatccttcgtgttacaaacaatccaatgatacttttaaatcccttttaaaatacgacatgtgactgggtgcagtggctcacacctgtaatcccagcactttgtgaggctaaggcgggtggatcacgagttgaggactttgagaccagcctggcctatatggtgaaaccctgtctctactaaaaatacaaaaattagccaggagtggtggcgcacgcctgtagtcccagttacttgggaagctgaggcagaataatcacttgaagccgggaggcggaggttgcagtgagccaagatcgtgccactgcactccagcctgggcaacagagcgagactctgtctcaacaacaacaacaagaaagatatgcagaacctaatgctctcactttgcttatgyctctgaaacttctgcacaaaggccttygggttttatctttgtgctattctgctaattagttactgcagggaaacagaggggctgtccacttagtgaccagctagactagttgctccagtgatgggaggcaccaagccttcccgttattgctgcctgagtttgacgtgaggtttttagtcatggggccaggttcaaggcagaaatcattgaaagtgtagtcgtagggggcatcttcaaggacagaccaacacagaccccttcaacgcttactgaatgtgacaccttgagccrgtcacttaacttctctgaccctcagtatcttcttttataaactggagataataattgcacctaccacccagggctattgcgagaatcaagtaagataatgcagataaagcgtttaaagcagggcctggtatggagtcactgctcgacaaagggagcttttcttaaggtgaccgtcttgagctaggccttgagggacagggatgtttgaaaagagggagcgatctttatggctggagaatgcagcattctgattgtacctgggattttattatgactgagtgacaacacagaaaggtcagtgccattgaaagaagttttaggccaggctcggtggctcacgcctgtaatcccagcactttgggagtccgagggcaggcagatcacctgaggtcaggagtttgagaccagcctggccaacatggtgaaaccccgtctctactaaaaatacaaaaattagctgggcatggtggcaggcgcctgtaatcccagctactcgggaggctgaggaaggagaatggcatgaacccgggaggcggagcttgcagtgagccgagatcgcgccattgcactccagcctgggcgacagagccagactccgtctaaaaaaaaaaaaaaaaaaaaaaaaaaaaaatgcattttccatagtgttactgggtaagtaagtaatgggactgggttctttggtcgtagtttctatctaagcgccattcctgagcctatcgctgcaggaaggaggatggggtgattgagtggccaggcctgggtgccacccctacccctgaagctgggcggtgaggacagccccgctcaaagcacacacattgacgcgggaagcggggggtcagaggaagctcttcgtggaaaatggaggtgcctttgccaaaagtagagggtgcgggttggacggtgagctggcttctggctccttccagctagaaaatccggtcgtcccgagctggtagggcctgagctctcaggtcgagggtgtcattttgggtccccaggattcagggagccgcccggacctggctgacccccgtgtccccgcccggccaggcccgggggatgctccagaaccgcgtgctgctgtggaaggagcagtctgaggccagccgcagcccgtcgcgcgcccactcccccggcctgctgggccccgcgctggggccgccctacccctcgggccgcctgacgcccacctgcctggacatggtgaggccctgggcgcccccgccgccgttcgcgcccccgccgccccccgcgggggcccggggcctcaggcccccagcctggagcctcctgccccccaggctcccgctctacgctgcatcccccggcctgcccttccgccccggcgcgttctccgcgcccccgtggtggcccggtctccgcccccagaacccctacgccgacgcctgggactgggggtgggggctggactagggcgcggccccgcccccccccccccccgccccaccctcccctgcccatctcccccgcagcccccgaggcccctgggagagttcagctccccccgcagccggcacggctccggctcctacggcaccgagcccgacgcgaggcccgcgtcccagctagagccagaccgtcgctccctgccccgcacgccgtcggcctgtgagtgcccccgccccggggcggcaggagggccgggagaggcgcgggggtggggctgcagcaggagggatcgagggcagacgccaggaagaacttcctgcccacgtgccgccgcgctctcccgcccacagcctcgctctacagcggcagcgcccaaagctcgcgctccaactcctttggcgagcgcccgggcggcggcgggggcgccaggagagtccgcgccctggtctcccactcggagggcgccaaccacacgctgctgcgcttctccgctggggacgtggtggaggtgttggtgcccgaggcccagaacggctggctctacggcaagctggagggctcgtccgcgtgagtgggagccttggaggggccgggggtgggttgagaagaaggccctgggggccgggaacccggggacctgccggactgaggtttccctggcctcccccgggggcctcggacaatgctcctctcctcccgacccccgcaccctgcctcagtttcctcattcattcagtgggagtaggaagagccgccttaccaagttcaggatgacggtccttgagagcgggcagaggatgggggatgggcaggttcttccaaaagtgtggaaatggcagaaatcctattgcttgagcacctactgtgtgcctgcctctgggaggaggctgcttcccctctgcagagtcagccctggaactctgatgcagggggctgggctgggagtaggggcttaaatgtgctcacctctttgcggtcaggctccgtggaaatcctgaaagcacttaaactgggctgttttgacacttgacgtggaggaggatttggggagtttcatacagtgaggttgccagaaagtgcggaggacagcagggctggcagctagcagagggaatggacaggcaccactgtcctgcaggggaaaacggggcagatggggctggctggagccaggcagtgccccctcggggcttcatgggcagggtagtgtacggtgcccactcctgctgcaggagagaagcagcgcaggatgaatgcgtgcatgggcagagcgggtggtggctgcccacaccagcccacggatggatgagtggtcctgtgcttaatggatggtggacaggcgaatgggtggaccaggggatgtgcgtctgggtaggtggaggtctgtgtgtgcaagtggatggccttaaatggcggggggggggtcactgactgggtggttagggacatgggaggatgcgcagatgtggtggacagacactgatgggtgattggagaggtgtgagtggtgagggggtgctggatggattcgtggctacacgggggatggagtatagacaggtgagtgggggataggtgatgtatggagggactcatagttaggcgcgaaggtccatagctgggcgggtgaccacagggacaggaacggaagggggtcagtggggagagagatgactgagaacgccaacgatagggacacctgctgctggagtggctgcttcacagacccacagcagaggacggtgtgctgcagatgccttggggacctgaggatagaaccttctagatggaggctgtcacaccctcctgggatgttctgggaccatcgttccatccttgactcacatagcctgttagggaaaaggatagcrtgtgttattatcagtaggcacttgcaggtgaaaacagaagtaaacatacggaattgattgtagtctgtcaattcgaggtgaagtagcttccagtgaccctgaggggaggatgtcttcttttggtcattgtccccaggcctggcttcttttggtcattgtcctctgcctctaccccacaggagcggttggttccccgaggcgtaygtgaaggctctggaggaggggcccgtgaatcccatgacccccgtgacccccatgacctccatgacctccatgwcccccatgacacccatgaaccccgggaacgagctgccttccaggtacctgagtcatcargggtggggcgggggtgaggacgccggcaagggtgtcactgcccagcggagaggatctgcaaggtgcaggcttgtttttttgtttttttgttttgttttgtttttttttttttgagacagagtctcaccctgtcacccaggctggagtgcagtggcgccatcttggctcactgcaacctctgcctcctgcattcaagcgattctcctgcctgagcctcctgagtagctgggattacaggcacacaccaccacacctggctactttttgtatttttagtagagacagggtttcactatgttggccaggctggtcttgaactcctgacctcaggtgatccacccacctcggtctcccaaagtgctgggattacaggcgtgagtcactgcacccaggtggcaaggtgcagtcttgagtgggcccagcccccttcagcccctggagaaccaccggccctgagcccctctctctgccctgaaggtcactgcgtccatccctctgcctcctctcaggacctccctccggtcaacagtctcctttcatgcaggtgcggggaggaagctgtcggatgcctcctgcctaaggtgccccagctactggcaggacaagggattggacaggccccaacccctttccttccccctcctttctctggacttaggtcctacccactccggggcagccacagcctygatgacctcctggaccggccgggcaactccatagcaccctcggagtactgggatggccagtcccgctcccgcaccccaagccgggtgccaagccgtgcccccagccctgcacctccacccttgcccagcagccgccgcagcagcatgggcagcacagcagttgccactgacgtcaaggtgagcccttgcccgccctctcttggggcctccagcgggcagggaggcaggagagcagggatcccgaggctctgtcaccggctgtctggcaggggacccgcctacctggcctcactcagtctgttcctcagtgcagggaggggtggtgtggggctgagtctgggctgaaggggaagaccagggtcccaggacagggtgtggcctggggctagccagtaggacggggctgggggaggccagggagggcatctccgatggagccaccccggtcttatcctgggggcgtggttagtccttggaggtggtgctctggcctaggggtttctcacttctgcaacccacagaattctgggcttcagaacgtcagggtctcattttccaggagcctggcatggcaggggctctctggcccagtcctctgcccttgggcatggggagagggaggggaggagcaagggattgcttgcccctctccccaccaaaccagcccttccccacccccactgcagaaactgatgtcctcagagcagtacccaccacaggagctcttcccgaggtgagtcctcacatgggggcccaaacagtgaggagggtggcaggtgcggtggcacacacttgtagtcccagctactagggagactggggcaggaggatctcttgattccaacagttcaacatcagcttgagcaacactgtgagaccctatctcttaaaagaaaaaaaaagatgaagcggggcaaggagtggatggagaccaaataggggcaggaggcaggacccagctcagttgcccagctgccttcctgagccatggccaggtggggatcatctgcccttctcaccccattctctctctcctcctacaggggcacaaatccttttgccactgtcaagcttcgtcccaccatcaccaatgaccgctcagcacccctcatccgctgaggcggggtccgaggtcgtaccccacagtgcacctgcccaggggctgttcagagctggcaatggcagcgacagcagcaacagcagcagatccaagaagcrggtccctgagacggggggtggctgccctccccagaccaccccggcagcctgagcagctccaaagcactggcttggggtccgagaccttcaaagtaaagcaggcggaatggggggacaggacaatttctccccctccaggggctccaggactctccctggggggcccacctcttgccccctaacctctttcccccttttctgcccccgtggggaggagccccttgtacctgctccgtgcccaacacatgccctctctgtacatcttttgtaaatgatgagaaataaaggaagtggacgcaaagtgatgcggcagcaggactggtggtgtcttatttgggggacagggcagggggtgagggatagagactcccccattggagaatggggtctagggggtactgaggtcctggctgttccccgggaagccatctcactcccagccccttgtttgtttggagaactctttagggctgccccaaagccctcgcgctgcagcccccatctccacctgctctcatttcgacctgtgggtttcctaggaagtagcggctgctcgggtcaggggagaggtggcagtggccaagggctgggaccaccagcaagctgccctcaggcggcctggacacagcaccctttgttttggcccctcccccccccacattcccaggcacaggcgtggattagcttcattctagagaaagctgccagcccctcctggaatgtggcctggggcggggggttggggcgggggcagatgaggcactgaggtgattagaaccgttggggtctcttcagggcagggctgtgcccccagcaccagactaggaccccctgggcaaggtctctgtgtctaccaccccaggctccaggaggcacagggattctcttcctccctcctggactggcttgggacagggagcccaccgccgaggcccagcctggcctggggctcccagtctcttctcccctcctggacaaaagcctcttagcaggggtgaggtgtggtgggggcacacactctaagctccaggcctggggcagggagcgtcaggcgggagtcggccagaggctcagcccaggctggtgggaagctggggtgtctggcagcccccatccgggtaagcttcaccgggagctgcggcggcggcccctccctgcaggcctcaggagatgtgaggctggacccccaaacccacgaggcaggctcaggtgagtgtgatgtgagggctgcctgggatcaccctcctgtctccaccttcaagtggctgcccctgtgacaagaggacaacaggcaggaaaagccacaacctggtcctagtggaggaggggcagagtcccggataccctgggggtggtggcactgcccagtgccaggagggacactccaggcaggagggcaggaggctatccccagcccccggctcctggtgcacctgtctctgagtacaccctcctcatctgttatgggggcgcttgtaactgctgtgagggccccgggtggagccccaggaatgagacaggctttggagccattcttttcatatagagggtttgaggtttggagggcagaaggccactctctcagtgctgctaaggttcctacctgtctggcagaagccagagacctgactcctctcccgcaagattcccagctggcctcggggtgatcaatcacccatcttacatcggaggaaagggaggttgggagaggggaggcgaccggcccaagtcagggagggaatccatggctgagctgagatgcatgggaactcagctcccctggctgatatctgttgaaagtggcttttgtccccttaatgttctaatgacaatagtcatttgtgatcactgagaaacattaggaacatggcggaaggctaaagaggaaaatcacgcacagcggccctttgcagccggcatctgcccctctgctgtttgttctgttgtcccgagaccctcacgcgtacggggcgactttggtgctggacgcccacctccaggcacatacctgctccacttcccgacgccttccacctgaggccctgaggggccagcagttgtccttcagagggagcctgcagaggtgcagagtcaggtgggacccgtcgtcctcccctcgtccttcagcgccctttgcaggagaaggagacttggggtgagagtcctacctccgtttccccttttggttcccagacctgagccaccctcacgtgggtagccctgtgcctcagtttccccatgcttcgtctccatccccctccttctctaggctgctggcccagcccctccctcttgtccccgccccctcccaacagaggcagcgatgggcgctggcggcccccggcggggcgagggccccccagacggcggctggggctgggtggtgctgggcgcctgctttgtggtcaccggcttcgcctacggcttccccaaagccgtgagcgtcttcttccgcgcgctcatgcgcgacttcgacgccggctacagcgacacggcctgggtgtcctccatcatgctagccatgctctacggcacgggtcagtgtccccgcccggccctccgcctccccgggacccctgggatccggaaccaggagacacccgagcccctgagcatccccctgaccctcggggtggcccccgaagtcccttcctgcctgtgggaaccctggcaccagaaagaggggaagagagggcgggagggagacagcggccagaggcggggccggcccagggggctgccctgcgagctcagagggccccttctaagaccacacccgcccattgtagaggcaggaaagctgagagccacagaagcactccccctccccgcagccctgacctgtaggtgggggcttgctggagttcccatcctgggaggcggggctgcggaggaatcccagtctgtgccagggcgggacttggaggctgtgaaggttaaaggggtgcggaagcccccgctccgcttggggtttgggttcgcaggatggggtgctctgggccttgccctcgcaggatgctgtctctttggcctgtcccctccaagctgtgtgaccttggccagacactgccctcctctctgtgtccctgagccggaggtgaccttattccttagaggactcaagccatcccgggacccgggtggtgaccctgccctgcccacaggccccgtgtccagcatcctcgtgacccgctttggctgtcgcccggtgatgctggcgggtgggctgctggcttccgcgggcatgatcctagcttcctttgccacgcgccttctggagctctacctgaccgctggggtgctcacaggtgagggccccctggtctcctctccgctgggttgggggtcgggggttcttgctgcaagatctgtcctcggtttccctatgagggacagtcttcgaagtccctcggctgggttcccggatctgctgggttcccgggcctggcccctccctcctgtgggggccagggaggggctctccggggaccccggcacagcaccgcctcgcccgcaggcctgggcctggccctcaacttccagccgtcgctcatcatgctggggctgtacttcgagcggcggcggcctctggccaacgggctggcggcggcgggcagccccgtgttcctgtccgcgctgtcgccgctcggccagcagctgctggagcgcttcggctggcgcggcggcttcctgctgctcggcgggctcctgctgcactgctgcgcctgcggggctgtcatgaggccgccgcccgggccgggcccgcgaccgcgcagggacagcgccggcgaccgcgccggggacgctccgggcgaggcggaggctgacggtgcggggctgcagctgcgcgaggcatcccccagggtccggccccgccggcgcctgctggacttggcagtgtgcaccgaccgcgccttcgccgtgtacgccgtcaccaagttcctgatggcgctcgggctcttcgtccccgccatcctgctggtgaactacgccaaggacgcgggcgtgcccgacaccgacgccgccttcctgctgtccatcgtgggcttcgtggacatcgtggcgcgcccggcgtgcggcgccctggcgggcctggcgcgtctgcggccgcacgtcccgtatctgttcagcctggccctgctggccaatgggctcacagacctgagcagcgcacgcgcgcgctcctacggcgccctcgtcgccttctgcgtcgccttcggcctctcctacggcatggtgggcgcgctgcagttcgaggtgctcatggcggctgtgggcgcgccccgcttccccagtgcgctgggcctggtgttgctcgtggaggccgcggctgtgctcatcggaccgccctctgccggtgcgccccgaaggaagagggggtggcgagcctagtgccccttagacccagggaagctccatccccctgtctcagatggaacttccagggatgaggggaaggggcagtcgggtgggtggactccccttcacggccagttagtccctcctccaagccggaccgcccgctctgggtgaggacagaaaagcccaggaaggtgcagggaagaaagcaacactggtagctggccagatctgccatcccaagcagttggcacaaggccatctgaagcgcaggtgcttattctcattttgcagatgaggaaactgaggcacaaagccttagcgcaagttgcagccccagaatgagagcctcagtgtacctgctgctaaatgcccacgcctttagaatggtgcatctagaatggtgactggaatggggacagtatctttgggaaactggtgttggggccagaaacagagtgggggtgctcagcgggcagatggggagaagcactggtgtctttcactgtgcagatggcctgctggcacttgtcaccgtcacccttaggaagtcatcgtcatgagggtgatcagggaaggcttcctggaatatcccccaggtgaaggcacagcatggatgggcagggcttgttgggggggaacagcgtccttatgcaagcaaggcaggaaccaaaattggaaaggtgggagtgggggacatgagggttttcctgggttgtcaagttatcttgaaacagcaagggagcctgcctttgagtcccagaggctagagggctgtgagatggtgcagtaaccagggaggacaccttgcgggggccgcaggctgcactgagatggggtgagctgctcgtccttccttcagggctgggctaatcgagtgccctcactgagctctgtcatcccacctgacccagtgagaacggcaaagtccctgagccagtgtgtgggcaggccacaaaaccagcctgcccaggcctcaaggaaccgtcttccatttcttgtgtgaatctggatggatctgatgggcagaggaggtgcatggggtgaggagaatgacctagagagagggtggagcacacagacaaaccacactttagggggaaatacttgcaattaagagattttcctggtcgggtgtagtggctcatgcatgtaatcccagcgctttggggggctgaggccagaagtctgaaaccagccggggcaacatggcaaaaccctgtctctaccaaaacaaaacaaaacaaaattagctaggtgtggtggcgtgcacctctggttccagctactcaggaggctgaagtgggaggatggcttgagcccaggaggtggaggttgcagtgagccaagatggcaccactacattccagcctgggccaatggagtgagaccctgtctcaaaagaataagaaaattcctgaagccaggtgcagtggttcacacctgtaatcccagcactttgagaggccaagtcgggaggatcccttgagctcaggagttcaggaccagcctgggcaacacagcaagaccccatccctaaaaaaaacataataaaagagagactttcctgagtttgaaagtagtatctacaagggatagaagccttgagaaatagagaaggaaatgagttactggcccacaagccccacctgtgccgatgatggcttggtctgggatgctcatgggcctcctgggacagaggggtgggaggactaagccaagcccctgaggaccagggcatttacatggcaacagcaagaggtggaggcccccaggagggcagagctaagcccagggccccctccccgctcccaccccagataccccactgccaagcaagtcacaggacacttgtggggcttgaatcagagggtggaggggacgcctcaccaaaagccacatatcacttaagcaattgaggtccagggacagcaagtgacatttttaaggtt

SEQ ID NO: 97165 - DNA, 15869 bp, Homo sapiens
  misc_feature (1)...(15869): n = A,T,C or G
attagctgggcgtcgtggcacacacctgtggtcccagctactgggaggcgggaggatggcttgagcccaggagatcaaggctgcaataaactgttgcccaggctgctgtactccagcctgggtaatagagtgagaccctgtctaaaaaaaaaaagaaaaagacaagaaaagatagatattaatggccgggtgcggtggctcacgcctgtaatcccagcactttgagaggccgaggcgggcagatcacaaggtcaggagatcgagaccatcctggctaacatggtgaaaccccattctcctgcccagcctcccgagtagctgggactacaggcgcccgccaccacacctggctaattttttgtattttttaatacagacggggtttcacagtgttagccaggatggtctcaatctcctgaccttgtgatccgcccgcctcggcctcccaaagtgctgggattacaggcgtgagccactgcgcctggctttttttttttttttttttttttgagacagagtcttgctctgccgccaggctggagtacagtggtgcgatcttggctcactgcaaccttttgcctcctgggttcaagtgattctcctgcctcagccccccgaatagctgggactacaggcgcgtgccaccacgcccagctaatttttgtatttttagtagagacggggtttcaccatattggccaagatggtctcgatctcttgacctcgtgatctgcccaccttggcctcccaaagtgctgggattacaggcgtgagccaccacgcccagccaagtgtgtgaaaacttccacacctcccgatttgaaagcattaaaggtttatgaatacacataagccctttgtttaggttcaatgcttagcattttatcctgttgtctctccctctctcctcctctctctctctccatgaatatatagttagattttgctgaatatattgtgaaaacatatatgcatatgtatatttggcttaatcatttgagaggaattgcaacattgtcgcacttaactcctaaatacctagacagccatctcctaaaagaaagatatttgcacacaaaacatgctcacacctaaggaaagtgacatttactctgtcatatcatttagtatccactccgtagtaaaatttccccaactgtcaggccagcgtggtggctcacatctgtaatcccagcactttgggaggctgaggcgggtggatctcttgaggtcaggagttcaaaaccagcctggccaacgtggtgagaccccgtctctactaaaaatacaaaaattagccaggtgtggtggcggacacctgtaatcccagatactcgggaggctgaggcacaagaattgcttgaacctgggaggtggaggttgcagtgagccaagattgcaccactgtactccagcctgggtgacagagcaagactctatccaaaaaagaaaaaaaaaaattcaacccactctgccctttttctttaagtttctcataacattaaccaggccaggtgactttaaaggcccacattctggatttttctagctgttttgtcacagattcagattaaacatgttgggcaggaatgccacatgggtgaaggtgtgtgttccttttttttttttgagacagggtctccctctgtagcccaggctggagcgcaatggcacaatcttggctcactgcaacctccgccttctgggctcaagtgattctcctgcccaagtagctgggactacaggcataagccaccacactcagcgaatttttgcattttttgtagagatgtggttttgccatgttggctggtctcaaactcctgagctcaagtgatcctcccaccttggcctcccgaagtgctgagattacaggcgtgagccactgtgcccagccagggcaggagcttcctgtctgctttgtcccaagcaaacacacagccaagggtgtgtgttccatactgtgcataattccagcctgtctctgtttgggtgatggtacattgtatccctaagtttagttggttactgtcagatagacagatatatatctatctgacaaatatatatatatatatatatatatatatatatatttgttgttgttattgttgttgttgttgttagagacaaggtcttgctctgtcgtcccggctggagtgcagtgtcacgatcatggctcactgtagcttcaacttccctggctcaagcaattctccagcctcagcctcctgagtagttgggactacaggggcatgccactgcacccggctgatttttgtatttttagtggactcagggtctccctgtgttgcccaggatagtttcaaactcctgggcttgagtgatactcctgtctcagcctcccaaagtgccaggattacaggcatgagccaccgccactggccagggcaggggattcctgtctgctttgtcccttgcttgggtgcccagcacctggccacacaataggtaatcaataaggatttatcgaatgaatgaagcaaaggatatagatgagcacctgcatatggaaagtccattcttggctgtgacaccacccaggctggacacacagtaggcaccctgggaaggtctttctgggggtcgaattttgggggaagggaaaggtgtctgctttatccagcccctcttgtctttacttcataggagaccagccactaactggggcgtacacagtgaccctggatggacgagggccctcaagggtcatctccaaacatgacctgggccatttcatgctgcgctgcctcaccaccgatgagtacgacggacacagcacctacccctcccaccagtaccagtagcactctgtccccatctgggagggtggcattctgggacatgaggagcaaaggaagggggcaataaatgttgagccaagagcttcaaattactctagagaaaccgactgtgtgactcttcctctctctgcctctgtctgagtattttggtgtgtctgcctgcctctgtgtaagatttgcttgttatgcattcattcatttgttcagtaacagtttatttttatttttttatttttttgagaccgagtcttgctctgtcgcccaggctggagtgcagtggcgcaatctggctcactgcaagctccacctcccaggttcacaccattctcctgcctcagcctccccagtagctgggactacaggcgcccactaccacacccagctaatttttttgtatttttagtagagacagggtttcaccgtgttagccaggatggtcttgatctcctgacctcatgatccgcctgcctcgcctcccaaagtgctgggattacaggcgtgagccactgcgccccgcccagtaacagtttattgagtctggccaggcatggtggctcatgcttggaatcccagcacattgggaggccgaggcgggtagatcacttgaggtcaggagttcaagaccagcctggcgaacatggtgaaaccctgtctctactaaaaatacaaaaattacccaggcgtggtgatgcacacttgtaatcccagctacttaggaggctgaggcaggagaatcgcttgaacctgggaggtggaggttgcagtgatccgagattgtgccactgcactccagcctgggtgacagagcgagactccatctcaataataataataataataacttagctgggcatggtggtgtgcacctatagtcccagatactcaggaagctgaggtgggaggatggcttgaagccaggagtccaggttgggcaacatagtgagaccccatctctacaaaataatttttaaaaacttagctgggcatggtggtgtgtacctgtagtcccagatactcaggaggctgaggcgggagaatggcttgaggccaggaggtcaaggcctggccactgcactccagcctgtaggacagatccagaccctgtctctgaaaataaaaaaaagtttgtgctttattttgaggatttatgcaaggagtggagcaccagagaagtaaggcaggggggacagttgggtgttttatgaagcttcctttggctactctgtgaaggtggaaaggaagggtccaggaatggaggctgatagcccagagggagttggaggaggaactgtaaggaggggaggagagagtgggtgtgaggaatgcctgggagcctgcgtggacagttggtgaggggtggaggggaggcatcagaaagaagcatacggctgtaacccggggacagagttacactagtgcttcaggagggaggctgaggctgcagtgagccaaggtgcgccactgcactccagcatccacgacggagtgggaccccgtctcaaaaacaaaaacccaaatgcagtagggctttcctgagttgtggaccctataggaggcgcaggttttggaggaggaaggggaagaattgctccttcctaattatgtccttttttggaacctactgtccctttctttttttcccagggacaccttccctaggcctgggtgagctaagacacttctctctccctacctccaacccacaccacccacctacctattcccctcccatttatcctgcaaacatcaggatgacttggttgacaaactccaaccggcaagaactggtctgaggaggcttaaacctcccttcccagaggtggcctggagaaaactgcctcctccccttagggaaactcgttgtaggggcggagcattacgggtgtgggctttcaggacactagcagtgtcttctttctgccttatttttctgtcacattcctgagcatttagcaaactttcactgggacctgctacgtgtccagccctgtgctaggtgatcctgcagaccaagaggtggttgacagagatatccttggtacctgccctcggcggggcgttcctcagtccatatagtaactgacagtccaggactgggatggcggcacaggaggccatggaatcctagaatggatcctaacccaacctggactgccagggagggcttcggagaggaggaaacctttgaaatgtgttctgagaagcagcctgggaattgagggtatattttgaggatgaggaaacaagtttaaatatccagaggcgagaagattgcttgaggccaggagttcaaaaccaacctgggcaacacaagaaaacccccctcccccctcccccatctctctgtcacccaggctggagtgcagtggcacgatctcgccttcactgcaacctcaacctcccaggttcaagcgattctcctgcctcagcctcccaagtggctgagattacaagcgtgcgccaccacgcccagctaatttttgtatttttagtagagacggggtttcaccattgttggccaggctggtctcaaactcctgacctcaagtgatctgcccgcctccgcctcccaaagtgctgggattacaggcgtgcgccactgcgcccggcaaaaaataatattaataataaagatccagaggccttttattgtcatgtttgcgaacttattatgtacctggcattgttgtagacactggggtaaagcagggaagaaaacaaacagagaaaatcctttcgttttcctgatggggtgaatgggagcttgaagccattttagaaaaactggaagtgactcaatggggcaggatcggagagaaccaggagaacgcatcaagcaaggtcgtgaggggctttgtggcaaaaggaaggagtttgaagtttgtattcggggtgggtaggaagccatgaacagtagcagaggagtcatcttgatggagcggggaaggaaagagggtgtcagaagacccaggtgggaccaccagaggacgtgctgagaaaacctgaggattaagaaggggccgcgcggtaacgtatagggggcgggaggggcagcaagggggcgaggctacgatcgcctaggcaacgcgggccgcgccactctattggctggtcttccgctacgtcatcccccgcgccccagcgtcctccctcggaaccccgggggcgcggcctcctccggttgctcggccccgcccgcctgcacagcgacttggggaggggcatgccagcccctctggctccacggtggagtccaggcctaccataaaggaaccgcagggagcaatggtgacgatcttggagcgaggactgtagctgagtggaaggaagcggttctgttggaccggccgccctccaccccggagkcgctgccccgccccctgccagttgcacttctttaaatggcccggggcgctagggaggggtgggcggatccggcgtctcggggcacrggcggatggctccgcccagccaatcgacgccccgcggygggcgggactccagccaatcgcggctcgcggctcggctccggggcggggctggtgggccagaggccagacggagaggccccgccgaggtgagcgaggctccaaccggtcactggtgggtcctggcactggcgggtcgcaacgctgtgggcgttccaggaggtggtcgtggcgaacctggcagctgcggtgaggagtggtcgcctggcttgggaatttaccttaggctgggggagagagaagcgcgccccggggacttgcggaggcggggtctgggtgggaccgggggagggggcctcagattcagggtgatgatagggagggtctggggacctgagactgagttcaagacccaggaggggaggcgaggttgttggggcagtattttcaagtggagggagtttgaagctgggacgttgggcttttggagaagcgagagaacagaggggaggaacttttgagacagggaacctggagattcgattccacttgggtcttccggacgggttgaattcggggctttatcgtgttctggaaaaggtgtgagaggtacggagctgagattctgagtatttggagaagcgagagaactagggtcaaggattcttgggactccaagacgcactggcgggggaaggrggttgccgggaagagttcaatgttcgggtcttggagccggacagcgagtttggaggtgaagtccaggggcgtttgaaagtcaggagactaggagaagtgggaggaagtatcagaattaggatacgtagtctcccgaactagatcggagcattgtcgtctttgagcgatgtgttcggatctgggtctctggatccaagggcagtttggaaggagaatcgcggactttcaaggaacagagggaccgggagaaagcaaatttagagccggagtctggggtgggggaggggtgttccgggcctggagctcagactcgcggccccggaggcaatggagggcggggctcggcaggcgccggcagctggacgtccaggttcccttcccccacccgcctgtgcccctgtgcgcatgccctgagggagagcggggtgaggggggtggctcgtcccctggacgkgcggagccctctggggattgtagtgcgtgctcgacgtcaattcgtgtacctggcggctgttggcccccgtttcccagaagcccctgggccaaattggggcgttcctggatgctctgtaaggacccatgggggggcggggccttacagtgtcgcggtctgattgagtgggacctccgagggggcggggcttggtctgagctgagttctagcaagttttcctatggggcgcgctttgggggaatctgaaagcgtgggcagagggaatgagacaggcccctttcctactcttgggagcgctcccagtcggttaaggaagaggacatagaaatatcccgactgttgaagaagaatctcaacataggttccccaacagggctccaggagatttcgaatatagtaggcactcagtaaatctgttgagcgaataactggcaattaactcttgatcgaggccgggtgtggtggtaatcccagctactcaggaagctgaggcgggaggatcgcttgagcccaggacttcgagactgcagtgagctgtgatagcgctgctgcactcagccctgggcgacagagcgagaccctgtctctaacaaaaaacaaacacaactcttgttcattaagcacttccggtgtggtgggccctatagatacgtggcatctccttgacagaggtggtgagaagtatttttttacagtccctattttacagatgaggaaactgaggccctgagaattgactcattcagatcacttcccatgatcacgcagctgagcagtttccaatacagaattcagatttggggttccctacttcsaatccaggtctctgtgctccacacttgtctttcgtgctccatgtttgaagaaattaatattgtggaagaacagttttaaggcttagaggaacttgagttaggatccgtacttggcagatgaggaaattgattctcatggatgtaaattcactgtttgaggccacaacaggcaagtaagtgagatttaaatctagctgtacktaacgccagatcttattttcttaatcgtatatgtactcaccttcttaaacttgtaggattcagacagccttcattttatacatcagtaaactgagattccgatgattaaaaatcactaacaactcaataggcctgagaaagtgggatatgagccagcactacggtgtctggtgtctgaccttcccctatgcgcctcttctctctacagggcatcatggtgggaggcttgaagaggaaacactctgatttggaagaggaggaggagaggtgggagtggagtccagcaggccttcagagctaccagcaagccctgctccgcatctccctagacaaagtccagcgcagcctgggcccccgagcacccagcctccgcaggcatgtcctcatccataacaccctccaacagctgcaggctgcacttcgcctggctcccgcccctgccctgcccccygagcccctcttcctgggcgaggaggatttctccctgtcagccaccattggctctatcctcagggagctggacacctccatggatgggactgagccccctcagaatccagtgactccccttggcctccagaatgaagtgccaccccagcctgatccagtcttcttagaagctctgagctcccggtacttgggggactctggcctggatgacttctttctggacattgacacatctgcggtagaaaaggagcctgcacgggccccaccagagcctcctcacaacctcttctgtgccccaggttcytgggagtggaatgaactggatcacatcatggaaatcattctggggtcctaaaactgtgatagagggganccttcctcatgtcatcttcggtggcctggatccctgaatgcaactctgggtgtgtgtttttgtgggggcwcgaagcagtgactatggcctcctttgttcccatttcagggttccacaaactgtcttgcatgtgtgtgtgtgtctggttaccccgaccttctgtgaaggtgggtcttcctgaattaatttatctattccaaatgccttaacgagactctgtttctgggagtctgattttccacttacacatttcttccacctttcctgctagttcccactcccctgtgaccactggggcctcagggaagataaagaaagctgggcctgtcgaaggatgacagggatgtgctgccaggttgctatagaaacccaggctctgcctcttgcaccttgagggggtgggaggggctggtstcctccctccaggctgaaccccacttcctcggcaggaccccagtctcagcagcctcctgatttcataaccaggccggaccacgtgcaatagggtggaaaccaaactgctccatgcygggttatttaaaagaaaggcagagtttgtggtggctttttttttttttttttggattgtttgtaatttttttaaataaaagtattttggaaggagggatgttgtctaatgtttctaaacttcactgggtcagtgggagggacctggtaagttcctaaacatcagcaccacttccgtgccatagctggggtaggtgtatcattgtacatgacatttattgagtgcttgttggctgagtgctctagctcccacttggaatcctagcactttgggaggatctgcttgaggccagcctgggaaatgtggcgaaacactgcctctacaaaaaatacaaaaaggagctaggcatggcggcctgtagtcccagttactggggaggctgagttgggaggatcacctgagcctgggaggttgaggctgcagtaagccatggtcacaccactgcactccagcctcagaaaaaaattagtgcttgttaagagcactgttctagccactttatttgaattaagtctgttaatcctcatatagaagtaagtactgttaccactttttatacaggaggaaccagaagtttagagaggacaagtcacttaattcagagccacacagctaggaagaacaaggaccagggagctaggctgaaatggcctccagagccttgtccttcactattataaatgttgcttcttagactaaccagccacgtgggtgggcacaggagggagaaactgagtcacacggagtatgtgtcactgaatgtgctgctgagcccagaggggcaagaaaatgcccaaagacccccagtactaaaagacctctttaggagagttggctaggaagcagagcccagattagatttatagtgctaatgctttttttttttttttttttttgagacggagtctcactctgtcacccaggctggagtgcaatgacaggattttggctcactgcaacctccactcccgggttcaggcaattctcctgcctcagcctcccgaatagcagtgactacaggtgcttgccaccacgcccagctaatttttgtattttttttaaaatagagacagtttcaccatgttggccaggcttgtctccaactcctaacctcaagtgacccgcctgcctcagcctcccaaagtgctgggattacaggcatgagccactgtgcctgacctgtgctgatgctttatttcggaggtacgagcccaggctgctgagatacaggagaggagaaggaggtgaaggaagtgaaggaagaggtaatgtgatacctgtacaggctatgcctttacaatggtctttgaagagatgaagcaagtgagctacacagcattagggacttttctggaagggctgcgaggaggaacaacacctgagtatagtccatgggtggagaaaggatggggattttgcttgtggtttctgggtcaaagccagatttctcaacctgaaggggtcattgtcagaaagtggagggataacctgaagaggtgggtgccaatccagagagaggaatgaggtggcccagaggatctaaagaaagcaaccaggtacaggccaggcgcggtggctcaggcctgtaattccagtacttagggaggccaaggcgggaggattgcctgaagtgaggagtttgagaccagcctggccaacatggcgaagccctgtctctactaaaaatacaaaaaattagctgggcatggtggcaaacacctgtggtcccagctactcaggaggctgaggcaggagaatcacttgaatccaggaggcacaggttgcagtgagctgagatcataccactgcactccagcctgagtgacagagcgagattccatctcaaaaaaaaaaaaaaaaaagcaaccaggtgtgatacttgctgtggaattgtaaaaaataaaaataaaaggtaagcaaccaggtctgcatcccaatatgatggcaattgaatcatgtcttcctccttgaaaccttcagtgcctttttttttttttttttcttttgagacagggtctctggctctgtcgcccaggctggagtgcagtggtacaatcacagcttactgcaacctccacctcatggactcaagcaattctcccacctcagcctcagcctcccaagtagctgggactacaggcacgtggaccacacctgactaatttttgtattttttgtagagatggggttgtgccatgtagcccaggctggtcttgaactcctggaatcaagcgatcctcacatctcagcctcccaaagtgctgggattacaggcatgagccaccacgcccagcctccagtgacttcttgacacactcaataaagcgccagctccaccaagacctgcaaggactgacttattctcacttcggacaactttctcagttccatctcccactctctccatcactcaactgggctcccttgaccccagctccttctcaccccagggcctttgccctaactgttaaattttcccagtggacattttccccaatagcttcaccaatcccaatatccccttctcagggaggtcttccttgcccttcctagctcaacacatccaggtgggtcaccaccccaccacaacttgtttgattttctttctttctttttttttgagatggagtcttgctctgtctcctagaatggagtgtagtggcatgatcttggctcactgcagcctctacctcccagttccagcaattcttctaccttagccttccgagtagctgggattacaggcacatgccaccacacctggctaattttttttttttttttttgacacggagttttactcttgttgcccaggctggagtgcaatgacgcgatcttggctcaccacaacctccgcctcctgggttcaagtgattctcctgcctcagcctctcgaacagctgggattacaggcatgcgccaccacacccagctgattttgtattttcagtagagacaacgtttctccatattggtcaggctggtcttgaactcctgacctcaggtgatccgcccgcctcggcctcccaaagtgctgggattacaggcatgagccactgcacctggactgattttgttttagtagcatctacccaatctcgagttacttatttcccatctataggtagcctcctactctcctgggaactctgagggttgtgttggtctgtgcctagaactatgcttggcacaactgcactctccaaaattatttgttgttgaagggtcaggcacggtagctcacgcctataatcccagcactttgggaggccaaggcggtcggatcacctgaggctaggagttcgaaaccagcctgaccaccatggaaaaaccctgtctctactaaaaatacaaaattagccaggcgtagtggcacatggctataatcccagctactcaggaggctgaggcaggagaatcacttgaacccaggaggcggaggttgtggtgagctgagatcgtgccattgcactccagcctgggcaacaagagcgaaactccatctcaaaaaaaaaaaaaattatttgttgttgaaaaacttggccaggtgcagtggttcacgcctgtaatcccagcattttgggaggctgaggcaggaagatcgcttgtgtccagttcaagaccagcctgggcaacacagggagaccccatctctacaaaaaactaaaataaaattagctgggctgatggcatgcccttgtagtcccacctactcaggaggctgaggtgggaggatcgctcgagctcaggaaatggaggctgtgagcagagataacaccactgcactccagcactccatctggaacagagcaacagagggaggtcctgtctcaaaaaaaaaaaaaaaaaaaaaaaaaggccgggtgcggtggctcacacctgtaattccagcactttgggaggccgaggcgggcagatcacgaggtcaggagattgagaccatcctggctaacacggtgaaaccccgtctctactaaaaatacaaaaaaattagccgggcgaggtggcgggcacctgtagtcccagctactcgggaggctgaggcaggagaatggcgtgaacctgggaggcggagcttgcagtgagccgagattgcaccactgcactccagcctgggtgacagagcaagactccgtctcaaaaaaaaaaaaaaaaaaatgaactccagacctagcaatgactaactttccctcccacctttctgaactcatctcccctacacaccctcactcttatactcccaccacaccattccctgctgttcctcatatacaccatattccaaactgaaggatctggagtaatacctgcctcacactgcaaagtgtcagggagcctgaggcaggccaaggattccaataatggctcagatttattgagtgcctgctgtggacctggcactcttcagcaggaaaataaataaaatagacaattcctgctctcatgaaatttaacagtgggggaagagtgaaatacacatgaaaaataatgccaggcatggcagcacgtgactatgagcccagtaactcaggaggctgaggcaggaggattattggaggccaagaattcaagaccactttgggcaacatagcaagaccacatctctaaaacaattttaaaaaaaaattagctgggcacgctagtcccagctattcagaagactcgggtgggaggatcccttcttcagcccaggagttggaggttacagtgagctgtgatcacagcactgcactccagcctaagcgacagagtgagactcccactccaaatagatagatagatagatagatagatagatagatagatagatagttagttagatagggccgggcgctgtggctcacacctgcaatcccagcactttgggaggccaaggcgagtggaccacctgaggtcaggagttcaagagcagactggccaacacagtgaaaccccctctctaccaaaaatacaaaaaaattagctgggcatggtggccggcgcctgtaatcccagctactccagaggctgaggcaggagaatcgcttgaacctgagaggtgaaggttgcagtgaactgagatcaggccactgcactccagcctgggcaaccagagtaaaattatgtctcaaaaataattaagtaaataaaaagaaaaataaggccgggtgtgggggctcacgcctgtaatcccaacactttgggaggccaaggtgggtggataatttgaggtcaggagttcgagaccagcctggccaacatggtaaaaccccatctctactaaaaatacaaaaattagctgggtattgtgatgcacacttgtagtcccagctactcaggaggctgaggcaggagaatcacttgaacccgggaggcggaggttgcagtgagccgagatcacaccactgcactccagcctgggtgacagagcaagactctgtctcaaaaaaaaaaaaaaaaaaagaagtgaaaatgtgtaagtcagccaggtggtgataaatgctgtgggggcaggggggagcagaggagtgaggagggtgttgcaatttacataggatggccagatagggcgtctgagacaaggtgacatttgggtaaaaacctgaagaagggccaggcacgttggctcacccctgtaatcccagcactttgggaggccaaggcagtcagattgcttgagcccaggagcttgagaccagcctggggtaacatggcaaggccctgaggtcctgtctctactcaaaaaaaaaaccaaaaaaacaaaaaaaacaaaaaaactgggtgtggtggtgctcacctgtagtcccagctactcgtgaggctgaggtagaaggatcgcttgagcccataatgggcagaggttgcagtgagaggaaatcccactgctgcactccagcctgggctacagagcaagaccctgtttcaaaaacaaaaacaggtagggcgccctggctcactcctacaatcccagcactttgggaggctgaggcaggcggattacttgaggtcaggaattcaataccagcctcgccaacatagtgaaaccccatttctactaaaaatacaaaaattatctgggcaaggtggcagctgcctgtaatcccagctactccgga

SEQ ID NO: 97166 - DNA, 12423 bp, Homo sapiens
  misc_feature (1)...(12423): n = A,T,C or G
ctagaattataggtaaaggatatttgtctcaaagcataccagtttatactaaatctctacagcagccaagggcattatcttacctggaacacgatgtgattggtaaacatgtgcttgatacatcgaacaaaatattctgtctctgcttctgtaagttgaacaggctcagaagacttgaacaagggtcctatattcagaaactcaggaatggcagccaattgttctatcaagaaaaaagaacgtaggctatgaagaagacagggaaagacttcagtctggatgcttaaaaaatgctttagttggccaggagcagtggctcacgcctgtaatcccagcactttgggaggccgaggcaggcggatcacgaggtcaggagatcgagaccatcctggctaagaccatcctggctaacatggtgaaaccccgtctctactaaaaatacaaaaaaattagtcaggcgtggtggcaggcgcctgtagtcccagctactcgggaggctgaggcaggagaatggcgtgaacctaggaggcagagcttgcagcgagccggtattgtgccactgcactccagcctgggtgacagagcgagactctgtctcaaaaaaaaaaaatgctttagtttccatagccttactaatagttgaacattcaactaatatgtccccaagttttagtgaagtcatctttcaagtaagtaagcttatatattaatgaaagcaaaaagcaaaaaaaaaaaaaaagaaagtaaatacttattttacaatgagttccctgttaaccaacgagatacagaaaagaaaaacattcccaattagcaattacaaactggaaagttcatggactccaggtagcctcagcaactataccctatggtgttcagccacacgaagatttcctatattgagaaccgatcaatttgagtaagactggtagactttttatatttacaatgcctaggggaaagattattacgtctaaccatcaaatcatcataccttggaaaatgtcttgcctggaaggagccaacttctctggcttagtagccacaagtgtgatttctataaagacagatatgagcaagtaagtgaacttctcccactactatcaagctagcaatgcagacagaaagagaggagagcagacatttctagcagatatataatgagctattactagatcatacttataggttatctatcacttctggtggggggacactcaaattaaaatgtatttagtgaacatatattgtggaatcataaagtaagccctaaaaatatagagtttgctttaaatggactggaatgtacaaaaattactcagaaaaggaaaaacaatttattttaaaaatcttctcatgatcaaaataggaaaaattacttatatcaacagaaaaactgaaaatgttgaaaataagcataaaattgtttcttcccagttttgtgttctaaccactaaacatttatgacttcttttgtttttgtttttaagttttaaagttagatattctttgggaatattttttatgattgtcgcccataaattcttttaagacgaacctccaataacaaaatcaattaacttagagattatcaacttcagaaaataaaaataggaggcgacagcactattactgctctgagatgcacagtggcaactgacttcagatactgtaatgctttgcattaaaaaaaacccttcattttggagtgcatttcatcttactgcttttatgtaaaaaccaggagttttttttaaactctaataaaaatatgtcttaaatctaaaagatttagaaggggtgacaatcggctgagcacggtggctcccgcctgtaatcctagcactgtgggaggccgaggtgggtggatcacctgaggtcaggagttcaagaccaacctggccaacatggtgaaatccagtctctactaaaaatagaaaaattagccaggtgtggtggcgcatgcctgtaatcccagctactcggaaggctgaggaaggagactcgcttgaacccgggaggtagaggttgcagtgactagagatcgcgccactgtgctccagcctgtgcgacgggagtgagactctatctcaaaaaaaaaaaaaaaaaaaaaagagtgacaattaaatgagtattagagaaaatatgctaatattttttagttttgcaaaactacttatacacagaaaaacgaatagagtgaacctgctttctgttcaaagacaggagccatagcaagaggaattgatttcatgtcaaacggtttttctgaaggctccaacgtgtactggtgtaaggctttttccatccctggtacagagaccgtcaaacctgtgaaacatagagaaatctcagcattataacctcttgccaatcctcgaatccaaataggcccaggtttgtaatatttatctaagctttctgaaggaagagaaaaatataaccaaaagctttataacctaaatataaaaataaaggatattcttgaaattaccttataaacttataaactgacttatttcattcaaggaaacatgggagcatagcatacacattttcaacaaaatgtatgtacctcccagaaaagaaagcaacttagctatatgggaacaatgatagcataagaaaacgggaaaaatgtaaacccatccaagagggagttcaaggagaaccaggaataagtgagcaacgttcctaaaaaatgtaagggcccaatctatattcttatagattgctgcataggaattatcattaccaaattagaaaatatcctataaacacaggtttctctagaaatggaagtgcactcaaagacaaaaaccaagcatttgcctagtgaagttagctcatatgcaaatcataaaatatgcttccaagacaccatttgaggaacaaaagtgtacatccttggctttcactgaccattaaagatatatgtggcatttagtgccatctgcctctgctgcagcacattcagatagaaggtagctctgtctcgtacctcgtcatcagtatccatcatacacctgtccaggggaaacagaatagtcatgtcacagtaccccaaagacttccaatagctctactaccaaatctaaaggacacagctcaggtcgtcatctgatactacctttaaaaaagtgctcaacaatagccaacagtggctcctaaagtcttcacaaatcttgggtactgctctgaattactaaagaaatactgctactgtgaatcacaagcactacataagtaggcattaaaataacgaggagcacaagaacatgaaatagcagtctggagtcttttcttccatctgtaactacatgaccctgttgaagacttagacttctctgtaattaggaaatgggagtattatactctccaaggatactgaaaagataaattcaaaatccagccactgtttttgctcaaatgacaatttgttttacgtaaactagccaacctttggcttgtaatttatctgcttcaattataagatgcaatcacagtttgctaaagcaagtcttttcctcatcaaatagagtcatgaagacaatgaaaaactattatttttaactctgcatagtgaattacctaacagtttttttaagtaagcccctgttgtacaaattgaggcaaatgtatttaagtcactttctcaaaatcatgtgagagaaagccaaaatcaaatgtgacatgtacctagcaaataaaaccctatggagaactaatattttagggaatggggctgggaagagaagctctataaataagagtgaggagtgatggaaacatgtaggctattgtgtaaaccaaggctaggggctttcatgaagtgatcagtcaatagcacatcaaattgattgggaggtatacataattactaaaaagagaaaggaattgccatttgcccctgacttgctccaataactctactcttagggcttagagtgcatccgccctatggtagaatgaggatttcactgtttaaccatatagaattcttatttttttttagaaaagacattatttaacttacctctgtaagagtacaaggatgcttgggagaagactctcattctgagccccaaatttagccaaagcactcacagcagctataatgaagcatacaattatggtacataaatattggtttctcagagttaaccaataaccatttgaaaaaaaattagaaaagtgtccccatgttcagtggagataaactcccttgttttattgagtgtttcttgatcttatttctttgatactgttaagcataaatagaattctgcaagcccaagagagctctgaataggaaaatcttccaaaaattgaggaaaaagattcatatagattttctgtaggagctatatctccaccccaccacaaccccttatatatcacactgatgtcattaagctctaatctcaaacaaccagccccaagcataaaaagaaattctattattaaaattcctctcattcaacaaagattcattgttcaccaaacttttgtcaggaattgtgctaggtactgggacagataaaagacatgtccctgatctcaaggagctacactctagtgggaaagataggtatgtagagagacaattacaagacatcataggtaagtccatggaagaaatatatccaggatgctatgtgaatacacagaaaggaactaaatccgaattggtggtggaaaactaagacaaagagttaatacatattacttgagctaaaatctgaagaccaagtactgttagccagaggaaaaaggcaggataagagtattagaggcagagaaaataacacgttcgaatggcccctgcccagagaagaaagtgtggtgtattactggacagttgggcaaggctgagcaaaggacccatgttggagagcaagaagagacaagggagagactggcaataaaacaaaattagggtatggtttaatctcaacattattattaaaggatattaaatatgagataaatttgtacatttgaaagtcccccccgccttttcttttttttttagcagagtgtaaagaataggcaggatatatgtgagtctagaagcagtcagatagctagggatctgaaacggatgacagcctcaatcagcaccaagaaaatagaagagaatgaagaaatattaaggagacacaattgaaagcgctttgctaaagaacagataggggctgtaaggcagcagaacaagattctatcttgataactgagtggatgatgaatgtgaggttagtttgaatttcaggttgagtttgaagtgctttaagttatttggacaaacaagttcaggaaagagacatgactggaatgtcacagcctattagcagagctctgaaaatgatcaccaagaggaatgtagatgttgagaagtcaaaatcttacagagaactaatattttaaggaatggtgctggaaagaggagctctgtaaataagagtgaggagtgatggaaacatgtaggctattgtggaaaccaaggctatggggtttcacgaagtgttcagtcaatagcacatcaagtggactgagtgtaaacaaaggtaagaacattaaagtatctaacttgattttacaactagtttataagtaattttcaataaaattacttgaggatttttaagggagagctacattattctgagttaaagagaaaaatggataatgaattcatgcaggcagctaataacggctacttcaagtttatctccgaggggaaggaaagtatagagtcagtagctagtgaaaagctcatagacagtttacatctttaatgggagagatttggatctattcatatgctaagggaaagaaagattagggaggaaaagtcgcttaaaaatatatatatagaaacacataaacaaattctacaaacattcatgcttacggctataactgaaaaaacggatgagccatcatagtattcctatcttactgaaagcgaagggttatttgtctaatctaaggcaaaaatgagggtggaaattgagtacaaagaaagatatctgggmcctaagcatgctctaaaatcccaccatccaataaatcctgcaacttcattttccaatttcattatcactctcttaagtatttcaaaagatcagcatcgtcaatatcagtgtcccaatgactcaccagctctgacagcctcattctccaggacaaccctattaaaaataaaacggatatatttggaggggacaggcgttctagggccctctttgcccaacaagtgtagaatcttagtagccagaacagtgtgttcacagtcctcaatgaattcacaaaggtgggctaggcctgcttctttactctcagggttctcttccacaatgctgattatacagtccacaatggcccgcttgtactcaaagcctccctggcaaaaaagaagataaaactgccattcattctagggacacattttggagaaatgcttacactccaaggtttatgcttataatattcaaatttcatttcccaccttttatgaaagaagcaaaagtgttttttctccaagtggggaaagcaaagcaatggcatgtttagtaataagacagtaaccagacttagtgtactacttgagaggcatactgagatgataaggaaatcttaaaacactatggtatttcatggcaatcctaagaatttaagacagcaacttcctatgattaaaaagtagtctacctacatcatctcggagcatgttggagaggaaagtcatcatgacactgtgctttcgagggtatttctgacagagagcactaattgcctgtacaaccaccacctgtagaaaaacaaaaagaatattcatttttatgactgtacaactaccacctataaaaagcaaacagagaaaagacattcatctttataattatggctactaaacatactttcctacttactacaagctaagaagatcctgtagttgcctaaaatgacaataattgttcttcatggaagataaccaaggagaccacaaaggaaaatacaaagcaatgtaaaaataaagttcattcaacagatcccttccctctgtctcagacaaatgatcacatcaaagattttaaagtgaaccataaagataaaaagcttgaacagactgacttccatagaagaatagagaaagctatcaaggaactacttcacaaaatggtttctaggggaattttaccacaattttaaagaccagtgtcagccaggcacggtggctaatgcctgtaatcccagcactgtgggaggctaaggtgggtggatcaccaaaggtcaggagttcgagaccagcctgaccaatatggtgaaataccgtttctactaaaaaaatacaaatattagccaggtgtggtggcgtgggcctgcagtcccagctactcggagagcctgagacatgagaattggttgaacctgggaggcggaggttgcagtcagttgagatcgcaccactgcactccagcctgggtgacagagagagactctgtctcaaaaaataaataaaataaaataaaataaaaataaagaccagtgtcaagatgtgtgaagaacgtgagattttaccctgcttgtggctaacaagttaacctgtcacaatttcatggatgctggtagaaaacaagagactcctggctcagcgatgaaagacagttaactactcacagcagtagcagtagccagagtgtgagcattttggggtgggtctcctgagccccaattcccaaagtgcaatgcaaagagagccagataatacctggtcttgcagtaggctgcattactgaataagaaccctaaggatggaacctgaacattttacagtggggagtaagtatgcctgtccttttttccgaaggaaaacattattatattggaccataaacatgtttactttttgctccagagggctttttgctctaaatactattagtatttcctggggctgcaaggaaatcttccctttcctttagagggagacatgatctctatcttctaaggctagaagatgtcttgtattatagaaagggaatacagttatggtagcaggaaacagagggcagttagcgcctaacttgcaagatgtgcagaaatgagaagagactcatggagaatttagaattgtctaccaacaatcggataaccccaaatccatatatacagtttcagagcatagaaaatgaaagaaaatctccataatgtttgtatgaagcaatgatacttaagcctaataaagatggtatatatgtacagaaagaaaaattacagactaaaatcatttataaataccgatgtaaaaattctaagaaatatattagttaatagattctaacactaccttaaagaaataatgcaccatgatgaaatgggttttatcaagaatgtaaagatggttcagcattagaaaattgataaaataacatcacattcatgagtcaaaggattatatccaaaatgctgaaaaggctttgataaaatccaacatccattcctaataaacattcttgaaaaaaaaaggaacagatggatatgtccataacataaacatatatacttcaatcctaatgacagcatattacttaatatggaaccctgaaaggcattcccattgaggtcagaagtgatgcaaggatgccactatctccacaattatttagcattattctggagatattagccaatgcaattagataagggaaaacaaagaaacaagaatcggagaagacaaaacaaacaaaaatatctttatttttagatgacatgatggtatatatgaaaaccctagagaatgaataataaaactaactcgataattcaccaaggtagcaggatataaaattaacatgcaaaaccagtaatattcatatacataaatgataaccaggtagaagataaaatggaataaaaaacatttataatagcaatgaaaaaggtaagttatttagaaataagcattttaaaaccattcaaaactaatataaaaatattttttataaaacattcttgaaaggcataaaagcagatttgaacaaattaaaagacatccttgttcttaggatgttccaacatcatcaggatatgtattctcccctaacttatgaatttaacgtgatcccaacagaaaatgtcaacagggttttttatgaagctagacaacttgatactaaagttcattagaaaaataaacatgtggctgggcatggtggctcatgcctgtaattccagcactttgggaggtcgaggcgggtggatcacctgaggtcaggagctcgagaacagcctggccaacgtggtgaaacctcgtctccactaaagatataaaaaattagctgggcatggtggcgggtggcgggtgcctgtaatcccagctctttggggaggctgaggcagaagaatcgcttgaacctgggagggggaggttgcagagtgagcagagatcacgccgttgcactccagcnnnnnnnnnnnnnnnnnnnnaaaaaaaaaaaaaaaaaaaaaaaaacacatgcaagaatagccaggaaaacaatgaaaataaagaactatgatggagggctaagcatcctacaaagcttctatatttagaacagagtatagcagtagtatatgaataaacagaccaatatataagtagaaaagacactccagaaacagactcaagtacatacgcaacttttttgagtttgtatgaacatacaaactcaagtacatatgataaagatgatgtctgaaattactggggcaaagacggtcttaaaaattttctttcagctttcccgtctacagaaaaaattaaaataatttttttttagataaggtaatgtggtttggatctgtgcccccaaccaaatctcatgttgaattgtaatcgccagtgttggaggtggggcctggtgggaggtgactggatcatgggggcggatttccctgctggtgctgttcttgtgatagtaagttcttgtgagatctggtcatttaaaagtgtgtaacactcctccacaccccccttggtcatgctcctgccatgtaagacgtctgctcctgttttgccttccactgtgagtaaaagctccctgaggctgccccagaagcagatgctgccatgcttcctgttcagcctgcagaactgtgagccaattaaacctcttttctttataaattacacagtctcaggtgtttctttatagtagtgtgacaacatactaatacagaagatcttgctctgttgcccaggacagagtgcaatatgatcacagctcactgcagccccaacctcccaggctcaagtgatcctcccacctcagcctcccaagtaactgggattataggtgtgcaccaccatgtctgactaatttttgtatttttttgtagagacagggtctcactatgttgcccaggctggtcttgaactcctggactcaagcgatgcccctgccttggcctcccaaagtgctgggattaaaggtgtgagctaccacacctggctttaaatagaattttggggggcaactaactgtgtagtcaatggaaaaggataagattgaatctgtttatagcatatataataaaaaaattcaatggaccagagatctaaatgtaaaatatgaaactataaatgtattagaagagaacatgagtgaattactctaaaatttgaagggaatataatttttaattatgaattcaaagtcaaataaaataaaaggttggcaaatatgactacctaaaaaaaataacacttttgcatgtccaaagacatcataagaaaagtcaaaagacaaatgacaaaccgggagaagatattcataacatctttcacagataaagagctaatatcctgaatatacaaaaaaattaaggaaacaaaagactaaaaatcctaaagaaaatgcggaaaatgcagcctacccaacccattgcagcttctgccaacaccaacataagactgcttgtgtccctgtaggttgctccaacatcactactgcccatcacccacaccaccccagctgccaggggccggagaacccactcacacactgagctcactgctctcagtatctctttctagcaagccaccttgaggcccaaggatagccctctagtacccacaaacactggagccagtgtaagctgggcctaaaaataggcacatttggtgtactgctgccactactggagcccaaagactgactgactatgtgtccagatccccagctaaacttcaccacaacctcaactaatgcctgtaccctaagtcactgaggaatcatagagaccactgaccctgtgtactgctcaagaggtcatacgaagatcccactaccacaggcactcaaaatcaaagccaaggtatcttaataacaaatacacgtctttagcaaaaaactcactcctacaaatgcaatttgaaaaaactagaacagcaactgctacaccagatgcacaaaactgtctgcttgaatacatgggtaaagtttgttttttaaaagtctggatgcatactaagtagagagtaaatagggttagttatattacttgactgagtataaaaaaagaatgaagcaataaaatgtttctacttttattcttttaactgaaatttatttatttatttttttaaaatcatctctgacatactctcaccagttctattcaaccctgttctggaagtacttttttaattaggcaagaaaaacaaaggaaaggcatttggattggatataaagaagtaaaactgcctctattcacaaatggcacaattatttatatagataatctcaaggaatacgtataatgatgactagaaccagtaaaagtactcagcaaggttacaggataccaagttaatatggagaagtattttttaaaagtttttcattaatagtaaacaataaaataaaaattttaataaaatatcaaaagcataaaatatttagatataaatttaacaacagatttgcaagacctctagagtaaacactacaaaacactgctcagagaaattaaagaagatctaaagggagagatataccatattcatgaaatagaaaaataatgttaagatgtcagttctccccaaattgatttatagattcaacacaatcccagtcataatcctagcaggcttgtttagtagaaattgataaattggtcctaaatttcataggaaatgcaaaggaaccagaatattaaaaaagaaaaagttggaagaccgcactacttaagaggtaccataatgctacattaatcaatattagtgtggtactggtactggattgacaaacagttcagtaacataatacaaagcccaaaaatatacctaaaatatatgggtatttgctttgtagacaaaggtgccaaagcactccaacagggaaaaggaagtctttccaacaaattatggtggaa

SEQ ID NO: 97167 - DNA, 15156 bp, Homo sapiens
ctggttatttcagcttattagctcatgctgctgtgtgagcaaggttgaggatttgttccttgaagcagtcagaggatctccaagaaaaaaaagcatattatgtgcttacaaaaaaaaaaaaaaaaaaagccgttttacccccaactagctttttcatgaatacacatcctttgtcacagggaaagggttgagcaggaaaaaaagtgaatagcttaacacaaatctatcctcactatggaaaaaaaaaatgtcttcccatgtggatctcacccagggaggagggcatggttggctttgagatcaagtagaaaactggaaatgggtttttccccatggggaaggtttcctcccctttgcccaggtctgctggggtcgggctacccacagttggtgaggagtaagttcaggagttccccatcaattcagtcccccagccacacaggggtcagaggtgctgctgagtctctgccttctgacagaccccacaacagcacaacaggacaacagagcacaaagccacagggacaagggaagaggcaaaacagagaacgccttacagccctaatgttgaatctaaaacaaagaacagcgtcactgcagcgtgagaaaagtggcaacgggctgtggcaccggcccttggttagggcatcacaaagtttaacgtgcacgggaatcacctgggagtcactaaatctgcagattttgattcagcaggtctgggacgagcctgagggtctgcatttcttttttgtgattattattttgtatttatgagacggagtctcactgtccccgaggctggagtgcagtggcacgatcttggctcactgcagcctccatctcccaggattaagtgattctcctgcctcagcctctcgagtagctgggattacaggctcacgccaccatgcccagctaatttttgtatttttagtagagacagggtttcaccatgttggacaggctagtctcgaactcctgacctcaggtgatctgcccgcctcggcctcccaaagtgctgggattacaggcgtgagccaccgtgcccggccaagggtctgcatttctaaccagctcccaggtgatgctgatacagccagtccatggcccacactatgtacaaggagccaggttctgaaccatacgtactgtgtctctctcacgtgtgctggacatggcaagtatgtattcctcatgacatttaatgtgctcatgttcttcagtggtttaccttttgctaataaatctcagtggtttcctgatcattccataatcatgatggcattcactttattgagtgggagatgaagtgatgcaggaatgagccaatcctaatacattttagaagtgtattaatcctaaataaagcctaaaatcatctattttcttcagtaattgtttccatggtgggaggttagggggagcttttgaggtgatttaaagtcattttcaaagcagatgaagacggcaacctgagctttctgtcaggacatgtgtgtagactggagacctatcacatccaacgggaccctcaggccaatccttttaagcagggggctccacccagccccttagcttccctactcccctaagccccttggttgtagacagtagcttcgggtgccaggtgggaggccatgccaaacaactatagccaaagagcatgtctctgatgccatttctttggtggcctaggacagaatctgagctatttccactagaggaataggagcttcagcagggggccttggaaatgtatccaaggtacccacctcctgtccttctttctggaagcatctggccctgggaagtagcatcccgaccactaatatcagggcactaatatcaggcaaagggaggaaaagttgcatcctgaccactaatatcagaaaggcccctcctcccagcccgtgaagaggggcctctctgggtgtgtacctggaaccctatcttggaagttaagttttgtggtcactgctaccaacacaccaactcccaggacacaggatactagggacttctgtgccccatcagtggacaagtcacaagttcccaaagcagggtgaccaatcgatctggatcaggtggcagggcctcggatcttaactgtccatttcattgttatgcacacaaacttatcttagagatccggccatctgcctgttcccgtcctggggatacctgcgggaaggcaggctgtgcctcccagaggtcatctgggctgcaaatgggtgccaagaccttcctctgcccctactcaggactccagactcctccacatcccctggagatactcaaagcccatgcccacagtaacccgtagggaaactgacccgctctgcctgggagctgctcccaggagcctcagcagtggcaaccaggagcttagagaccgctgtgcctctccctgcccaccctctccctctcatcctgccccatttctctgttgtctttcctctttcctctcttcattgttcacagcactatttaatctccttcccctctttcttcccttattcttgttctgactctattcccaggtccagagaggcccagaatcttctctgctcctgctccacctcctgacccactgccccctgggagcccctggtcatcccagaagcctgtaagtgcacacagcagccaagacccacatgcctgcaatgggggtggcacaggggaggcagggtgaagagcaggacagacttgcaggtgtttttttctgggctgcctggcttcatcaactgcaacactccagcactttgaatttttagcaattaatgccccaagtccccctccccctgagtccctgcagagcagagggaggggcacctgcaaagagaagtctctcccaggaatgggtcacaccaatcagcatgtatgtggtgtctttcatgtagcaaatcagagtctttcatattcaatagctgggcctctagagggaccaagctttgctaagcaaataagcttgtggggttggttcacatccatccagaaaagcaagaatgaaaaataaacttgggaaagtcagctccacaggtgaagctcaaccttctgtgcatctgcttggcatggagctacatttgcaactgaatggctcatttatttaactattgcacacattatgggctcttaaaacatcaaaagaatgggttttattcccaacaattagctcttgaaataaaagaataaacatactttttttttaacttccccagactctgttgaccaaagtcgctttcacaccagtggagtggaagctccaaaatggtatcatctggtgggaatttaaagacttcttgtccccaaaaaaccttttcgtcactaggcttaaaattttccattgggaggccctggctttgttttgacacatgatccgttattaacacaccactcattttgggaggggaatatcatcaagtcccagccaggatgtaaaccccacgactaggaagcctcgtccgctgggtaccttggtaggtcccagggccgagcacagtgcctggcacgtgagaaataggtgttgagaaaagttatttcactcttccttttctaactggaaaccaactccaagcacagatttgaggggggacgagcagggaggcacagtagataaagcctgtgagttactgcgcccagcgagaaaggggtcggtggagtcaaagagagaaggcactgcgtggggagatggaggcaggttgaaggcaacacttggagtccctatagtcctacaattgcagtgcaattgcccagaagatatcatgctaagaaaaggagggagcctcagccctcggcctccgaggagacctctggggacatctagggcagcttcccatccaggacagatatctgaaagatcatgaggctgggcttgaatcctgctgacaacaagaaacttactacctatgtcccctaccgctgctatggtccgcctcctctgtcagctcatggtatttgagcacctactaaatcagcaaattaatagcttctgcctgggggctgcttccacactccactaatagccaatcgctgggcatctcagagccgagagaggaaggaaaattggaaaatgagtctagaataaggggcctttccaaaatgtgtgcttatggcccagacactcctttaaccctaggttttccagaaagtctgttttgccccaggactgtggacagcattatgttttgtttggtgagctttcttttttttttttttttaggttgtattttataactgaatatggcatgtgtgaaaatatcagctaccagactctgttagtccaggcgtatgaatattccagatcacaagggaggtgtgactcccctgtgaattgcaatgcggaaggtttataaagttaatcatttagaaatctgtctttaaaatttaaatatttagattgggtcgctaggacacaaaaggcaattcctgtttctcactcacttaatttgatttttttttcttttggtcgcacaagttgtttttcaaagcctcattcctcgaatgttccctataggaggaatgtaattaaactccactggcctccccctgctgggaccaaacaggggccagagctgtagggagcataaaacagatatcctgcaaaagaatccttattataaagatgagaagagaatcaacttccctctggttatgaacaagaagctttagaaagccacccaggctatttttgcaatgggcttagtctccaagacattttaattagtaatttaagactggaaggaaggggataaactcctcacctccctggctataggcaagaacttcaactggatgagtaactggttcaagtggctgaaaaggagggaggtccagagggagggtggttccttaaaatgaaccaactttttcatgaaaatggcatagctagatatcccggcccccagtcagtcactgtttttgcagtcccacttcttaaggcagttctcacccctcaccagaggcaggcactgcctctctctgggacactcggctggcaccagagcaaagaagcttgtgctgagggatggttcccctcacaccgggccaacctggacttctctctgaccaaagagcatatgcctcccaccaagcgagaaggtggaaagatcctggcagggaaccccgagacctgggtgctagcatcatccccgccatgagagcacacggggcccctgagctgacacctgctggcaatgtgacgtggatcactcacataatcccttccttagtttttctgtctgtaaaatggggatagtaacattgtgtagctcataaggttgtcaccaagattaaacgagttaagaatacacgtgcaatgtttgaacagcgccagcattacgtacatatagctactctcattcgcctttctgtgactcagtttccttatctgtaaaagaaaaaggttggactagacctcttctccactgttattgatgatgatgatgataaatgaatgtttctgtgccagatcctaaactaaacaaaagttaacttgatactcacaatggctgtatgaagtgggagttatcaccatccccatttcatcagtggggaaagaaaggctggattagtcagggatctccagaggaaccgaactaataggacagagacagaaagacattcattttcaggaattggctcatgtaatttatggagtttggcaagtgtgaagtctgcagggcaggctggcagtttggacaaccaggcaggagtcaatgcaacagtctagacacagaattctttcttcgccagaaaacctcagtttttgctcttacggccttcaaccgattggatgaggcacgcccatattattgaggataatctcctcaaagtcagctgattttaagtgttaaccatatctaccgaagaccttcccagcaaccctgggattcatgtttgattaaataactgcacactatagcctagcaaagttgacacaaaagactaaccaagctaaataacttgagaacataagataataccctaggacagggcctaggtcggattggcactcacgtttcccgactccttagtctgtattcttttcaaccttgtctctaatattccatgattccatggttctgatgccattcctcagcgctctgctgttcttgcctgaccaagtggatcaatggtggctctggcatttctataaaggggatttcagggctgcctgctggggagggaggcttgaagctgtgtctgcactgcatcttcacagcactgagaaaatgccagtcattcaggaggacagggcagccctgtcctcgccacagtgcccgcatcttcattggttcacctttgcaggtatcatctgtgacctgtcatccaggctctgagccctgaggataataagtytccctcgaaggtcctgggtttgttggagctttttctccctcttgccatgtccttttcacggtccatcctctgagtttgtgaattatctttcttcgtggcccatgtggcacaagatgaagagtgcatgggcagcttctcccctgacatccctacctccctgacgcttaacccacatagggaagaacattcctgaaacagagacgtcacccagggttgctttctgccacagcaggcactctgcttcgtgcctttctcacttccatttgtaaatgatcttgtctccttccttgtagaaagcttttcagccattccaggctttctctttgggttccatccctctgggattttccacgaattgcatttccttgtagttcattttcatcattttccttgttagggaaatgcacctgagacattggcatgcagcctgattgcccccggcctcccctctgctcattgccagagctacctctgcacagaggagtcactctcctcccactccagggcctctgtcaggggccaggcttgatgctgtcaccagccagctcttcactgctgcccagtgccatattcatatccattgagacaagtccctgggaaatggttgggagccgggggacagccctgcatcctgagatcctaagatcagggaggttctccctgcactcccagctggaaggagactggatcggccaccctcaccaaattcccagattctctgactgaagcaagccagtccttggtttgaatggggaatcaactcagggttataaaatagacgccagccttcttgtaggtagaatctgacttcagacagcaaaagactctaaaacagcttaaattcctgtatatgccttctcctgtgcatgccaccggtcagaccaaaggccacacgccaatcaaggcccaagatcagccaggggtgtttccatgtcctcaagaacttttacaaactgtagctgattgggttccgcccctggagattcgatttagtgggtctggagtgaggcctgggcttcttagaagccccagcggattctaaaatgcagccaggaggaagaacsttgccagaatcccatgaggcacagatgcaaatgtgcatagtgacattgggttgcattatcaatggcaggactgactttataaacctccacatccttactggagctgctgtttgctttttagaaaagtccctcatcagattatcaggaagtcgtgggttttccgtgatcatgctgtggtcagatccagcccaaccagagagccaaaaacaaaacaarcatacaaaacaaacaaacaaacaaacaaaacccaaatccctggcaagccccacgaaatgactgctctgataacattcagcagacaagcctgtttgaaatcatctcagaatcataccagacccaaacccaagaggtcatctggtctatgcatcgactctaggagggtgtattagtccgttttcacgctgctgataaagacacacccgagactgggcaatttacaaaagaaagaggtttcatggacttacagttccacatggctggggaggcctgacaatcatggtggaaggcaaagaggagcaagtcacatcttacgtggatggcggcaggcaaagagacagcttttgcagggaaacttccttttttaaaaccatcagatctcgtgagacttactcactatcacgagaacagcacgggaaagactcgcccccatgattcaattaccgcccaccagtttcctcccacaacacaagggaattgtgggagttaaaattcaagacgaggtttgggtgaggacacagccaaaccatatcagagggtgaggggctatttctccatgttacagacaaggcacgtgaagcctagggacgttccatcacaggcccacaccttgtctcagaattaagaggaaatgcttctggctgccaggggtggggtggggtaggatgcagagcctctccctccaccaccayctccatccttttccctttctctgaaaatctcatttgatgattccccagcctggctgcaaattaaagatttgtagacctgaaagatgctaccgatggttatcagcaccaccaccaccatcgtaacagtaaacatttatggagcgccataattattcataataatttttatgtgttaaacaaatctgacctagctctataaagaaataggccctgttaaccaaaaatattggataaattaaaagtctcctagaagcatctgatgaaaggatctcaagttccataacacacggaccattcagtggtgttgtttctgggcttgattcactgtgggtcacttgaacgatgtcgggggtattgtccacctcccagtgctcagtctgtggcttgtggccagctgttcctctgtggggtctatgttggctgtgttaaggcctgctgcagaaacatctcatttctagcatgtttttctcaagcagtgatcctgtggggtcaagtcttcaatatcaaataatattgataataattatgatagaaataataagaggccaggcaccgtggctcacatttgtaatcccagcactttgggaggcagagttcaggtggatcatttgggcccaggagttcgagatcagcctggtcaacatggtgaaacccagtctctactaaaaatacaacaattagccgggcatggtggtgcacacctgtaattccagctactcgggaggctgaggcaggagaattgcttgaaaccagaaggcagaggttgcagttcgctgagattgcaccactgcactccagcctgggtgacagagtgagactctgtctcaaaaaaaaaaagaaagaaaaaagaaataaagaagaataataagaattatcagtcattgaacacgcgctctgttcttggtgctcttggtgttattccaggcaattctaacaccaattagatattttcccctattttaaagattaaagcaactggcgcagtggttcacacctgcaatcccagcactttgggaggccaaggtgggaggatcacttgaggcagggagttcaataccagcttgggcaatatagtgaaacccctgcctctacaaaaaaaaaaaaaaaaaaaaaatcaaaaattagctgaggctggtggtgcgtgctcgtactcccagctactcaggaggctgaggtgggaggattgcctgaggccaggagttggaggctgcagagagctatgatggtgccactgcactctagcatgggcgacaaaacaatagtcttgtctcaaaaaaactaaaaaagactaaagtgaaattgaaattcagagagtaagtgacttcaaggtagaggcagaaacagaggctggatttgaattcgatcctctggctccagagctcctgggagttatcttgggaatgactgcaaggtctgaggtagatcgttccaggagcaggtgcttatatacagtggaatggcacccactggcacaccgctaggaattctgttttcttaccaccaccggagccaggtctctgtcacggtgatgagaagttcccaaagtcatttctcctctctagggtgtcccctctctgtctgctgccactaaatccctaacgacattagagcgaataaatggcatttttaacttcagctttaagcaacaaagaaatactattaagtcaagatgtgtccatctttaccataaaaaaaaacaaaaaacttgcttcaataaccaataaacagatcaaacaacagaaaaataaatagcaaaagacttcagggctcgatggctcacacctgtaatcccagcactttgggaggcggaggtgggtggatcacctgaggtcaggagtttgagaccagcctgaccaatacggtgaaacccgcctctactaaaaatacaaaaattagccaggcttggtggcgtgagcctgtagtcccagctactcaggaggctgagataggagaattgcttgaacccaggaagcagaggttgcagtgagccaagattatgccactgcactccccattctgggcaacagagcaagattccatctcaaaataataataataataataataataataataataaataaatagcaaaagaaagaaaaaaccctcagctaagaagtatactgttgtgttttttggggttttttttatgtaacatttgacaagtttacattttccttgtctgccttgggtgccttaaaataaaactctgtcaatatttccatgtaacattgggttttgcttttttttttcctcacgtaaaatccacatatcaggaattcctctatttattccgtcgcctgggtttctttccttgggaataatttatatgtcaaacctgtcatttatcgatttattgctgtacctagcagcatttttctccctgccctcaaaatttagcttaaagaccacttaataaggcctgtgcgggtcctcagactccagagatttctgctgatatgagccataatttagcaaaacaaatcctgctcattgcgggcatctaaatggtatcctgttaaatttccatacatgcttttcttttctaaagttatggcctacaactagaagaagggatgaaacatcacccctacctccacatcttatttcctgtatcaaatttcgaagcccttggagatgcaaggcgggtttccctaatgagttgagaatcaatgcgaatcatctgaaatgagaggtggcccgtgggtgtaatccatccctgctggtgctccaacttggttacacatttccagaaaccagcacctccctgttgtccatgtctggtcatcagaggcctctctcctcaggtgggataaccagagaccaagaaagaaacatgtttctctcccttggaatttctcttccttagtcattttcagaaagttaggagtcggcaaccttaaggaggagtttcctatcatctctcctccacttcctcccctcatttcctccccgtcttctccttggagtccttcatcaatgtctctattttctgttcaggataaacaaagagtccctcttacctgcacaggcctcacctgccttccccccctgtcatttctgcagccagcctgtctcctgagcctggcctggcattctccaaagactccttaaggccacttggcttccggtctgcctctaggcttcactgtctgcaccagagtggaaattgtcatgtgccctcagcaacattttacccctcccttccagaacagacacaggcatttcttccacaagcagtattccacagatgaaaaaaaaaaattataaaagcgaaaccaaaaatactggtagtatatttttttcccttcaaaagaatgataatcatcagtaaaaaccacaacaacaaaaaactaagcaaagcagcctgaagataggctgaaagcacacatctacggatggcttgttgttgttttgtttttgttattgttatttttgagacacagtcttgctctgtcacccaggctggagtgcagtggcgcgatctcggctcactgcaacccccacctcccgggttcaagtgattctcctgcctcagcctcctgagtagctgggattacaggcttgtaccacccatgccccatgcccggctaatttttgtatttttagtacagactgggtttcaccatgttggccaggctggtcttgaactcctgacctcaggtgatccgcctgcgtcggcctcccagagtgctgggattacaggcatgagccaccatgcccggccaggatgttctgaatattaaactagctgaccggtggacattagctgtgctgtggaaaagtgaagcagaatggctttttatcccttgtgtatgatcatcaagacacaggacagcacagagattcaaaatacaatgcattccccttgctcgtctggtcaggctcaccttcctattgcacagggttgattggttggaggccgccaacctctagctgaaaggcagagacagtctcccctgttatttcggtaccaagctgtgtttcttaggcattaaaatggagggaaagcaaccactggcccctcactgggattgttcttgaggattccagacagaccataagtaattcattgagtcgctcacaaagggcctggccctgaaggtttgtggctgcagcatccaggcgagccaaaggtgtcagtgccaccaaaatgcagagaaaactcttatcagaaagatgtcatttttttcccctaaatgtcatatatacaatttttattggagtgtgatgacagatagtgaataaattaacataaatttgcataatacaatacagctgttaatttatgatcatattaaaacacaaagttttgtcgtttgaagcagttaaaagtcttaatcttctgaaaatttccctcttgtttgttatttgtttatgagttacttagggttattagataaaatacaggcttctggttaaatttgaatctcagataaactgtaaataattttttagtgtatctcatgcaatatttgggacatacttatactaaaaagttaatcttattgtatatctgaaattcacatttaactgaatggttatattaatatttttatttgataaatcaggcaactctgtatttcataagcagtttaacctctctctactggctcttctctggcagggcagaggggtgctgttttatggagaaaggcacttactgctgggaccttgatatctttagactgtgggggaggctggctctcctaggaacactaacagagtcaaagagatcagacaagagaggtgccagtgcaaagggggaaactgaggcaggcagcatgcctgggctttcttgacagtaccaggggtattatagccctgttttccagattttttggactacaatctcatcataagaaatataatttataattcaacccagaacacacatcccttataaatggaacaaaaagttttaggaaacatgtcaccttctatgtacaatctgctcgacatcctgttctagttgatttcatttctttaaatgccactcttaaccccctaaattgaattcatggattgaattcatggtcccctaaaggatcacagcccacatgttgaaaaacactgggttagagggtcacagttcaggaaaatgaacgaggaggttttttaaaatctactttacaaacgaggaaatgtatcgggttccttaagagcctttccaggaaaatttttgctcatttgtggccaaactcgaaataaaacttaggtcccccaactcccaaccctgcgttttctggtttccttccaccactctttctagtatccattttcctggtctccaagttgtaatacacattctgggatccacatttacttgttttattttacataattatattacttgtatactatttccttatacttcatattcttctcaaatttccatgttttatatcatttctgatgcaaactgattacatcattgcttatggcacattcttgactgatatcaacattttaaaccaaattgtcttggtacgcaccctctgatctttggcatcttactgccctgccccatcttcaacctcggctcactattttggtgcctcaggaggtctcaaccatgaaccttccatgtgctctcactgggattggtgccatctgtgacataagaaaaacatagaaacataaaaacataagaaaaactattatttgttgtgatttgttctccctaatctatgaagtcggtagggtatctgttataaagattcccttctagagtcgagaaaacagaggctcagagaggttaagtgtttttctcagggtcacacagcaaatacagaactccagtcttcttgctgtgtctcttaccctctgtcatcaggatgcaggggctgctgagctgagatgcctgcagatgagtaaactggcgggaagaaagacaccaacccaatagatctccatgtattttatatattttctcacctactcagtctagattttcaaacaacatacagaactttctgggatcttgtcatcattcagtgtactgtcctctggatcctctccaggagccgcccactccgcacacatttttttttctagttgtcataaacaaatttcaaagaaagccattttcccagagccctttcttgtgactctaccacagttcatcctggtttgcagaatccaaactcagggcttccttccaatatttttattagttcagtagtcgatcagtttgcacagagaagtggattggagctccccttcccttggagctgccagtggagaaagtctcctccaaccctcaggctcagcaccactcagggccagtgagatgcacaaacagcatcttgcaggtaccacaatgccttcatcacttgtatcttccccgaccctgtgatgaagtaggatgaagatggctgagggtatggacgttgggcccacctccctggcttaaagctgctggaccccttacccggccatgtggccctggggcatgacacagttccccctaagcctcgcttcttcactgtttaaaggggataataatagcatctgctctgttagactgagggctggttaagtggaataacatacttagcacatagcctggtacccacttattttttttattttgctactttgtttcaaatcttcaaatcttcctattattccttttttacagagccatgtcagaaaccttagattcacgtcccttccatgtgtcccttccacatgtccctccttgacctgccacaatgcctctgctccacccagagcctcagcacctgcgttctgccccctcagtaaccagggtccctcacctgccactcctgggttgctctctccttttgaactagaaatttttc

SEQ ID NO: 97168 - DNA, 30503 bp, Homo sapiens
ggaggtttttcatcgtaaaaaaaatttaaaaagacttacatcattagattgaaacaatcgcgtcattgcaaagaaggcttctgtagcttccgttgttccaaagtgttcaccctaagtaaaatttaaaacaatttttaaattttaaaaagtgtatattcatatatatgtacatatacacacacaggattttctatttctgcaaaaatcctttagaactcaagaaaaaagaatctctttgtaaacattctgcctctgcaatttttctggctttcaatgcataaacccacatagccatttatccccccttatttaaaataattcagtatcgcataccatgcttaaaagttctggcatagtgatctctaaacttttagtagaaagtatctgaaattttcctgaagtattgtagtttacaaggagggagaaaattacagcactcacaataggacattattattacactgcctaagagcagagatcatatctataatgcccagcacaatgcctaacatgtcatgggagcataataaatattaaaatataaggaactatctattcagaatctcagcaaaatggcaagaaggggaccaaccaaaagggcaggaaccagattcatcatattaaaaaactaggcttaaggggctgctatgtagctcaatattggttcaagcccctaaaaacatgctttggatcagagcttcaaacagtttaatgagcatgacaattcatcctgggatcttgccaaaatgcagattctgattcagtggctctggggtaaagcctgagattttgcatttcttttcttttttttttttttttttttttttttgagacggagtctcaccctgttgctcaggttggagtgcaatggcgcaatcttggctcactgcaacctccacctcctgggttcaagtgattctcctgcctcagcctcccaagtagctgtgattacaggtgtgcaccaccacgcccaactaattttttgttatctttagtagagacggggtttcaccatgttggccaggctggtcttgaactcctgacctcgtgatccacctgcctcggcctcccaaagtgctgggattacaggcttgagccactgcgcctggcctgagatttggcatttctaacaagtgatgcaaatgctgatctgggaactacattttctgagcagtgaaaaagtgttagataacgtatttcaaaacatctcaaatcatagattacctcaaatattaccatttcaatatttaatgtcttcactaaaagcaatcttatataatacgttacactcaatcacttttcagagcttcagattccacataaaatataactagtcttcaatctatttgccataggtataagaataaattttggtgaaaaatactgacagtttaggataaaagacaaagtacaataagtttatacttacttaaatcagtgtatccagcctgctcatcagcatgagatttatctttctttcacaactatttactgaatacccagaagtctgtgtgctttttagttatacaggaaaaccttacatcctacttttttacttgaaactcagaaaacacatggatatgtcaactctcatagaaattcaaaagtatctttctataaagctctaccaagttctaggcaaagagataaaatttatgttcccaaacctgtttatatagttaattgtgtttatgctgtgcttggtaatttccttatcaagataattaaatgtttcaacatgagttgcctcattgaagaggtaatgaccaacataaaaatacatgttactctcaatcaactttgactattcaaaacttttgtttatacaatggatttggccaacttagacacaatgtgtgctatgaaaagttaaacccaattgactatgctttaaatgtttctcatatgctgacacagagggattatgttgtttgtgaacagatatattttatttaaaactatgtgtttgatgatcaggcacagtagctcacacctgtaatcccaggactttgggaagctgaggtgggcggatcacctaaggtcaggagtttgagacccacctggccaatatggtgaaaccccgtctctactaaaaatataaaaattagccaggcgtggtggtgcatgcctgtaatcccagctactcaggaggctaaagtaggagaattgcttgaaccagggaggtggaggttgtagtgagccgagattgcgccactgcactccagcctggtaacagagcgagactccatctcaaaaaataaaaaaaatctatgtgcttgttgcttagtcttcatttgtaaacaagaaaactttattaaatctctgagtgaggtcttcagtcacaaaacaaagtaaagataatatattctcttagaattcaaattggaaaccatggttatcttagcaccatatgtaaaccacctgaggtatatggtatatatgtatgttttatgtgtccgtctgtatgtgtatagacatatatagtcagccctccataaccatgagttctgaatctgtggattcaaccaggctcagattgaaaatattcaaggaaaaaaaaaactatgtttgtactgaacacgtacagatggttttttgtcattattccctaaacaatacagcacaacaactatttacacagcactaacattgcaccaggtattgtaatctagagattatagtctaagtattataatcacagagacaacttatatatgggaggatatgtgtaggttatatgcaaatactacaccatttgtatgagggacttgagcatctatggactttagtatccaatggaggtcctggaaccaattccccactgatactgagggaatatgaatccatgaaacaaaatcatattttctaaggccctagacatttcatgagttttttttaagtctggggcaaaaaaaaaaaaaagaaaaagaaaagaaaaattaataacaacagcagcaagcagaatctacatttcatgagcgcaaatatttttgctggtttgtctgctatatccccaacacctaaaacagtgcacagcacacagcagctacgcaataaatatttgctgaatgatggaaggaaaactattcctgaatgcttactgtatgttcaggactattctcagtgctttacactaattatctcatttagtcattacaactctgtaacaggtattatcataatccccatgtagagaaaaggacatcaaggcacataaaatggttaagctactgcccagaattattctgctagtaatggtagcatagggataataaatataaaatctgaatattaacaatcaaagctttaaaacatcattacacacataaaaaagaaaatatctggaatttgcctgatcttgcactgtattttcagaaaaacatgaagatctccaaatacatgtaaacaacatgctctaactagtactcattaaattgaaaccaaaggatttattgagaatctactatgcgcatcactggtttaggatctcatgaataaaaaggaagtataggttaaacatctctaatctcaaaatccaaaatctgaaatgctccaaaatcagaaattttttgagtgccaatataacactcagtggagacactcatcagagcattctggatttcagatactcagattagcaatagtcagtgagtatgtattctgcaaatattccaaaatccaaaaaaatctgaaatccaaaacacttctggttccgagcattgcaaagaaggtatactcaacctgtatatgtcatagtcctcgtactcaagttttacatattattttgttaaccaaacgttgtatatgttaaaattaagtgaatttaaaataaataaatatactttccagaaagtatttcactgaatcttcagtatttctattccaggacacacttatctgaggaaaataaaaataatatacctggttcagtaagtaaagaatctttgtaagaatatgcaaacatcttcttggattgattggagtttcattgaatatacgagcctatgaaaaaacataaaaaacattgctacttttctaccttttctatcacagattatagcaaatcaactttaatacagactatttttaatcacggtatccaaagaacattgtctatagttctcaatttactaaggtatctgataaattattacacgtggccttgattttccatcctatactttctcattcccttaggttgactacttcaactttatgggctataccagttaaataaggatcacaatacttatctatatcatactaatacaatgagattaatacagataactgatttcaataaccttgcactaaacacctgttcttacatttaaaattcccaacctgtgacagtcttcatgtctttgcatttctataagctccaaattctcctgtgacaagtaacccctctttcttttccctcaaatctatattccctaaactctgttacgtttcttgttttgcatgtcgtgatcacagcagcccagggattctctgcccaccactctaaaacagaatagaaaagaaagggcacaagatacttcccagtcatacctcctgtaaaacagcactcttctccagatgctggaaaggattggagccactacctatttataaaacaaaacaaaaaaatgtcctgaacagctgttctacacaaacttatatactttccagagaagggtactgaatgcttgggaagtgaacacttggatggcacagtgataatcatggctaatacgcatacgaactgaatgaaatcattttgatcccggctctgtcactgccatactcgaagagctgagacttctctttcgcagcaaccctctccaaaatgagtgtcttctttccctgccctctttttccatgaatgttaaaaatgtgtcatttccacaacaacgaagattaatgagattgtagtagggtgcttttgatttccttaggtaagcagtattttatgtgtttctaacacttaaggagaggcagaaacgaagtttcccagagaatcatgcaggcgtaaaggtgcaagaggccatggaggttgactaacccaaccccctctcacactgtgggagatgctaccaaacactgagaatttttttctttttgaggatgcttggcatcttccccatttgctctggaccaaagacgggcatcaagacgcaggtcacttctggacacctgagcattcaacgagctgtgtcccacgggacagtcttgcccccggggacctggacagagccggtgaccccaggaaaacgataaggtaccaggcacctgaacgttcctccacacacaccctgtgccgtcgaccccagccccgggaacagggtgctcccactaggggtccgaccctaccagcacccctggacgcggagacgcgcgcacgccctcggcccccgccggaggcccgcgcgcaggggaggaggcggctcggaggggctgcgccgcaagaggggcgggaacggggcgcgcgcgggcgccggggcgggagcgcgcggcccgaagggaggctccggcgcccgggggaggggctacgggcaggccccgggcagccgcgaggggaggggaggggccggctccagctccggccccctggcacggcggcgcccacgcccccagccccgccggcctgaaagcaggtggcggcgggcgggggaaggggcgtcccgcggctgagggtgggcctcggaagccccgcgcgtaccagactcctcgtccttcttgtcgaattttttaatcatcttggacgacttcccagcgcccagacccaccgcaaccgtcccaggcgccgcagccggcgagcggaagaggctgcaggaaggccggccccgcgctctcacgccggttgggccgccgcgccttcactcggggccaaggcccgccctccccggccgccctcggcccccgggacgcagccacgcccccttctcctcttgcggcccgccggagacttcggctcgaccctcccggcttgcgacccgggagcccacgcccgcagcagcaggaatgtggttttatttgggtggcgacttctgcggacccctcagtctcaagagagcgaggcgggaggactgagggrtctgtgttcacccgatgaccgtggcctttttgataatccactgcggggccctcccgttgcggaaggcgctctccccgggcgcggttctggtgggcatgtcttccaagagcgatgcgagtgtcagtggttcccgaatcacttkggaaattggcctttcactcgctgacttcttggaagctacgacaaagcacaggcaccctggtgaatgtggcttttcagaagtactcgaaggatacttaatgtgagatgtaaaggagacscacttggagggaccagaggctggtctttagagggtagattttggaccgtgtaataccattcccaacctattttataatttttggattccttcatttcatcaaaacccagtggaaaattcattgccagtttagagtcttccttgttcaagcctatttctttcaatgattccatctgaaaccatattgacacttaagaaactcactaaattaacgtgcattcattcctaactcatgttcctctttttctcagagtgtatgctggctttctgttctcttgtctaagagtgtagctaagaaactttgtctgcctttggcttcactggcataacttgtttagaaatgtaaattgggtctatactcaacaggatcgtgcccctgcaaaattagagaaattctaacctagattacattctacatcctagagaaattctttccctgaaatacagatttaagatgaactgttgatatcctacatatggtatcatttaagatttaactccgacttgactaaatgtactattaactactatgtttgctttatatggcttgtaaaggtcaagtcatactttgtaggtggagttttctttgaaggaaatagaagtctgcactcatttattctgggggtgaaaataaacaggctttggggaaggaaacatcctcttcctcttccttggcccaagggtattgggaacctaggcagagacagtgtagataataggcccagaggttctcaaggtgggtaatgccccggagacctgctgagaagtagaaggacctgagttcagatttggggstgaccctaagactagccccttgtaaagcaagatcaatcattctctgctgttcttcagcttttctgtatatctatgaagttttgtttaataccacaggttgtttttagctgtgcagtatttacggagttaagagcatcagtaggtggaaatgggatgggatgtggtggcagataggtatagcaggagcagagaagcctgaagaagccagttaagggatggtataatatgaccccaggccttcggtatcaggactatttggactgaggatggctggcagacgggttgagcaatcactgcaatggctttgtgggacaggcaaggataccttagggagtctcaggaattgtttgaggagagaaacccagtaggagaaatggaccttatcttaaaaccatgagctggtgaagtctgaggacccaccaattatatatatctaatacacaaatgtgtactcagtgccctgaaattcttcattgggtccaaactgcctactggataaaacccaaacctttatttaaataatatttaaggcattgtggtattttcgatttcttgttattgttgtttgtttgtttttcagacagggtctcactctgttacccaggctggagtgcaatggcataatcacagctaactgcaaccttgaactcctaggttcaagcaatsctccttcctcaagccccccaagtagctcagactacaggtgcatgccgccacaccctgttaaatttttttaaattattttttgtagagacaggatctcactatgttgcccaggctagtgtcaagcccctggcctccagcaatcctcctgccccagcctcccaaactgctaggattacggacacgcccagcctgtcaaggccttttatgatctgtttcatctctttcacatattgaaagtgatattgttggtgcttggtaagtgtcagacacttagtaggaacccttgaaatactgttaaataaatgataatatgtgaggaggattctcattgtaccctctgccatacaaccttattccaagccccttctaccccattccctaccccaatcccagagacytttgtacctctaagacacacagacttatcctttggcccttttagagcagttttttcttcaaagtataatatgcataccactgggtggttctaggtggtacatagataaacattttaaaatttcattattataaatttgatataagtgtttcagaaaagcatataatttgtacatcaaaaccatgatatcaatgatatagtattaattaggacaagattttttaaaaatccttttaaaaaatgctaagtaaattaacagcaaataatacatcaatatggcaaaaactattaaagtgctgggtgatatagcttagtaaacactgctagagctttcttgaaatttgaggatttaaacagggtccagagctttgcaccttttgagcctctatttgttgttaacttccatgctatagggaaaaatagtctccaggactaccacgagagaagccagtttgccacatctataatcctcatggattgtatctccagcccaaatctcagtccagtaagcctttgctttgaaagagaggagcttaccatctttcctcatatctctctcatggactggagcaaaggtgagctgagggtacattttcttctgtgtcctcaaagcgtagacttttgaatacttcccttcgctcttgaaatcattgtcagtggaaaaccttaacaaagaaagttctttgtttagtagatcctagggcagggggattcatggaactattcactttatwttattttattttattttattttattttattttattttatgtatttattttgagacacaagtcttgttctgtcacccaagctggagtgcagtggcatgatcttggttcactgcaacctctgcctcccaggttcaagcgattctcctgcctcagcctcccaagtagctgggattacaggcacttgccaccacgcctggctaatttttgtatttttagtagagacggttttcaccatgttggccaggctggtctcgaactcctgagctcaagtgatctgcccaccttggcctcctgaagtgctgggattacaggcatgagacaccgcgcccagccccaccattcactttaaagttggctacattctcagagaagacaagacaatgataggagcctgttgattggtgccaagtaggaatattgttccgtgacaagggatgcttctgaacttaacactgtaaacctttggaggaactccagaatctcttctgtcctctctaaactacacataggctgctcttgtaagtagtttcacataaaacctcttttgtctaatgtgttctcatagcacatggttcctgtgatatagcgcctaacttgtaytgagggtacttttttttttttcctgtttcttcaaagcacagaccttggaatatttcccctcaatcttgaaaccattgccagtgcaaaaccttagttttgcatgactgtttctctttgattcatgtgtcaatgaggttagggtcatgtagggaaagtcgtgtcttactatctttgtacgaccaaagaatatgtcattaaattgtatggcaaagaaccagaaaygtgaatagggaaaagataggaaagaaagcaagtacaagaagaagcaagatttcacctaaaccattgttctcgcttggatgtgggatcatccgacagtatcaaagggaagattggtttcagcttagatcttaacttttttttctgaggcatgcggggcagccagaggttctcagtgggtttgtgctgatgatgactttcctgtagggaaacgagggaagaagagtgagggagtaagctgagtcccttgggattttaagtttggaccaagttcctggactaagttccaattcccctacaatcatgcaacaaaacctgtcagagggggaagtgggaactcagaaaccagaatcagaggaagccgttccctgggagggaaaacactcttttcattgccagattacttgtccaaaacctgttcagtttcctaagtaattgattaaatttgcctactggcccttggaagtgaatggcagagaaagttacccagtttggggaaggattcaaccagtgaagtccttggggaagtaagtatttggcaataaattgggaaatagatccatgggactttaccttcctttcttggagatggctgcctcatccacattccattctccttaatgagaaggccatggaatgggatgttgtgaagtaataattataccattactaaaggtcatagaatcaaagtctttcagaaagaatcttaagtcatccagtctgtytgtctgtccctcctagcccttccataatctcactatcaagtgctcaatctttctttacctaaaaaaaaaaagatttcacctttgatcagccaatagatatctccctgtaacttttaccctatagtccagaaggaacaaatctagtccttcttccatagagtccttaaacattttgaaggaattcatcacattcctcctaagctctgtctcttccaggctaaacattgccaatgtgttgaactttttttcatatgacatggcattgggttcctttttctttttttaatctcattggagaaagctacagttcatattctaactaatgtgcggcaatctgaaatgaaaacaatatgccaggtgtagtaactgcatggcatatcccctggccccatggaagtgtctattcaaaagtcaaccaggcacggtggctcatgcctgtaatcccagcactttgggaggccaaagcgatggatcatgaggtcaggagttcgagaccagcctgaccaacatggtgaaaccccgtctctactaaaaatacaaaaaaattagctgggcgtggtggcgcgtgcctatattcccagctacttgggaggctgaggcaggagaatcgcttgaacccaggagtcagaggttgcagtgagccgagatcacaccactgcattccagcttgggcaacagagtgagactccatctcagtaaaacaacaacaacaacaaaaagtcatcaattctgagagccttcttcttttcttcttttttttctttttttcttttttttttttttttttttgagatagagtctcactctgtctcccagacctggagtgctatggtgtgatctcggctcactacaacctctgcctcctgggctctagtgggtctcctgcctcagcctcccgagtagctaggattacaggtgcgtgtcaccacgcccagttaatttttgtatttttagtagaaacggggtttcaccatgttggccagactggtctcgaactcctgacctcgtgatccacctgccttggcctcccaaagctctgggattacaggcatgagccaccgtgcccagcagagccttcttaactacactatctaacattgccactcacatccatcacattccatctccttatcctgctttgtcatggcatttatcacattacattatctgtgtgatcatttgtttatggtctaagtcactagaattaagcttcattagagcaaagactgggtcttagtcattaatatatccctagcacccgtaatagtgcctggcacatagtagatgwtcaataaatatttgttgaatgaataaatgaccaaactaattaattaacatattgagcttttgctatcagaatcttaaagactttttgtctttaatacttgctgcttctgaaccatgtcttttcaattctgaacttattctctttaagctcttgtattaggatggtgcaaaagtaattgcagttttgcaattataatggcaaaaactgcacttacttttgtgtcaacctaataattttaagggaaagaaatccatttgagttatcttaaataataggttttttactgtaagagcacatgtgcctaataactaagatatagataactatccagccataagcaaaaccctaggagagctggacctcatatcagaaaaacagtaactgaaaagttatttggaatccaagacagcactagtgaaggaccactgtcttaatgcaaacatatcactcacatgtttctcctactttcttcctatctgcttccttcttctccctttaccttgttcactcctcacctttactccataaatatgtgtgtatatatatatatatgtatatatatatgggtttttttctacctatagcttctgcttatttacttctacttcctacttccctataacttcagccttcccatactcgacttcatggcctcttcactacctttcttcctcatggtttgagtctttttttggggggggtggggtggggaggggatggaatctcactctgttgcctgggctggactgcagtggcacagtctccactcactgcaacctccacctcccaagttcaagcaattctcctgtgttagcctccggagtagctaggactacaggcatgtgccaccacgcctggctaattttttgtatttttagtagagacagggtttcaccacgttagccaggatggtctcaatctcctgacctcgtgatctgcctgcctcggcctcccaaagtgctgggcttacaggcgtgagccactgcgccaggccggtttgagtcttctagccttactcttatgtgtccttttagctttcattcctactgcttcaatcttttcatttctcaattcagagacctgraaacaagaatctgattagctcagggattctggatgttggtaggttggttggtttttgttttgatttgttttttgtttgttttggttttagggtaccaatccacatcacaggtcactacccagcctatgaattttgctttgttgggtctgatatcctcctctggtctcaactaggagtggggacacggtcctgttgtacaaaatagaacttctcaggatattcccttactcaggagactgtggtagggtcagtttcacttagaaggggctgttagtatgacaatcactgtaatagatatatctagtacattccataacttgcctactagaactcacagtctttttggatgcatgcctgggcataacaaagaatgcttttcttgtaaatgattctaggtttacaaaagattatcacatttgtccagcaagggaaggaaaggatgctgcatgaatattaaagaggcattgtagatatcacacrtttcaatcttcttgggcttgttccagtctgatagccccataaaattaccatggtgccagtctttgagccttaactttatccattagtacaatttaactggtaccacaatttgctcatcaatatgattagattctgcacctgaactggagggttcacaaagtgtgcaggctgttggaagaaagctcttcccacacccagtttacatgatagctttgtatttccttctgcgcattaagcagggcaatcctggcctggcatttatccctttctcaatgtatggtccacccactgccatgagaaactaccagtgagcttaccttcaaagggcacaaattctgagacccaagagaccacatgcggtaaattcattaactcctttgttagtacatgccattggatattagcattttatcttccacttgaaggagaatctctcactgtcatccatctaggaactatggaaacactaactccaaattcaccacattttattataagggtctcacttgggtaatcccatgcccagcataaaatttctactagaatcctttgtttgcactttcacttaactcatttatttaatttgttcttgttagattagacccgctcttgaggctatcatgaccttttttagattttgattcttttttttttttttgagactgagtctccctctgtcgcccaggctggagtgcagtggtgcgatctcggctcactgcgagctccgcctcccacgttcactccattttcctgcctcagcctccggagtagctgggagtacaggcgcccgctaccacgcccggctaattttttgtatttttagtagagacggggtttcactgggttagccaggatggtctcaatctcctgacctcgtgatccacctgccttggcctcccaaagtgctgggattacaggcgtgagccactgctccgggccagattttgattcttaaatatctcataattaaattttctctacttcctctgctaatgatttagttcaggtcttcagtatctctcaccttgactattttagtaacattataactcatctttctgggttttgtctcttccacaactactaatgcacctttcttcaacctccaaaacagtcttcctaaaatgcaaatttgattacatccttttgtctcctgccatttactctatttgctttttctttttttttttgagatagagtctcgccctgtcgcccatgctggaatgcagtagcgctatcttggctcactgcaacctccacctcccaggttcaagcgattctcctccctcagcctcctgagtagctgggactacaggcatgcagcaccacgcatggctaatttttgtatttttaggagagatggggtttcaccatgttggccaagctggtgtcaaactccttatctcaagtgatctgcccgcctcagcctcccaaagtgctgggattacaggcgtgagccactgcgcctggccctgccatttactctcttacatcttcctgaatgcacctcattttcccatgtcttcatgcttttgctctttcctctgatttgatattttcctgttcttttgtcatgggtcacttccctactcactccctttttcccaacagaaatactgtattctacattacttctgtattttgtatattcttctattactttaacatacctcatttattgatctttctcctattagattccaagttcctttaagacagaaactgtcctgtaatcatctttatattctggtttttagcttactgtatcctcagcaattgcttgttgaatggaatttgaatttctttagtctataaaggagtttcaaagatttggctactgtgtaggccgggcgcgatggctcacgcctgtaatcccagcactttgggaggccaaggcgggtggatcacaaggtcagaagatcgagaccatcctggctaacacggtgaaaccccgtctctactaaaaaatacaaaaaattagctgggcgtggtggtgggcacctgtagtcctagctgctcgggaggctgaggcaggagaatggcgtgaacccgggaggcggagcttgcagtgagccgagatcgcgccactgtactccagcctgagcgatagaacgagactccgtctcaaaaaaaaaaaaatggtttggctactgtgatggcaaattccgtcttctgaaactggaaagtaatgtgtactaaagcatcattctttactcctttcccatttagatattcatccctgtttttattcctcatttcctgactcatcttttactactttattctcaactagaaagtcagtggctagtctaccctttgttacttacaaattaaatatctttggccaaagaagaacactttccagtgaagaccccattttctccctgcaatgaagtttcagcacccaagcttattgaattctgattcccaggttctccagatgctgttatgtgaagcataggatcaggaataagaaggaagagatagaccaagtgcagtggctcacacctataatcccagcactttgggaggccgaggctggagaatcacttgaggccatgagttcaagactagcctgggcaacatagtgagacccccgtctctaccaaaataataaaaaaagtttagtcgggcatggtgatgcacacctgtagccccagctactcaggaggctgagatgggaagattgtttgagcccaagaggtcaaggctgcagtgagccatgattgtgccactgcagtccggcctgggtaacagagtgagaccctatctcaaacaaacaaacaaaaaaattaagaggttttctgagtactattctccatgttaagttaacttccttctcaatgctaactcctaattcgtcagggttcacattttgggtgccaggagacttctgcttaccatgaccttgagcagtaactccttggaaaaatattttgatgcactctccttgtcttgctgggtgattgagcagggaggtgggttgttggtcataatcagtaacgtcttatcctggtcatactgtgttacttttaacatgaagctggtgtttttcctgttttgagccaggaatttctgcagggcagtggccttcaaaggcttatagtactgggcctgaacagacagaaaggtttccagagagaaaaagagattaggccaagagcaggttaacaaatcggttggctgatacttagcctctgtggggtaagaacagaagctggacagacttgctgcaaaatctgtagggttttttggttttgtttttgttttttttgagacggagtctcactctggtgcccaggctggagcccagtggcatgatcatgactcactgcaacctagacctcccgggctcaagtgattctcccaccttggcctcctaagtagctgggattacaggcacatgccaccctgtccagctgatttttgtgggtttttctgtttttgttttgtagagatggagttttgccatgttgcccaggctggtttcaaactcctgggctcaagcgatgcacccatctcagcctcccaaagtatggagattacagaagtgagttatcacacgcagccctaaaatgtgtttatcagaaactgtctgaagctctcagtccctctcttcccttggggcattcccctggaaatacactaaggggctggcgcaatgtgatggaaaggtttccatggtaaaaggagtcaggtaacttaattcttccaatataatgggacaagcagagaagtttctacatggctaaacctaattggccttgtctctacaactctctctaaggtacgagggaaagctaccagggaccaaatctcgcttaaggaattcttcagaagttggcacagccaagtgcaacaccttcccatatttacatcttccacgtaatgttccatatttacgtcaacatttctcaggcacaaccacattgacatgcactcacaagcacaatgttaaaaaaggaaaagcaggccaggtgcggtggctcacgcctgtaatcccagcactttgggaggccaaggcaggtggatcacgaggtcaggagatcgagaccatcctggctaacacggtgaaaccccgtctctactaaatatacaaaaaattagccaggcgtagtggggggcgcctatattcccagctactcgggaggctgaggcaggagaatagcatgaacccagggggcggagcttgcagtgagccgagatcgcaccactgcactccagcctgggcaacagagcgagactccatctcagaaaaaaaaaaaaaaaagtaaaagcagccacaaaagatagcatgtcacttaaggtgtgggtgaggaagggacggtcccactaaatttkcctttctctcaataggagaaaggcagagggttggggggaaggaagtgaaagggagaaaatggattacaaatatatttttttcctgatcataaatatgtttcctcaacttaaaaaaaatcagctgtggggacccactttcttcccagttctcatctcccactttgccaccccaatcctcagcactgcctctggcatcataacctagaggcagctctgcctgcctgtcctaagagtacgcacagtcacagaagctggggacacttggaggcattagggacactcgcagtgggcatctgcaccactgctgaaacttccccttagagatcttgggggaatgctttctctacctaccaaatttggatggactgtgtaatgccgaaggttctctagaacaaattttgattgcccgactgcatcagaaatctaaagaggataatcaaagttagtggtttgaagttgcacctatcctaaacagtattccattccttacctcaccttagtctcactggagaactggtctctaacttacactaagtaagttagagaagtacagttagaagtgcttcagattttgtactctaggtttctggaacaagggccccagcaaggagacctggattctaagacctcctgaccgtgacacttgtcagcggaaatggggccagccttatgaaatgtcagggaaagccgttaggaggggaaatagacaagggcagcatcagttcagattgcgacaaatctttccaaggagtcacttctttcttatgccttttccatagctataggagtgaaatgaggtgaaaatcaacatgcaggacaaatctttaaggagaaaagcaagtttcaaaagggcattaacctaaaagttgtgggtgcaagggagccctagggtcaactctgccaattgagctgggagccgacctactcacagagaaaggaagaagagcagtgcatgttacaattttgaacatctctgcagtatgaaattcttccagaaatgttgcaaaaaataattgaattttggtaacacttgtgtctaccactttgcttttttatttttatttttattttttttgctggtgggtagtcctggatgttagtggattatttgagtgtcatatctgatagtagaggagctgagccttttccattccctttctgctgacctagtgttcttgcttctcctcttgcatagccctgcctaaggatgaatcaaggagataggaacacaaggatataaaagctctgaattatcttcttctggcttggcatagtcagaaatcggaaaaaaagaagagtgcatcattatcctgtgttcagatcagcatttcttttttcttttctttttttcttttttcttttaaatacagggtctcactgtgtcccccaggctggagggcattggtgcaatcataggtccctgtaaccttgaactcctgggctcaagtgatcttccctcctcagcatcccgagtacctgggtctaaaggcacgtgccaccatgcccagctattattattatttattaatttttctttttttttgctactgagtctcgctctgttgcccaggctggagtgcaatggcatgatcttggctcactgcaacctctgcctcccgggttcaagcaattctcctgcctcagcctcctgagtagctgggattacaggctcccaccaccgcacctggctaatttttgtatttttagtagagatggggtttcgccatattggccaggctggttttgaactcctgacctccagtgatccgcccaccttggcctcccaaagtgctgggattacaggcgtgagctaccatgcctggcctattttttattttttgtagagatgagggtctcactgtgttgactaactcttgggctcaagtgatcctcccaccttggcctcccaaagtgctgggattacaggtatgagccaccacgcccagcctggctcagcatttctaaagattgctatacctcccccatcaggaggcagtatggtaaggtgggtgccttacccaccttacagaggaaagggaacgtgcactgaaaagttaataaagcaagagggctaatggagaagagggaagcagtcagaatgggacagaactatgagttaagaggaggccctgctatgctccaggaagaaaaggccagaagttggcaattcttggcagttggagaaggagcgggaagaagcatagcaaagccactccacaaattcctttagagagggtgggatgaactatgagatggtgggatggatccaaagactcaatcatttaattttttaccaccttatggaaaactaaagttcatttgttgaaaacagaaatatgaaaaacctgcttcacaactatgaaatgtatgacatatttagaatcatagaagttaggaaaaacttatttgggagaaaggtatgaagaccttttctcttacaggttttttaaaaaaaataattttagggggaaattccctggtgaaaatgtttttactcctgaagttttttgaagtattgcatatctgttccaaattagtctctagcagttgactaaacccacaagattgtccaaattggaatgtgtttttagttttgttatgttgaatttcactatctgtggctgattaaataaaagttggcctggaaaattcacttgaatgtggtaaacatgggaaaacaaccaagatacccagtggagttttgctacaagaggtagttgtaaagtctgcgtaagttagggtttgacacgctcttactccctaagataggtttctgcttcctgggttttatgtcctgatttgttgctgatgtgtcctgttccttctttttctgtgctctatttctcttcaataacatttgacaagttaaccttgttttccatatacatttttactcctttttgcttttcaatagggaagtttgtgatatccagcttattaagtacactaagcagctccaaagaaaaattaaacattgaacacttactaacactccttacctctttgctattgacaaccattcctttctcacgtttagctgagctattttctgaagtctttgatttgccattttgaaacctgaaaaagaggcagaacatccggttgcactttctggctcagaggcctggacttctgcatattgtcagtctccctcaacaaagtttggaagcctaactcagacaagtccaatttaggtgatcacatcagtaattgactaagtagcaaaaaaatcagactcattatccagcctgcatgctagggaaaagcaagacttcagtttggagagttaaacaagtgggacctttggatgactcagtgacatccattgagttggtttcttctaaaataaggattttagaccattcacagaagtgctctaaygactgcttaaggaaattattttgggaagttagatcctcacaatacccttaaaaaccacctactattttgaatacttacctgcctattcttcttccacatggaaattgccctgtttttgccagtgattggccaatgattagccaatgaatctgtgagaaggaatatagttaatagaacctcacaactaagtttccaattcttgttgaccttgcttggattactggctctcatgtcttcctaaccacatctctgaagacttctcttcttagaactagggtagtaaaaataatcaacaatggcaaatatttctgtactctactctgttaccctcaccctaataccaattctctttgcagaaaatagggtgaagcagcttctattctttgctattctttttaaacccatttgctgccagaacataatgtaaaatgctcctcagtaagatttggttaatgattaagataaatggcctgcttcttccttggagatagttccattgggtggttaaattagctcaaagtaagaagaattatgcaactatctcaactagacctctctcctttaaaaatgaggatagcagaataaggaccaaaataaaagtagaaatagccacgctatgtcgtttgtaggtcaactggctatagcgtgctacaaataatccccaaatccatgattctatcccattcaagcatagctaccttccatctgttgctggccaccagttgcaccattaactcaggtcagaggtcttaaaaacggtcccaacagagtaggtgacccatgatggagagaccamaattcatcccaacttaacatcttaaagtttgtgcyctttcattaagttatctaataattagtaatacagtataatatttattgtagcacttttcaaaatgattctttgatacctaaaaggaagcacagaatcccggatactcttcttcagggccaatttaaggcatagaactatatgaaaagcgcttctttagcccaacagcgtccatctggaacaagctggtgctttctttttgacaaaagcaaccatgaaatacagaccaagatccggtttttgatccagggacaatcagtcaattaaaatatgtttaatgagagtctactctgtgaccagcaccattcaacgtgctgtgggctatgcaataagttaatataaagtggtgtttataacttagttgggcaaacaagactacatacttggtttgtctcttttggctcattgctgttgactgctagttggccaacccaaggcaggtattcacccaaggccaaattcaggtctctaaatagtccacgttctgcaggggttcaattcaatccaaatattctttccttagcacacagtgtgtactcatgccccattcttgagcctgtatgggaaamaagaaaagactgataggtgctattgtagatgtagaaaatgcacaagacatgatgakgcttgctcttagaagttaawtttatttcacaaacgggggaggtgggagaaagcgattatccaatgtaaaacaatagtgacaaatacatgctaatatattaggtaagtcactttatctcttggggtctcaatttccttatctgcaaaatggaaagtattaactaaatgatttaaaggtgacattctaattccatgatagtgatgagatttaactataaaaagatctgaaataaaattaattcacatatgtccrtagaaggctaaaggtggagaagcagccatcttccaattttctcctcctgtcaacaaagccatgctcattcatagattaggcctgagaagctgggaaaagtgtgtgtatatattgggaatgggaggattgctatactttttgatatagacaattagaaatggaagatacaagctgataaggtagaaccaaccatttagagaaaagaaaggtcagtgagccttgggatgtttcctaaaggttgtggagcttgagcagaacctcgcaggatagtgtatgaagtagtctaattggaagattatttgtcgttgttaagtaggaagaaataaaagcaggtaggtcgaatggagtcacattataggggccttgacaattaagtagaactttgaaaagacctacatcagcccaaattcctatgaagcccacaggtttagtggaaagcccatagacaagggtttatgtctaacttgattgtctagacaaaccctaaagatgatttctagagtttatgacaagactgagctaaacccttaaagttcccttctagggaaatagagtaataagcgtttcacccttttctcacctttaatttttctggaattgtaagtccaattcatgtatatggtgaaactaaaataaaaatgagctgtcaaattgggcagtataagtcttgggttgctagtctgcaggccaggctgaaaaacaaatcacacaaacactaaaactacattcaaaataagaatgtaaaaacctggtgtacactacctttaagaacatcacgaaatcatagtttggtgaagaaggcaaastctttggcatgggaactttccattttgaaaatatcgtaattattcttttctggattctggaggagacagagggaatttgtgatgaataggcaatctagaatgctgaggtgttctgtgttggagacagagaatgaaaaggccaaaacttaaaggcatatttaaacaaaatctgccaatctcttattttgccagcctatgacttctctacacacacacacacacacacacacacacacacacacacacamacatcttcaccatctcttaatctacctctacctaagccaatgttttcactgcattcttcaaatacagtgagcattttttcttattccccatacttaaaatgctgtccccaatctcttcagccatttgaatcttctccttctccttctccttctctttcttctgacggagcctcacactgtcacaaggctggagtgcagtggcacagtctcagttcactgcaacctctgtctccctggttcaagtgattttcctgcctcagcctccagagtagctgggactacaggcgcctgccaccatgcccagctaatttttgtatttttagtagagacggggtttcaccatgttggccaggatggtctcgatctcttgaccttgtgatccacccacctcagcctcccaaagtgctgggattacaggcrtgagccaccatgcccagccctgaatcttctttctttatgttactactcaggtcattcctttaaagagaagattttctagattaatgcaatcccaaactctagactatagtcactgggttttgtgcatgtcattgtatagtgtcttgtagttctgttttcacttttcttatgtgcgggtcttgtctgcctcttaagctgtgagtcccttaaaagtggaaatgtaaattttaaacatatttgtgcccccctcccagtgctttgtatcttatgcattcaaaactagtgtttgcttatttcaatatatttgctgaacatttatgacatattagacactctcctaggtgatgagaacaaagcataaatcagatgtaattcttgagctcctttaggagctcacagtttagccaggaagagagacaaagaaacggttgattgcaacagagtagaatgccaaattagatctaaatttagggtactatggaagcaatgaggaaggggacttaacccatactgagaagagactgagagagatttggaactactgcctaaactgagctggggaagatgagtgtgaattaaccaggtgatgagaggacagacatttgagaaagagggagaagcagaggcaaaaacatgagaatacaacaaagcctggcttatttaggggaattgaaaatactgtaattgcaatatgccaggaacataagatttaggggaagggtagtgagaggtgagactagagaggaagacaggatccaaatcctaaaatgaactatttgataggaagtttgtgggttattctgagtaatgaagcgctaacaagagattttaaatgaggtataatctccttattgaacaatatatattttagaaatacaaaaatagtggcatgtgaactatagattggaaagacagaagaactatagattagaaagatgcaaagaggtccttgagaagtctatgacagtgctgaggaggggttgagaaattataagggtctatagccatcaccaattagtgccattcactcctgcatcctagctctggatgattgattcaaaggtggccaaccaggttatactaagaatttgaaagtttgctaatgacccacagagctgtaagatgattgcacctgagccacctcatgtggtatcccaggctggaagactctgagctctgagctctacctgctgaggtccccggagctgccccagatctagtccttcctaaagcaagactacacaattttctcttcagttctgtgagctttcctaatattctttcaaataaatcctttattttcttagggttcatttctgcagtttatgaccaaaaaaaaaaaaaaaaaaaacctaatatgggctctgaagcagggtgtccaatcttttggcttccctgggccacgttggaagaattgtattggaccacacataaaatactctaacgctaacaatagctgatgagctaaaacaaatcacacaaaaaaaactcataatgttttaagaaagtttttgaatttgtgttgggctgcattcaaagccatcctgggccacgtgtggcccatgggccatgggttggacaagcttgctctaaagcaaggtagtggcagtgaagagggttaaaaaaggatatatgaaagatgttaggagggtagaattaatagaacttggtaactagttgaatacatgagataaggaatataatcacatttttagctttgttacctgagttaatggaggtgcaagttaccaaattagagaacaaagggaatggagcaagtttgggggataaatgatgaattttgtttctggtcagttgagtatgaggcagaggtgaggatgttgtctagtaagtagtttaaaatatgggactggagctcaggagagacaggtttggtactatagattgaatgtttatgtcctctgcctccctaaattcatatgttgatactgagtccctaattatgagggtattaggatgtggagcctttgtgggggcaattagtgcacttatagaagtggcttcaaaagcacatctttactccttctgccatgtgaggacacaacaaaaagccggtcctcaccagatactgaatgtgccagcaccttgattttggacttcccggcctctggaactgtgagaaataaattcctgttgtttataatccacccagtttatggtattttgttatagcagcctgaacagactaagccatttgggtagaattatgcatttggaagtcagcctcaagcattatgtgctaattgaagccattggactagataagatcaagtaggaaaaatggtggactaacaagagactaaagcatagaaccatgccccagactatgtaaacatccaaaaaagagcatcataaatgaattttgtaaagaacatggaaaaggagtggccagagattgaaagagaactaggaggaagtggccacaggtgggatgatatcattggaagggatgctattatgaaaaaggaaacaaattttttagcttcaagcagcaagttttgaaggtatagaaaaagattaaaacttgcaaaaatgaccaaaagcttaataagcaatccaatgctgccacttataaggcagataaatctagactgaaaaaaacctacaaggcttgggttcatggaaatgccaggatttgcttgaagaaacagagaccatctggtaaaagagaatgtgaatccccattgtttgtcttcttttttcagagatacaggggctgcattgatcaaaactcagggcgatcctccctgcctactactccttgggtgttgatctatgacagggcctaagaacagctcccccttatcccttcacctacataactttccacattcagatggagacttcacaccccaggtaacagctgggcagggaggacagggtgctggggtggcacagtgcattctgagagatgtgacctcaggagcaaagagcaggaggaagggcacaagatgggaggaactgtttttttgaacagttttgtcctcttttctcatttctaactgtttataaaatagaaacggctacctttatggaagtattggtatggaaagtaaggaagtgtggaaagaagcatctacccttcatgaaaaaaggtagtggcacagaatgccaagcaagggtagtttgccccatttttgtcttctttcattctttctttttctttctttctttcttcttctttctttctttctttctttctttctttctttctttctttctttccttctttctttctttctttctttctttctttccttctctctctctctctctctctctctctctctctctctttctttctgtctttctttcttgcattttcagacagggtctcattctgttacccaggctgaagtgcagtggcatcatcataggtcactgcagcttcaaactcctgggctcaggcacccacccacctcagcctcctgagtagctgggactacaggcatgcaccaccatgcccagcttttttttttttttttttaaagagacatggtctcactgtgttgcccaggctggtcttgaaatcctggcctcaaacaatcttcctctctcagcctcccaaagtgctgggattacaggcatgagctactatacctagccactcttccttccttctttcctttctctccttccttccttccttctttccttccttctttctttcctttttttttttttttttttttttttgatggagtcttgctgtgtcacccaggctggagtgcagtggcatgatctcggctcactgcaagctccacctcctgggttcacaccattctcctgtctcagcctcccaagtagctgggactacaggcacccactaccacgcctggctaattttttgtatttttttagtagaggtagggtttcaccgtgttagccaggatggtctcgatctcctgacctcgtgatctgccctcggcctcccaaagtcctggtattataggcgtgagccactgtgcccggcccactctttctttcttaaacagcctgctggtgacacatgaagctcttgctttcttgaggagaggcctatcatttatcagtggctgggtaaatctttccagttcagggggatgttttaggaagcccaatgtatgttcaggccccagccagtctccaaaccaacttctagcagaaagctgatattctgaacttaccagatttttgcatgtgtttactaactgcttcagaaccggtaagggaaagagatgtaattggcacctcaaatattacttttgcaccaacctaaatcaacatcctgactacagtgaatgctacaactgttattttacatagtctacatagactcagataccagagaatatgtaagtaggaatttgagaaagttatctccccagcaaagcaaaaaatgaaagccagatagaaactggggactgggcagggaggtttgcctagcaacctgccctccatctctggtaagaaagcaggagcagagtttataaattcattaatctcatgtattgaccaacaccaagactcaacaaagctagcattattcagagatgaatgaatggaaaatgatttttagggctaatgcattttatgaggagtagaatatagcagcagcaatagctgctctggcaagaatagggagctaagaagctgccagaagtggaggaatacagagaagagcaggaggctgggaatctgggaattaggaatcaaggccatccaatttttctgtagatttgtctattaaaaatgtggggaaatctacttacgaaagtggaagctgtctctccactcagtacttacattcaatttagcactggagtgtcaggaaaatggggaccaaaggagaaacaaaactgggtgggggggaaatgaggttttaaatgtacaagatggacagcaagggatagaaggtggtctcaggaaaaactctgggactgaagatgcccaacatggcaaatttctgaatgtttccaacatggcgggatgatacatgaaggagcagtggatatgcatccccattcagacattctctgccgacagcagtgagaaatcccatgtcttctcctcctctttttttttaacttttattttaagttcaggggtacatgtgcaggatgtgcaggcttgttacataggtaaacatgtgtcatggaggtttgttgtacagattatttcatcacccagatattaagcctagtatccattagttatttttcctgatcctctcccttctcccaccttccaccctctgataggccccagtgtgtgttgtttccctctgtgtgtccatgtgtttttatcatttagctcccactcataagtgagaacatactgtttttggtttcctgtttctgtgttagtttcctaaggatgatggcctccagcctcatctatttccctgcaaaggacatgatcccattctttttcatgactgcataatattccatggtgtatatgtaccacattttctttatccagtctatcactgatgggcatttaggtggattccatgtctttgctattatgaatagtgccacaatgaacatgtatgtgcatgtgtctttataatagaacgatttatattcctttgggtatatacctggtaatgacattgctggatcaaatggtatttctgtctttaggtctttgaggacagtgtataagcattcctttttctccacaatcttgccagaatctgttattttgtgactttttagtaataaccattctgactggtgtgagatgatatctcattgtggttttaatttgcatttatctaatgctaagtgatgttgaatttagtaaacagacaacctacagaatgggagaaaatttttgcaaactgaaaattatgcatctgacaaaggcataatacccagaatctataaggaacttaatatacaagaaaaaacaaacaatcccattagctgggcatggtggtgcgtgcctgtaatctcagctactcgggaggctgaggcaggagaatcgcttgaaccagggagtcggaagctgtgagccgagactgcgccagtgcactccagcctggcaacagagcaacagagcgagattccatctcaaaaaaaaaaaagggtggacaaaggacatgaacagacacttcacaaaagaaaacatacacatggccaacaatcatatgaaaaaaaaagtagcaaattcttagcttttaagttcaagtatcaaggactcaattgtaagacagactgatttaggaaaatagatatgatcaattcagatgcctctgtctaacaaaga

SEQ ID NO: 97169 - DNA, 15307 bp, Homo sapiens
cctaaaagcatatataccaaactggtaagaatgattcccttcaggagcatgggataagtagagggggagaataaccattttgtgtcttttatacttttgcgttgtgtcgatttgtaaaataagtaggagctaattttcaaaaaagatttaaaagacttattcctggtgatgtttctttatctctctctttctccattttgtctctattttagaatgatcctaaaacacaaaaaacgtactttcaatggcccaaatcatggagtggctcagggaaatgaaatctgtctacaaaaaaaaaaaagttgagaatccttgtctttttttcatcatacagttttttttttcttttggtatcaccattacttctcctaaagtcacgacataatatcacctacagcagaaatgaggacttcagtggaattgacatctccttccatcaagcgcatttgcagtccatctttagcaggacctctctctaatggctaaggctaggcagaagaatttgaagacagtctggtttccattttcctaatgcagcctggcccaagagccaggactcccataagactagtctactgtgggagtcagggtcttttccacgtgtggaggctagtgtttgatgctggacggcctggagtaaagggcgaaggggagaaggtaaccaaccaggctggcctcgggattcgcagaggagggctggggctttgacttctgcagggaggtgagcagtgtggccaagggctactcaaggaacgcctctgcgagaattcagactgtggttgagcgcacaaagcaagagtgtgcgaagaaaagttaacgcctctcccagctgaccccaaaatctgctaatctgggcctgacggaaaaaattcggagaagaaccacctcggccgagttacgtgaaaaggctgggtacgaactactctggctctacttggggcgccggctcagagcgatgggcaggacgtccgcgaggaagaaagagtgacgatgatttttcaaggagtctgaaccagctcacccagcaaaccctcctcccatcgagcacccagcgtacaatcatcgaagggccgagggtcctgccctcagtctcgatggcggccggggcgcgccccggccacggcgcacgcgccggcctcagcgctccctcctccatgccctcggcgcacggcgccgcccactcacccagctgcacctctccgtgcgtccccaagctcacccgctctgaggctgcccccgctagtctagctgccgagcccggaagtggatgcagccgctcggcggagaggacgagggggagggggaagtgcttccggggaaacgggccggggttggtgtttgtaaacttgcctcggtcccggtgggggcagccgcggcggtggggttggcagggtgtgctggggcctggaggaggcgccgcgcggccagggagccagcgggaggccgcgcctggcaggtaggagcaagccccaaagaccgcagcgtcgtccgtacagacggcagcgcttcagtagctcgcaagccgtggggtgccgcgcgggaagggggaggggaggggaggaggggcgcgtggcgaagggagggggatctccgggggagggaggggaaaggccgtgcgcgcacaccgccccctgcccgcgcgtcccgccgcgtccccggcccgggagagggctctcggaggggacgcgggcgcgagcacgcatctcgcgcgcttctcggcactctccggctctgctcccggttggtgcagcgggtgcagaggctggctggccggagcgaggcgggcgacacgccgcgccgggcttcgcctgcctgtcctccacctccgcagcaagtttccctaccttcgggcggacggggagaacgcacacgtgtgggcactgccagtcccgtttctgcccgccaccgaagcacccagcgatggcccttgagctttcctccaccctagtcttgccgcctctgtaaagtgcgagcttttcgggccggcccactgggcacaaaagccccaaagggtctccgcccccttcttccattcctgagatggcaaatccaagcaactttccttttggcagagttcctccataggaggccccaattacttttgctcctgttggcttccactccttgcccaggagaccagttcctcctattgacctagaaagaaaactcttcttgactcatgtcctcgttctgagcttcacagagagcgcccagcaaaaaaaaaattcatatcgcacgttgtaatggcctgaagatgttgcatttagcagcccccctcttcctttctggtttcaggtttctgaaacagatcgtgagcttcatcaagagaattcaactggaaaaccaagactggtagactctctttttcttcagacaataggcaggagccaggcggagtccagggattcttggaacacctatcttttcttcggaggacactaagttctatttgaagacaaagttcaatatggcaacaggactgatgggacacgaaggagtcgctaccgtgatttggtgacagttcttcaaaacgacagtgtctcaaggaaaggtggacctaggaactcctgaacttttgggttgccttaagtgagaaatcagcatggctcaggtaaaaagctctagagtcctcctccaagataactgggaagcctgtttgcagtttcactcttgaatgctgccttagtcaacatattgaccaaccccagtgatccaagctctgtattaagcaccagggggagatctagaggaaggaaaggagacaggccacagcccctgccttcagggagcttccagtcaaatgaaggaggtaggctatactgcatcacaggcactgatgggacatttgcaaagcaacgtgtactcagtttacatttggtacattaagtgctgaggggtgtaagggagtgaatagtacggtgaatgcttcttttgtttttttccaacaggaatttattgagttcctgttgcatgcaaggcattgtgctgggaatacaaagatgaatacgattgtccttgtccccagtgagcttccaggctagttggggtcgggagagggatggaaagccatttatttttatattcacaatgccttgtatagtggctggctagtagtagagactctgaatctgttgattgaggaatgtgcaataataggggtatgtacataggagagaacagtacttctgcttggatagaaaaagaagatggaggttgaaagatgcataggattttgctaaacaagcgagaagggtgtttggacaaaaggaacagcatgggcaggagcttagagtcatgggaaaatgtgatgaggttccgagtactgcaggttgtttgatagttacggagtaagggatttaaatggggatagttatggaggtagtattgacagtgataggtgaggaagttgttccctgcagtaagcagagtgtaacccaaaggccttttatgcctcgctaagttaagcagcagagtagcatcagatcagtgttatgtagaaggtcattattgtggaggtagaggatggactggagagacagaatgagcagataggctgttgtagtcatctgagtagaatagctatgtgcacacatctccagagcttctcccagcttgcttctagggaacctccctaccagtctcaccaggatggcagtctgattgtagtataattggctttcctccagctgcttctgaatgcacagcttcctcctttccatatagaataggagcctgtcagtttcttcttcctttgtgttttgcaacccacttctcagcattgtattcagtcttctgagaatgctgccttccactaaggactgaactttgtgctagacactgttaagcgttttacgtcttagtttacttttcatcaaccctgtaaggataagcattatgacaggcatttttcatgtaaggaaactaaggcttgcaaaggtggaataacttgcccaagattatagagtgcaaacagctgagctaagattttaactctggatctttcactccaaagtcccagaaggtggagggaggggtcccagaacgtactgatcatctaaaaggaatttcttcataaatttgtgagtttgctgaccaacgatttcttaaaattttttttttcagtaagaaaagtattttctttaatgccggctaaccgaagtcagtttgaagaatgtagcagttttctggaaatttacttaaacataccttacttaagtaattgtttaaattatatatggagcaaggaatgtgaaaaaaaatgtgatcatacaagcacacatataaatggcctaagaggtcaagagaaatgctgaactccaaaaatcatatcagttgcaattggtaaatacttagggagtttaaaatctaaagggagaaatagcctgtagtcccaggaccttaggagactgaggctggaggattgtttaagctcaggagttccacaccagcctaggcaacatggtgaaaccccgtctctataaatacaaaaaaaaatagccgggtgtggtggcattctcctgaagtcccagttactcaggaggtagaggtagaaggatcgcttaagccagggaggtcaagagtgcagtgagccgagatcgtgccactgcactccagcctgggcgacagagtgacaccctgtctcaaccaacaagcaaaaaatgaaacaaaccgatagaaaatacagttggcaccagcaagatctgccaatcaaaagtgggctctgaagctaaggggtgtgtgtgtgtgtgtgtgtgtgtgtgtgtgtgtgtgcgcgcgcgcgctctgaagctaaggggtgtgtgtgtgtgtgtgtgtgtgtgagtgacggagggattctcgctctgttgcccaggctggagtgcagtggcgcgatttcggctcactgcagcctccgcctcccgggttcaagcaattcttctgcctcagcctcccgagtagctgggaccgcaggtgtgtgccaccacacctggctaattcttgtatttttagtatagacaaggtttcacctattgtccaggcttgtctcgaactcctgacttcgtgatccgcccgcctcattctcccaaagtgctgggattataggtgtgagccactgcactcggcccagctgagggctgttgagggaggaaggaggaaggtcctgaaggaatctcctgtgtcagtgggttagcaagatggaacctcatacccactcacagttaaggcctagaaataccttcaaagaaatatgtagccacacactgcctagtgctgatgacaaaggtgtcagtaatacttgattatttacttgatctatatttaaatgctgaaggatgacaagataagtcgttcctggtgagatgagttagggaggactcttgaaggaagcaaggctttggcagtgaggagggacattccctggagagaagcagtttgtagcagggtgtaaaaggtagttctatagaggatggcagtctgtttttgccctgccctgccaggtgacctgacacctcatctcctttcaacttaggcaagtctcctggcttgtgaaggcctagcaggtgtgagtttggttcccactgcagccagcaagaagatgatgctgagccagattgccagcaagcaggccgagaatggcgagcgggcaggtagccctgatgtgctgaggtgctcgagtcaggtacagcgcttgagtccattgtggcacctggggatcgggtggcccaagctctctgccaggagataccaagctctgattccttgatgcttcctcatagggaagtggggcaaggggatccaactggggaatggatgaacattggtatttcagaaagctaaggaaggtcttttgtgtgccttcaactcttttaagaccaggtgcttggagaggaaatagttgtatacttcctctaagctttcggggcaggtggtttactctcatttatgaattttgtctgagagctgcattgggtctcatctcatgttccgagatgggctatgagtttagatttgatttgtcttcaaagggtcaccgaaaagacagtgataagtcccggagccgcaaagatgatgacagcttgtctgaggcctctcattcaaaaaagactgttaaaaaggcaggtaatggggtgatcccccaaactcatacagtttggtaatggggtaatattcctccttcttccctctaccatgtaacctggagctttccctagatgctttgatctctgatagccagtgagtgagtcccccagatttcatccagagactaccttggtagttgatctcctgccttgctggaacagtaatggtacaggttggggagcatgagatcccagatcccgaggcatgggagcaggcaggctccagctcaagtcatactcagactgctgggtttgacaggatagacagcttacccactccrcctccttccccaaagggtctcttacctccatggagtacaggagatggcagcacctttagacagcatcagagaggttcctttctccaacagctggaagtggacccagagtagaacagtgtctccaggaagagggcagtggtggcctcatgacatgcctgattattgcccccaggtggtggtagtggaacaaaatggttcttttcaagtaaagattcccaaaaattttgtttgtgaacactgctttggagcctttcggagcagttaccacctaaagaggcacatccttattcacactggtaagtctcttgtttatattcaaaagggggagaatagtctatcgcttgtattccatgtctgtttgtggctctagttgggtttattttaatgggtaagtattagaaatgaaggaagaagataagtcaatgaagcagagagattgcatggctttgtatctggtgtcactgagaccagcacctttggggacctctccccatttatgatcacttaggtgtctacacattactaagagttaaagtttctgagaaaactggaatgaggtccctacyrtacatacctccccacattcacttctctgtccacctgggccaggtgagaagccatttgaatgcgatatatgtgatatgcgtttcatccagaagtaccacctggaacgccacaagcgtgtgcacagtggtgaaaagccttaccagtgtgaacggtgtcatcaggtaaggctcatccctgctacaataccccacacacacttttccttccccaagaatcagggccaccctccactcctgcctgacaaaagagccaccagcgttactcgccataatagttaacacatcggggtgaagtgcatctgtctggccttatgcagctgatcatggggagcagcaattagaacattgtaataataataataatagcattccatatcacttactctatgccaggcactgtgagagcatactttacatagatgattttatttaatcctcacattgactccctaaggtagctgtattgtccttatttcacgtatgggaaaattgagattcagagaagttaagtttcccagggacaccgcagatcacgaacagagctgggattcagtccaacttcagagctaatgcactttggaggaagagatacaatctttgccctgggggtcagtatctgatctgatgagaatgtaagagctggggccaaaacaagacaagaacaagagatkagaaatgataatagctaacacttcctggatgcattgctaggtcccaagctttgctctgcactcttacactgaatcttcagacgctagaataaaagctccatgagggcagagactttgttcctctggttctctactctgtatctgccttgagatagatactcaataaatctttgatgaataaagcagctgtgctgtgagtaggtacttttagcctcgctttgcagttttgcagatgagtatgcagattctgggctgttaggtaacttgcccaaggtcacacagctgctgagtgatagagccaagattcagccccaggcggtctggcctgagagcttggattctccaccaccgtgtgctcctgctgtctgtgcacgtgctgaggggatggagaatgtggtatctgcctcctgtgagaggaatgagttagccaacaggtagctgcgtttgtctgctcaggcacttaaccctccctttcttctcagtgtttttctcggacagatcgattactcagacacaaacggatgtgccaagggtgccagtccaagacttccgacgggcagttttctctataggygcaaggggccccgggtggtgggagtgatcagaagaacctgccgaagagcacaccccctctggtctgatggtcccaccaccgccccatgtgaacctgtcccactcctggaggagtggacccaggagaccagaagagtgcatcaggggacagtggccccagaacctcagctctgtaaataatctgagactatgagtatctcggggaagttcttacagcattcctgggtaggggagctagtccctggacccttggctgaggtcataggtggggactcaaggtacaggaccaagactgaagtgtggctcccacaaccttggactccagctggcagctgaaatggaaaagattggggaaggggatttgtttgttctgttcttgtttttgtttatccaaaagcaacttcagcgggtaaactgtggatacaggtaatccagaggcataagagtcctggtccaaagtagggactatagctggtccagctctccccaaaaattgggtttttagttgcagtagctcctcagtgtttcacartcctgcacttcgcctcctttttgaggaagaataaggtcaggaatggcagctgagcttactttggcttccttatacactgtagggacaaaaggaaaaacggggtggagcagacaagggctggatccaaaaagtggatggcacctcttccttcctcaagggaaaaggaagagttgtgccagtgggtgttgtcatggcccatgtcacattggcacctgatggcatcagctcaaatgcctttaggaggaaacttgggtgagagtggcccatgaagcccttttcttctttttttggggagtcggtcttggagatggtatgtggctacctcgctgccattgactcctaaagtgagacagatgtgttgagcaaggagtcatggaagtcaaagtgggttctctctccttgtgccctcttaggaacaacccaagactggtcccaagttggctaacagctgctcaagaaacaaaggaatctggggtcttctgacatgcctgttgagcagtaggagctgttctccctccccaagtcctatcactgtattcaggtagaggaggtagggaggggtctgtcctttggtcccaaaaaacaagatctcggcttgcttcctgatggccatccctacccaacagagtgtgggggatgggggtgggggtgctgcagagaaaagactaaagaagaaacctaatgtaggttccattcttaaccatattctttgctcctctctgctccaataccaccaccttgtccactcccaaaaaagtaatcgggtgtgtgtgtgtgtgtgagagagagtgtgtgtgagatatgaatgcatgtatttgtatgcttgcaggagatggcatattattgagccaaacccttctctggccctcaccttcagggaggatgagtggaaaatagcctcctcttgcccaaacatgaagggtgcttgaggtctcagcaggagctgaagaacacaatttggggaacagaagggcttttgttttggagggtttttttttttaagatgaattcaacagcctggtggttaggatgtttctaacccaagccagggcttgtgaacatgaattttctaaggtgaaataaaccttttctttctgctaaagaaagaatccttatgggaagttttggggtttggttgacccccactgtaacctgacctgacctgtggcgggtacgggaactgtcttagtaatcatggagactggctgaacctgagtgccaagctgtcagtagggtctgagatgggaaactcctgaaagtatgatttcatttcccagaaaatgtaaagaatggataccagcaatgattcctggctgttacctattctggaggggtggggttggggagggggttgtccatacctctgtggtatgagtatttcagggaaaaagaaagcaggcatggcacccattcgattttccctgacagcatctgagatccttttggggagacgctgaggagtgtttgctgccatgtactcttacagctctatgctgacactcccatttgatgtggtccagaacttagacctcagtccttggatcagccctgtggtccctgcaagcaggggcatctttctgcatgtgagccagcccccttcctgttcaagggttctgctggatctgggcttttcctgtccttcacttctgggatgattcaccccacatcttccagtaccctgtaaaccattttaaaatatttagaaaactatcctcccaaaaatgcttttgaaaatgagagccctctgtccctgccacttacagctagtctctttgggataggggtgtatgtggagagattcatgtaagtctcacatgagtgacctgtgcccctatgtgtactaatgtgtgtactgggtcagaaggtgccctgggttcccacagaccttggtttcctgcctgggtgggtgggagggagggaacttcagagagtatgtgcgaacagccatagcagagccacccctgccaaggacccagtgagggaaactcaggagcaggtggttggttcagttcccgcgctgatgtctggggcagtgcatgtgtgagaagagaggcgcaaagcagtgaaaggagtgatttggcatccagagggcccgggagccccacggataccccagggaagccactgactcacaccgctgcagaggctcctgggcccaatgcccgacccctgctggccagcatggggcctagcactggaagatgcctcaggtgtgtttggagtgggggaaacggaagtagggcacgctctcagagaccaggatagagagtcagggaacctgggaaagagtagtgccagttccgggtaggctgctgcaccaggccctaccagctcaggctataaacagtctgctttgccccaagtcttttccgtccacccccaacagccttgtcatcacttagctactgatcacgcccatggcttgacattggagggttacattagtggagtccgccacagcttcgaaccctctccccagatgccctttgcctctgctgtggccctggggttttatcaactgtccccttcctatcctcctctccaccctgttttttgttttttttttttttaaataatattttgctatgggggaggggaatatcaaatggacaagatcacttttaaatggtagtttttataagatgttataaacttgtatctttttaccattaaagtgcagtgtatgttccttcgtgatatatttaggatatttaaataaaaggaaaatggggcttttctacatactatctcctctttggggaagctttttcatactggttttagttgttttccttttttctccctacataatcaccccacaacttccagcaccctataagccattttaaaaccccttctccacagaggaacaagcaagtaggagcaaaaacagggcatcagttctgagcaagacgaaaaagcacacgcagcaggacggaaggaggctagacaccaacagatgcagtgtctctgacctgggacccccctgcatccgcagcacttgagaattcataggccctttccagacctggcttcctgggtcccagggtgcaccccgggagtttcctgcacattcgcgcttgggcacctctccctgccctcaggtggcaagaggaggatggacaagagctttcccgaggcccaggctataaacagtctgctttggccttgatgaggtaaagcaaagtgacagctgtggtctgaggtaagactttattgtatacttgggtggggtagcccagatggatgcaaggttgcaggcatgggaagcagccctcttgggtgtcactctgaaaatgaagtagggtggtggccgcacctcgccagtgaattagtcccctaccaaggtcttacagacccacccttcctctcaccctccagttcccactgtcctccaaggagaagagccttgggtaagtgtccctccctccttcagagagtgggactgtctgcctcttgaaagcgaggattgatggtggtcgtgatggcacttttgtagagaggattactgtcctggagaaagatgttgcagattataagcaaaaatcccaggattcctcgtcccctttctagacctaagaggccagccttgagccgaatcctaggagctgatggaagttagcagaggggttggttacatgtgccaggggctgggggaacccagtgggaggaatcagggctggtcttgtggtgggggaacagctaaaaaggggcctaaccaggaagtctcctcacctgcttccagttgagttgttgctgctccttctcaaagcgactgtattcccggcggtcatagatttccaccgagagccggtaagccaggaccagccccagccccactgccacgatgccccctacgcagcccagcacaatggcctgcgtgtggtctgctccctctgtgaacaagaaaccagacacacttgtgggagctggagcatagggacagatcatcagttgctcacagtgtgtccagcctgtccaaccctgtctgtcactgaaagcaaagggaacccagggaggtccaaggttatcctcaccgcccagggccttagcctcgtccacttgctcaattgcctctgcctttgtcctggattcacagttctgcttcagcccccagcctgtttcccattatcttcactctgcatccccagagttgagaccctgcccatcaaacttccagggtttgtggcatccctgcccacttactttcttggggtctcactctgagcacgaccgtgcctctggcgtcatcctccaccaagaagaagaacagctggttgtccagggtccgctctttgcaccagccatcatccaagataggggccaaggccagggtcacattggtatgggcacaagctgtactgcagttggtggccagtgggccagtcctgaaggccccacactctgcacagtccctgtgtagtagatgccaataggttaccagctgggcagttgtcacccaatgccccttgcccaactacaagcaggacggagagtaggcagatgggagtagctcaacaagccccactgtgcccctgctcccaagatgcaagacctgaggcctcaccggtgtctctcgcatggtgtcttgcagcctgggcattggtcgcatagagcaccatagtagccgtccaagcactggcagcggttgcatttgcagcgtccatgcccactgcagagccctccctcgggactgatgcaactgtccatgtccccactgcattcgcatgctctgcccgtgcggttggcatgacagtgacatactccacattggcagcgaccaaagcctggggtagagccatgcagagggtgacaaccatactccacacacacagttggccatcatgtggcacgacaagcccacgcatccaatctttttgaagtatgccaaccacaccctctaacccatacaccggaatcttttgatatttgccttccatgccaggagattcccagagcctaagtgccttgggaaggcctctcagaccccgcccttctccccaaggctccaggtacctccgcagaggatgccctcatgtcgctcacagctggcatcgtcacactcgcacagatgcccagagctctgtccactgcagctgcagcgtccacattgacagtgaccctttccactgcacaggggccctgtgccattgggagcccggcacccagattccaggtctggggaggacagctctgccacagagcactcacagagccgacctaggcggccaggggcacagctggaaggggaaggcaaaggagagaagtaggtcagagggtttgatcacccctgacttgtctctcccaggaacctctaaacccaagttctcaaaagagttggagacagacaaacagctgaaaggatgttaagtatagtgaaacactgaggggtgagagagtggagggagccccagtcagggggagggcctggacatacatgggaagcttcaagggatgaaactgagtggggagtcgggatgtcgaggagactcctgtgggggggatggaaagcagcggaggaatacgggccagggttggttggttgttgggagccaggtggttgaagggaagaggaggccctcacctgcatacaccacattgtaggtgtccctggccatcactgcagtggggagcctggggctgggtgtcactgcaattacagtcacacagcgtgtgcaactccacaatcagctcctctgagaagccaagggcccggagcctcaggagatggggctctgggaggcagtgggtggcttggagagaaacccagaaagtcacctgagaagaggcaggaatcaggccatggttatacacatgcacacacacataccccaaactcaccaatcatccagaacctcaccccttagtaaatgaagggatggggtcatgttaacacccaactcctagaaacatgcctgaggaagccactcagactgctccaggaaggatggatggaggactacctcaggctctcatgtcactccctgtacctgccacccatcttttcctgcctgcttaatttcccactcccacctccccctgcccgccttctgcctgtgcttgctggctctcaccgtctggttgattcggacgtggttgcactgtcctcgatcctcagccttaccctccctcttctcaggaccctcacactgggattcgtaagaaatgtggaccccaggagggagtgaagagtgttcaagggtcacggtggaagacaggctctatgggaagagagcgagtggataaccacgtgaaggcagaaaaggactccaaccccaccttatgtcctctccaggtgttcccaattctgccagcaccctgccctctgccacctggggctccttccattctgcccagtcgaggcatttctggagggaggacccgtgagaaccttgcatagaacatacaggatccagaggcctctaatacagcatttcagtgcagctgccagcaagggccactgagggtcacaggctggccaggtgctgtaaatgtacagagaccatgtttgtgaagccccacatcaggacacataacctgggtgcatgccaggtctaaagggcag

SEQ ID NO: 97170 - DNA, 12851 bp, Homo sapiens
aaccctcccaatatttacagcctaagctctcacccttgcttctcagccacccttcaaaaaacagctgaccgtggcttcacctgttcctttccagttcattcccctcaagcccactctcccagtgtcttctctggaactgctcggcagaagggcaccagttacctcagcaccaaaccagggagctggtaaagggtctcaactgatctctttagcacttggcattattgaccacttccttttatcaaattgtttttaagatggagtctcgtctgtcacccaggctggagtgcagtgatgtgatctcgactcactgcaacctccgtctgctgggttcaagtgattctcctgcctcagcctcccaagtagctgagactacaggcgcccagctaatttttgtatttttaggagagacagtgtttcactatgttggccagtctggtcttgaactcctaacctcaggtgatccacccgcctcagtctcccaaagtgctaggattgcaggtgtgagccaccatgcccagcctcattttttttatttttactttttttgagatggagtttcgctattgttgcccaggctggagtgcagtggcactcagctcacttcaacctccacctcccagattcaagtaattctcctgcctcagcttcccaagaagctgggactacaggcgtgtgccaccatgtccggctaatttttccattcttagtagaaacagagtttcagcatgttggccaggctggtctcaaactactgacctcaagtgatcacgccttggcctcccaaagtgttgggattagaggtgtgagccactgagcccagcctgtatttactcaatatttaataataaaagtcagttaacaaatggagctccctaggtaattctgagatggactggtatttagaaatcatggctgtagtttctgcttccctaacatctgttatatcttttctctattttctgccccactgctgttcaaattcttgccttctttattcacctgaaccattgcaggtaatctccttgcatctgttctccatgctggctggtgcaatgctgtaacatgcacctgcctgcttaaaatcccccaatgacttcgattacccacagataaagtccgatggtctggccctgcctgcccttccagctttttcttttgccattcacttctcacacctgagctgcctttgctgaagttccatcaagacacttgtctctcagccatcattcatgttgttctctctgcttggaatgctttttctctttcaccccttgtctatctggtggacacccactaattcatctttcagaactgacctgaaggctctcctctgaaccctttcctcatcccttccttcctttcccttgtctcgtctagtgagagtactcagggggttgtgtttgtcggcctccggcagatgaatctgaaagcaaggacagtgtcttggttttttatccttaatgtctaataaaacataaaatgtggcagataggaagcattgagttaaccattgaatgaatgcatggagactctagccaaggtccctcacctcagccccacctccctatgctcctcaggtctttcacagagaccatgagctccctgtcccctgggaagccgtggcagaccaagctgagcagtgcgggactcatctatctgcacttcgggcacaagctgctggcccagttgctgggcactagtgaagaggacagcatggtgggcaccctctatgacaaggtggggacctgaggacagagatgccccccacatgcatttccagcaggccgcctgggagcagtgctcacacagcactcagcactgggcctcgggtcagggttcctggcctatagcaggcccaacactcatcctctccctcagtcaggctcatctcacaagggaatggtgatacctcccctgtctacatcctggggtggttgtgagaagtggatgctgtaatatatggggaagggctttgaaaaccataaagcagcatggccccgtctttttattgacacacacaaacagcaattgctcagcacctttgggtaaacagaggggaggctgcttatgtgtggaagcagatggctcagaggttctggctgccctgaaggttgaggggagtgtatgttaggcaccactgtagttcactagtggcacataaattgggaagctcagctgagaagagttttattatgaaactgtctttggattccaccagtgtcccctgcaagcagcttcctgctcttagggaaagaatatggctagtggccctggcatgcaagtcaggtcgcacagtactgaggacacttacttgtttacaagtcaaagcccaggttcagtcagctgtatttcttgcaggtaggctgttgaattcagttctcagtttttttgttgttttttgttttgagacggagtcttgctctgtcgcccaggctggagtgcagtggcgcaatcttggctcactgcaagctccgcctcccgggttcacgccattctcctgcctcagcctcccgagtagctgggactacaggcgcccatcaccatgcccggctaattttttgtatttttagtagaggtggggtttcaccgtgttagccaggatggtcttgatctcctgacctcgtgatctgcccacctcagcctcccaaagtgctgggattacaggtctgagccactgcacccggcccatcagttctcagttttagcttgcccattttctgccctctgtaactatagagtttttggaatatcaagattttagactgcctgggtcagttttcccttccactgctgaagggtttctaaacaactgactaaatttttgttgttgtttttttttgtttttttgagacggggtcttgctctgtcatccaggctggagtgcagtggcacgatctcagctcactgctacctccgcctcctgggttcaagcgattctcctgcctcagcctcccaagtaggtgagattacaggcgcctgccaccacgcctggctaattttttatttttagtagaaacggggtttcaccgtgttagccaggctggtctcaaactcctgacctcaagtaacgcacccaccttggcctcccaaagtgctgggattacaggcgtgagccactaatcccagcaacaattgactaaatttaacccgtatttttttttgagagactgttgcccaggttggagtccagtggtgccatcatggcttgctgctgctttgaactcctgggctcaagcagtcttcccacctcagccccccaagtagctgagactacaggtgcatgccaccatgcctggctaattatatatcttaatttttttgtagagagggtcttgctatgctgcccaggctggactcaaactcctgggctcaagtgatcctcccacctcagcctaaacccatgtttttttttttttttttttgagacggagtctcgctctgtcgcccaggctggagtgcagtggcgggatctcggctcactgcaagctgcgcctcccgggttcacgccattgtcctgcctcagcctcccaagtagctgggactacaggcgcccgccactacgcccggctaattttttgtatttttagtagagacggggtttcaccgttttagccgggatggtctctatctcctgacctcgtgatccgcccgcctcggcctcccaaagtgctgggattacaggcgtgagccaccgcgcccggcctaaacccatgttttaactgagcatcaggttggggtccaaaccaagaagagctgggcataggagttactttctcagtgctctgagagtagcacttttctacataccacaggtgtactgttatggaggcctattttgtagggtaattttgcataaagtttctgccccgagactcttgaggcattatcctaccatttattcagacccaggagacaactgctgatgtcatgaggcacattatgggcttccctggaaccctaacccagcaaccagcttttggtgtctagtctcacactcattttctcccacttgacttgtgttctcaaccagagccgctcctgcacctcattaaccgtgtcactgaatacctactcaccccacctggagatttaccagccttcagccacagggacccactcccacagagagcctctagcacctagagaccttccttgttcaaaagttagcagtcccctccctacacgtgttggctttggtttgggctttgtgcagcagaatgagcatggattagaaatcaggtgatctgaattccagtcacagcacaacgagctgtctgagcttcagcgagctgctgaacttgccaattctcccttttctcatccagttaatgttgagagatcctcacagggctgaaagagtgtgtatgaacatactttgaatcatgtaagatttcacataagtagcaggtagcctcaagaaggtttcccctgctgctgccttagatgtatgagaactttgtggaggaggtggatgctgtggacaatgggatctcccagtgggcagagggggagcctcgatatgcactgaccactaccctgagtgcacgagttgctcgacttaatcctacctggaaccaccccgaccaagacactgaggtaaggtggcctgggaggagacccggagacctgtaagaaccttgggtggggggaaaatgggagcatttgctcctcctaagccctagcaaattccaagtttgggccagcatcatggttctaattctcatcattcccaggcagggttcaagcgtgcaatggatctggttcaagaggagtttctgcagagattagatttctaccaacacagctggctgccagcccgggccttggtggaagaggcccttgcccagcgattccaggtataggccttggaggaggcattatggcttgaggattactgactgccaatcaacaggaactcctgcttcttctaccctaaaccctggagtgcagtggcagacaacctcaacctcttaggctcaagcagtcctcccacctcagcctcctgagtagctgggactacaggcacacaccacctcacccagctaatttttgtattttttgtagagacagggtcttactttgttgcctaggctagtctcaaattcctgggctcaactgatcctcccacctcagcctcccaaaatgttgtgactacaaacatgatcaccatgcccagcctaccttaaaccttctagctatgctctccctctttcaggtggacccaagtggagagattgtggaactggcgaaaggtgcatgtccctggaaggagcatctctaccacctggaatctgggctgtcccctccagtggccatcttctttgttatctacactgaccaggctggacagtggcgaatacagtgtgtgcccaaggagccccactcattccaaagccggtgaggccctagggaaccactctgcagaccttcaggcttgtctcagccttgttaagagaaggctgccaactctgacccctgctgtactccctctttctgcccaggctgcccctgccagagccatggcggggtcttcgggacgaggccctggaccaggtcagtgggatccctggctgcatcttcgtccatgcaagcggcttcattggcggtcaccgcacccgagagggtgccttgagcatggcccgtgccaccttggcccagcgctcatacctcccacaaatctcctagtctaataaaaccttccatctcatactgacccagtccttgacttattcttgccctacaccattccagaaacttgtgaaaagtgaaacaactatttatgtgtaagaccctgtgctagatatattttcttcacagtaacttctcagccttgcttcccaaatcatttgaaaccacagtttctaggattaaataacgtgaccaaattcacaagtggctaaaaagtgacagaacagggccttaacccaaagtccatgcttttttcccctactgtaccccactgcaactccctggaaaagacagactggtaactgagtggaaaacaaaaggaaaacttatttattcttagaggtgggaatgtggggagtggggcagaacaggtggtggccytgggagagggtcccaaggggcagaggttggggatgtctcagtaaagaggggcaggtcatgaatagagcctccacccccagcrgggggttcctgggcccgcccaagcactgggctaaaacgtggaaactgggcattgacaaagtacagcgggatgtgggcaattcrgcctgtggaccagccctgcagagaagggaaagaaaaggatcagagtctgggcccaaagaagggccacctggcagagccatacagcagccaaggccctcagcttctccatccaactcctggaagccccagcagcctggcgcactcaccacactgagcagggcccctttgttgaaggaaggatggaaagtgatgagctggggctgggctcctggctccccctggataatgccactagaagaaaaggtgagcaggcaaccggaggcaagaagggagctgaatgtagtgggatgtgggtttgtttgtgcaggaaggctggtgagaagtccagacctaagggcccacatggcacttaccagggaaggagctcaaacacagggctgtttcgagtgygaaaaaggaggatgactggtttaccatcctgtacccttggctttcctgtaagaaatggatccagggataggggaggaactctgaaggcagagtcccaggacatgggcagaggagaactccaggccagggcacggcctcattagattaactgggaagatggctgtgggctgagcccttcatccttgcctctcacctttcataagcacagccagacgttccccactggggtcccagaccatggagtgagcctctcccccaagcctgtgggtaaggacaggttaggagagtttcagtgtggtccctcccacctgcttttcactgccactccctcaaccactcagctcacctctcctcaccatctggtgtctgtattgttgtctcagacagatctgccacaatcgttgctgactttgcacctccaacgcacccctttccctcacctgtggacaaataagagcagagaggttcttgcaagaaacaggcctctcactggtcccccgccagctcaccaaaggcatcaacacctcgaaatctcctaagcttctatatttccctttatccctcagagctgcatcttaccaaaggttgctgcctccctctgaccaccccaaatactgaagtgttgccctaactcaccacaacgttctggaaaagacagggagtaaatcagtggctctcccaatacagtgaacagcagtcggctgccatctgggctccagcagccagtctggggtcagggagcaaaaggcaggagaaggtatgtctatagtagaatgcaggagggaaagtagaggtggccaggtttgggagcatcaggggcccattggaatcatctcctccccagtgtctgtgaatcagagtcccctcttacctgacagcgccctgatagagtaggccacctctcacaagtccacatctgggcctcccagactctgagccagagaaaagcaaattacagctcaggacctctaagttctaaaagttggacctacctcccttgacagagcttccaggagctaagtgcctttctctaggtccttgccctccctccatccttgtcccactcaccgaaagacagctgaaggagtggtagccaggattttgctgccgtctggggaccagagcaggttggtcaccccacctcctcgaaaccagggaagggggacacaggtctctgttgagacatcccatacctaggagagtggggcaggagataagggaaaactcaagcaccccatcatctcacagtgggctggcctctctaatgtacaaagagccagaaacgagaggaagcgggagagggactgtgaaacatgaggcacgggttcatgctgacaattacagacagcggaattttaaacctcacgagtctgatggcaaagctcctctctgggtaagtttaagactgaatggaccaaggtccctcctccttcccccaagatgtttccacaaccgagtgaggaacacttttgccaggactgaaatgtgcatgaggggcagggacccactcacccggatagcagcatccacgggtgaagctgagagcagccgccccccactgggggcccaggccaagctggtaacaggtgtatgcccagggtgagacagcacttgggcacagccagaagagggtctggaggggaacacagaggatgtggagtcagaagatgacaagaagccatccccaaaattctatttctttgcctcctgctaaaacctcctatcctgatggcccactctgggctcaaatccaggttgtgaaaaaggaataaggattgtgaaagttaaaagaaaaaaacagcgaaggggaaaaacgaccaagtcaccacgagcaggtcaacagagaagaggtaatctgcaaggtctcaggccagggtgaaagagtgctttcacgagataggccatgaggcaaaacctaaccagtaacctagaaggtactgcccctggggcgatatcaggccctaccccagaacacagctctccgcccacaggccatccagcctggccatccatctatccaggattaataatctatgacattacttcaaggttccaaccttttctctccagttatctaacactcctcagaacacatcctgtgctcccaaacagccctcctgccttgccttatcaaagtacctcccaactctgcagctcccgcgtttgctccttatcataaagatgctgcaggctgggcgcagtggctcacgcctgtaatcccagcactttgggaggccgaggtgggcggatcacgaggtcaagagatcgagaccattctggccaacatggtgaaaccccgtctctactaaaagtacaaaaaaattagctgggcgtggtggtgttcgcctgtagtcccagctacttgggaggctgaggcaggagaattgcttgaacccgggaggcggaggttgcagtgagccgagattgcaccactgcactccagcctggcgacagagcgagactccgtctcaaaaaaaaaaaaaaaaaagatgcagcatgtggctcggcctccatcaccagcagggaactacctgagggcacctgccatgtgtctgcagctgtgtatttccagagccatgtgcctggcctgacagacgaaggctactacctgaattaatgccacctctctttccacctaactataaccaccttcagctccagtgaagtcttagtcatggatgtacaatttaattctcttgaactttatgataaatcacagctgcctttgcaggtgggttcagattcatctcattcttttcagtggctccattgtataccactcaatagatgaactataatttattgagtcatgcctctacaaatggacatttgacttgtttgtaattttttattatacataatgctgtaaaaaatatttcctgggccaggcatggtggttcacactccaggatggagtgcagtgacacagtcatagcacactgcagcctcaaagtcctgaggctcctgcctcagcctctaaagtagctaggactacaggcgtacaccccacgcccagctagtttttttatttttattttttgtatagacagcatctatgttgaccaagctagtctcaaactcctaggctcaagcgatccatctgcctcagcctccgaaagtgctggaattacacgcatgagccatcacgcctggccttgttttttgttcatttatttaaaaaaatttttttaaatcgagttccgctcttgtcacccaggctagagtacaatggcattatctcagctcactgaaacgtccacctcctgggttcaagtgaattctcctgcctcagcctcctgagtagctgggattataggcgcacgccaccacacccagctaatttttgtatttttagtagaaacaaaaaaaaccaacaaccttccaggcgtggtgtacgcacctatagtcccagctacttggcaaggggctcacttgagcccaggtgttcaaggctgtagtgtgcaatgattgagtctgtgaatagccactgtattccagcctgggcaacataatgaaaccccatctctaaaaaaaccaaaaaacaggccagttgcagcggctcatgcctgtaatctcagcacttcgggaggccgaggcaggcgcatcacctgaggtcaagagtttgagaccagcctggccaatatggtgaaacccctgtctctactaaaaataaaaaattagccggtgtggtggcacgcacctgtagtcccagctacttgggaggctgaggcaggagaatcgcttgaacccaggaggcagaggttgttgcagtgagctgagatggcgccactgcactccagcctgggcgacagagtgagattccatccccccccaaaaaaaatctgtgatcacgtgtttttttcttatagtacctattgtcaaggtttaggtatcagggttacattagctttataaaaataaatcaggaagatcctgcaacaaaaaaaagggaggacaggccgggcatggtggctcacgcctgtaatcccagcactctgggatgctgaggcgggcggatcacgaagtcaagaggagaatcacttgaacccgggaggcagaggttgcagtgagccgagattgcaccactgcactccatccagcctgggcaacaaaagtggaactccatctcaaaaaaaaaaaatctcattattttcttctacaatccactttggtaacttatattttgctagaaaatcaaacatttccacagggcacggtggctcacttctataatcccagcactttgggaagccaaggcgggcggatcacaaggtcaggagttcaagaccagcctggccaatatggtgaaaccctatctctactaaaaatacaaaaattagctagtgcgtgcctgtagtcccagctacttgggaggctgaggcagaagaatcacttgaacccgggaggctgaggttgcagtgagtcgagatcgtgccactgcactccagcctgggcaacaagagtgaaactccttctcaaaaaaaaaaaaagaaatcaaacatttccttcagattttcaaatctgttggcctaaacaagtccacaatattcttttataattcttctattttctcccgtatctatatctttccacttctgaaaatagtatactttggttttctttttctccttaattaggctaaccaagaggttttcttctttattcatatatatacgtatatacacgtatacatacacgtatatatatatatacgtgtatatatatgtgtatatatataacatatatatgtgtgtgtgtgtgtatatatatatatattttttttttttgagacagagtcttgctttgttgcccaggctggagtacagtggcgtgatctcagttcactgcaacctccgcctcccaggttcaagtgactctcctgcctcagcctgccaagtagctgagactacaggcgagcaccaccacgcccagctgattttttgtatttttagtaaagatggggtttcaccgtgttagccaggatggtctctatctcctgacctcatgatccacccgcctcagcctcccaaagtgctgggattacaggcgtgagccaccgcgcctggccttttttttttttttttttttgagacagggtctcactctgttgcccagaccagagtacagctgtagtggcatgatgtcaactcactgcaacctccgcttcccgggttcaagtgattcttgtgtctcagcctcccaagtagctgggatcacaggcacgcaccaccacgtccagctaatttttttgtatttttagtagagatggggtttcgccatgttggccaggctggtttcgaactcctggcctcaagaaatccacccaccttggtctcccaaagtgctgagattacaggcatgagccactgcgcctggcctaatttttgtatttttagcagagacaggttttaccatgttggccaggctggtctcaaactcctgacctcaggtgatcctcacgccttggcctcccaaaatgctgggattacaggtgtgagccactgttcccagcctttattcataatttttttttttttttgagacagagtctcgctctgttgcccacgctggagtacagtggcatgatcttggctcactgcaacctccgcctcccagattcaagcgattctcctgcctcagcttcccgagtagctgggactacaggtgtgtaccaccatgcccagctaattttcatatttttagtagagacaaggttttgctatgttggccaggctggtctcgaactcctgacctcaggtgatccaaccgcctccacatcccaaagtgttggaattacaggcatgagccaccgcacccagcttagtcataatttaaagaaccagtttctggttttatttttagttagttttcacaggtattctttttctaattttattagtttctgatcttattagtactaattttctttacacttcctttaagtgtaaaggaagtgtatagtcctctgaaagagtctttccaccccgtaacccacagacacattgtccccacaatccaaaaagcccctagttctctttctccagattagagtattctcagcaacccaccttgatcttacttctgcttttcccatagccctgggaagtgctgtgaggacaaagaacttctcctttcagacgtcctcaccacccaccatgcctagcattgcacaactctcaggccaaggtaaggcaggctactaggacttaccgggtagacaagga

SEQ ID NO: 97171 - DNA, 22035 bp, Homo sapiens
taggttcactatcacctttagttatacatgaagaaaacaggcataggtaggttaaataagttgcccaaagtcacacagctggtaagggtcacagcagagttgatgctgggttatctgactggagtccaggcgcctcaccagcatggtattgtcctgccttcgtctacttccttactgaacatgctactgaagatatacaagatcatttatcttgagcagtgtttcagactgaaggtcaaactgatcagtgggttgaaatattaatgagtcatggcagaatagaaaattccagtgcattaagttttgtctcatgaagctgtttgttatgtattaggatctggcatgtgctatcacagtatctcacttaagtcagtaggtctcagccatctactctggacctctacttcccaataaatagaacaaatggcatctgaagagagcaaatgcagtatttgcgcaaggataggataagagagtttgcacaaaggggttaataactgataatggctcaatacctaggcacttctccctccaaaaggcattcttttttttttttttttttttttgaggcggagtttcactcttgtcgcccaggctggaatgcaatggtgcaatcatggctcactgcaacctcagcttcccgggttcaagagattctcctgcctcagcctcccaagtagctgggattacaggcgcctgccaccacgcctggctaatttttgcatttttagtagaggtgatgttttaccatgttggccaggctggtcttgaactcctgacctcaggtgatccactcacctcggccttccaaagtgctgggattataggtgtgggccactgcgcctggcccatttttttttaaggatagctttccttaatggatgaattttaggcaagagaacatttgttttgcgcaagggggctcttccacaactgtacactgtcttttcccaaagagattcttctgggaaagagaacatcatatagtaagaaacttggcaaagcagagggcaggaaccctcagagaatctaatgaaagctatgggccctatgggcctctactgagacccatgtccccaagccccacatgagcctgcccctacacataatttcagagggttcgggaaccctaaaggccattatcacttctaaacaaccagttgtagtttgttgtcctttgagaagtatggtgtgttcatgtattcatgtttggaaatgccttttttaaggtcaaacgtccagaattttgatgttacaaaggtgagtgaaaataagttgacaattaatccttggttatgctcactgacctcagggttataatagaaaagagtgcaattttacacatccctcaggtgctttaaaccttttggaactcatctcaaagctattttagatgcaaagctttaaaacctaacggtagggtattctaagactttttactaaacaagttcatagaaaattataaaatgtaagcaagcataacgaaaaagttataacaatctacaattccactatcagaaatattgttaatattttggtaaatgtggttccagatttttctctataaaaatattttgggatcatactatacatactaaacttgcttttttctttactatattcattcatctgcctgcccagtaatgttctagacatcagagaatccagtggtaaaccagaaaggcagggtcctagatttcatgatgcttaccttttcaaatggggagagccataccttataacaagaaaataccaaatgcaaaccatgtttaaaaaaaaaaagccaagcatggtggctcatggctgtcatcccagcactttgggaggccgaggcaggcagatcacttgaggtcaggagttcaagaccggcctggccaatatggagaaaaatccatcgctactaacacacacacacaaaaattagctggtcatggtgatgcatgcctttagtcccagctgcttggaggctggggcaagagaattgcttgagcccgggaggcagaggttgcagtgagccgccatcgcgctgctgcactccagcctgggtgacagagtgaaactccatctcaaaacaagaacaacaaaaaacgatgctggccattttatatgaggtgttggaggtgggagaagcatgttgcagggagtcactaaggtgacatcatttaaggtcttgaggttcgatggcctgtgcccaggctgcacaggagtcaagagtattctgacattagactgattggggaagaaaactagatggtgaatacgaagtgtgttagggattaaatgtagacacacataaggaacttggatatgaagttactaggttttcagcaggtaatgatgtaagttgatttgattttaaagatcactaaagcaactgtgtggaaaagagattgtcagaagggaagagctgaagagaccgattggaagctattgcacaagtctgcgatggagatgatggtggctcagagcagaaatagaagtggatatatttggagtgtacaagaagagacaacaggactatgtaactgaatggcagcagggtgagggaaagaggaatcagcttatgttttaggtttaagtagctgggtaggcggtattatttagtgcaactggggacagaacaagttagatataaaaatcaagatttctacgtagaattgttaatgtgagatgcccatcaaacatccaggtggataactgcggggcagtggcatgtgagtctcttggagctcagtggtcaggtagaactggagataccattttggagtcactagtctcaccccagatgagatccacgagggcaaagtttttttttttttttttttttttcttttttttaggctaggcaaggtggctcattcctgtaatcccagcactttgggaggccgaggagggtggatcacctgaggtcaggagtttgacagcagcctggccaacgtggcgaaaccccgtctctactaaaaatagaaaaattagccgggcgtggtggtgggcatctgtaatcccagctactcgggaggttgaggcaggagaactgcttgaacctgggaggcggaggttgcaatgagctgagattgtgccactgcactgcagcctagataacaaagggagactctgtctcaaaaaaaaaaaagtacattttttaactctaaaagtataagatacataaaatctactgtcagcgtacagcacaatgaatttcacaaattgcacacccaatgtaaccaagattaacagaccctcacccagaagctctcccaacatggccatcactagcttggcttaacagatttattttgccatgttttgtctattatatgacagagtcatatgtattattttacatctggtttctttcaagcaccattatgttaatgatactcatctatactgttgagtagtgcattgtgtgggtggatatttacatttatccattctactatgaatgagaatttgggttgcttccagaatttgtcaactatgaaatagtgccgctatgaatacacacattgtagtacatgtgttttggtggggatatgtgtttctgttgaatgtgtatctgggagaatttcattgtcgtaagccttatgttaacagtgttccaatatatactcccaggatatgaaagtgcaattgctggctgggcatggtggcttgtgcctgtaatcccagcactttgggaagccgaggtgggcggatcacctgagctcaggagttggagaccagcctgaccaacatggtgaaatcccatctctactaaaaaatacaaaaattagctgggcgcagtggtaggtgcctgcaatcccagctacttgggaggctgaggcaggagaattgtttgaacccaggaggcggaggttgcagtgagccaagatcgcgccaaagcaccccagtctaggcgacagagcaagactctgtctcaaaaaaaaaagcaatgcaactgcttcacatctttgttaattacctatataataagtgcaataagcacacaataaatatctgttgaaaggactaatttgaacacagatggcatttaaaactatgggcttggataagacatcttggaagaaatgtgattaggtaagagggctgatgaacaaagccttgggcaactcccacatttgcagaactggcaggagcataaaggaggaaaatgggagagcttggagttctgcaaaacatgagaaaaatgtgtttcgaaggggcagtcaactgctttgaatgcttccaagagaccataagataaggcagtggtttgggaaaagaggattcaggagttctgatcttggtcatttcaagcctgagtagcttatgcattaatcactcaaatggacacctcaaacgtgcagctggatataggagtgtaaaatctgagtctaagacaagtatttgtgagtgtaaatatatttctgaaggagagtatagatgggtaagagattgggtcccagttttggggcatttccatgtagaagttgaaaagaagtagatacctacagagcaaaactatgagagtgatgagacagaagagaaatctggaaagtgtcttgtcactgaggtaatgccaacatcaactgtgttaaatgttgctgagaatagaaaaatgatcactgaattgaccaattaccaatgaataaataattactccagtaaataaatatacttccatatgatcattttgaatggttgcacaaaactctgttgcgtggctctaccaaaacctgctcaatcagttccattgttgaatttgtagattcttctcaaacctttagaatcataaatgatgtcaccttgagaatgttctaagagtattgtgtcaaatactctaagggcatttgggtcaaaaaaatatgcacattagaaaggttttaggccgggcgcggtggctcatgcctgtaatcccagcactttgggaggctgaggtgggcagatcacatgaggtcaagagtgggagaccagcctggccaacatggtgaaatcccatccctactaaaaatacaaaacttagccggacgtggtggtgagtcactgtaatcccagctacctgggaggctgaggcagggagaattgcctgaacccgggaggcggaggttgcagtgagccaagactgcaccactgcactccagcctgggtgacagagtgagacagcctcaaaaaaaaaaaaaaaaaaaaaaggttttggacctggtgtggtggctcatgcctgtaatcctataatcccagcactctgggaggccgaggcgggcggatcacgaggtcaggagatcgagaccatcctggctaacacggtgaaaccctgtctctagtaaaaatacaaaacattagctgggcgtggtggcaggcgcctgtagtcccagctgctcgggaggctgaggcaggagagtggcgtgaacctgggaggcggagcttgcagtgagccgaaactgcgccactgcactccagcctgggtgacagagcgagactctgtctcaaaaaaagaaaaacaaaacaaaacaaaacaaagtacggtggtgggttggtttgaagaatctaagagggctatttctggcatttccactattccaccatgatttccttgagagacttgctctgtcgcccaggccggagtgcagtggcgcgatcttggctcaccgcaagagctctgcctcctgggtttcacgccattctactgcctcagccttccgagtagctgggactacaggcacccgccaccatgcccggctaattttttgtatttttagtagagacggggtttcaccgtgttagccaggatggtctcgatctcctgacctcgtgatccgcccgcctaggcttcccaaagtgctgggattacaggcctgagccaccgcgcccggcctattccaccatgatctctacccctcctcccgaatgttagtggtgtaactatgacaacaagcacgcgctgctcaaggctcaattttccagccgttaccgacctccaccgcgtcactgtacgctgcccagaaactctgaggcggatcccccaacccagtgtcagactgatcgcctttggcccgagggcgaggagccacaggacagtatggccaaagcggcggcctcctcgtcgctggaggacttggacctgagcggagaggaggtccagcggctcacctccgccttccaggacccggagttccggcgaatgttctcccagtacgccgaggagctcaccgacccggagaamcggcggcgctacgaggcggagatcaccgcgctagagcgtgascgcggggtggaagtgcggttcgtgcacccggagcccggccatgtgctgcgcaccagcctggacggggcgcggcgctgctttgtgaatgtctgcagcaacgcgttggtgggcgcgcccagcagccggcccggctccggtggcgaccggggcgcagctcctggcagccactggtccctgccctacagcctggcgcccggccgcgagtacgcggggcgcagcagcagccgctacatggtctacgacgtggtcttccatccagacgcgcttgcgctggcccggcggcacgagggcttccgccagatgctggacgcyacggccctggaggccgtcgagaagcagttcggcgtgaagctggaccgcaggaatgccaagaccctgaaggccaagtataaggggaccccagaggctgcggtgctgcgcacgcccctgcccggggtcatccccgcaaggcctgacggggagccgaagggtcctctcccggacttcccctacccttaccagtacccggcagcccccgggccccgggcgccctcccctccggaagcggccttgcagcccgcccccaccgagcctcgctacagcgtggtgcagcgccaccacgtggacctccaggattaccgctgctccagggactcagccccgagccccgtgccccatgagctggtgatcaccatcgaactgccgctgttgcgctcggccgagcaggcggcgctggaggtaacgagaaagctgctgtgcctcgactcgaggaaacctgactaccggctgcggctctcgctcccgtacccagtggacgatggccgcggcaaggcacaattcaacaaggcccggcggcagctggtggttacgctgccagtggtgctgccggccgcgcgccgggagcccgctgtcgccgtcgccgccgccgcgccggaagagtccgcggaccggtccggaactgacggccaggcctgcgcttccgctcgcgagggggaggcgggaccgcgaggagtcgcgcsgaggacggaggccacgatacctgcgtggctggggctgcgggctccggggtcaccaccctgggcgacccggaggtggcgcctccgccggccgcagctggagaggagcgtgtccccaagccgggggagcaggacttgagcaggcacgcggggtcaccgccgggcagcgtggaggagccatctcctggaggagaaaactcacctggtggcggaggctccccttgtttgtcctcccggagcctggcgtggggttcttctgcgggaagagagagtgcgcgcggagatagcagtgtggaaacrcgcgaggagtcrgagggcacgggcggccagcgctcagcctgcgccatgggtggtcccgggaccaagagcggggagcctttgtgtcctccgttactgtgtaatcaggacaaagaaaccttgactctgctcattcaggtgcctcgsatccagccgcaaagtcttcaaggagatttgaatcccctctggtacaaattacgcttctccgcacaagacttagtttattccttctttttgcaatttgctccagagaataaattgagtaccacagaacctgtgattagcatttcttcaaacaatgcagtgatagaactggcaaaatctccagagagccatggacattggagagagtggtattatggtgtaaacaacgattctttggaggtaacagttctttccagagtcctcatatttgaaatatcccatctcactttaaaaatttgctattaccggccgggcgcggtggctcacgcctgtaatcccagcattttgggaggccgaggcgggcggatcacgaggtcaggagttctagaccagcctggccaatacggtgaaatcccgtctctactaaaaatgcaaaaattagccgggcatggtagcgggcgcctgtagtcctagctgctcgggaggctgaggcaggagaatcgcttgaacccgggaggcgaagcttgcagtgagccaagatcgcgccactgcactctagcctgggcgacagagggagactccgtctcaaaaacaaaaaacaaaaaaaaaacaacttaaaatttgaagttctgaagactctttaaactcataaatggacaattggtggtttttgttaatgttacatgtaatttttttagctcttttaacataaacaagagttaagtgttgagaaacaacactagctgcacggattatatattaaaaattaagtattagttggctgggtgcggtggctcacgcttgtaatcccagcactttgggggggccaaggcgggtggatcttctgaggtcaggactttgagaccagcctgaccaacatggcgaaaccccgtcactattaaaaatacaaaaattagctgggcgtggtggcgggcacccgtaatcccagctacttgggaggctgaggcaggagaatcacttgaacgcaggaggtggaggttgcagtgagccgatatcatgytactgcactccagcctgggcaacaagagcgaaactctgtatcaaaaaaaaaaaaaaagaaaaattaagtattagactttgggctttaacttacgagaaaattttacttttccctcgtttttctagaaatttgctaggaagttacatgtgtaatttttgagttgggtatctctatgagaagtggctaattggaaaccttccaaaagtggtaaaataaatagctgggctagctaaggtagtttgttagaatataaaatatgaaactgagtatctgtttttgtcatcagaagtgggacatttaggaaagggcagttgttttcctgtaacwgttttagtaaatatgaaaataacccacaatgtgggaagaaaactttgtagacaagcaattaagaaaatattcaataatacattttaatccgattttcaagtatgctaacattttagaaaataaacgacgaaaatgggattagggcaactgtattttatatctttgaagcctgaaatagatttgtaattacttcactaatcatcacatttttctaaagctgatggaacaacagcatgtaactcttttgctttactttgtactggaccaggctctcagtgttaaatttttggaaaaaaatcatgagtagtggaacatatataatgataatattatatgcattacatgaaaataatcataaagagactgttatgtggctttcaaggtcagaactttacaaataaatactaaatatatgtattgaagttttcagtgtttactgacaattttcctaaatcttcagagcctctgaggtcagtaactttttcagttcattagtcatttaatcagtcattagactgagaaggcaagtttatgcaaatcttctggttgttttttgagatggagtcttgcaccgtcgcccagactggagtgcagtggggtggctcactcactgcaagctccacctcccgggttcacgccattctcctgcctcagcctcccgagtagctgggcctacaggcacctgccaccacgccaggctaattttttgtatttttaatagagatggggtttcaccgtgttagccaggatggtcttgatctcctgacctcgtgatccacccgcctcggcctcccaaagtgctgggattacaggcatgagccaccgcgcccggctgcaaatcttctgtattttaatcataaccatktccactatatattccttcggataactaaaaattaaaatatttggtgtattatttgcaaggagtcaaagatgatgtcttttcccagaggcatgaaccttagaaatgctttcgatggggatgtttctgtaacactgtgttattctggatcttcaaataatagcaaagccagttactctaaatgtaaaatttttctattcccaaggttcacttttgtttggtaggttttcacgattttaaatactgtttaatggaagaaaaatacgtagccaggcgtggtggctcacacctgtagccccggaactttgggagactgaagcaggcagatcacgaggtcaggagattgagaccatcctggccaacaaggtgaaaccctgtctctactaaaaatacaaaaattagctgggcgtggtggtgcacgcctgcagtcccagctacttgggaggctgaggcaggagaattgcttgaacccgggaggtggaggttgcagtgagctgagatcacgcagttgtactccagcctggtgacagagtgagactctttctcaaaaaaaaaaaaagtgtgtgtgtgtgtgtagagagttkrtktgtgtgtgtgtgtgtgtagagagtttatgtgtgtgtgtgtgtgtgtgtgtgtgtgtgtggagagagagtttatttgggccaaaatagaggactgcaacctgggaaacacatattcaagttgccctgaatatatgttcccaagttcaagaaacttgaaacttgtttctttctgatattttccacctatttggaccaaataatgagctgtgtttattttgtaattacaaaatttgcttatataaaactacagaggaaaacatttttatttggggcaacaatgaactgcttttataaattaatttaaaatatggttaatatggttattctccccacaccctaactatacacctgtattcacttgacatgaacaaactgctttgtgtttgggattcaggtaaraggtgatttttgcattttctagtaatagtttagaaatcttttcatgtcagcatcttgaaatctacctcattatttatttatttatttatttatttgggagacagagtctcgctctgtctcacccaggctggagtgcagtggtgcgatcatggctcactgcagcctcaacctcccagactcaagcgatcatcccaccttagcctctggagtagctaggaccacaggtgcatgctaccactcccggctaatttttgtattttttgtagagatgagttttgccatgttgcctaggctggtctcgaacttctgggctcaaacaatccacctgccttggcctcctaaagtgctggaattataagcatgagccactgtgcccagcctaatttttttcataatttactttttctctggagcatagattcaaaatgccctgaatatatgctctctacttcattcttttaataaytatacagtttgctaatgttacrctggagtatcccagtgcttaaaaatataatacacttgsctgggtgcagtggctcacgcccgtaatcccagcactttggtaggccaaggtaggaggacagcttgaatccaggagttggagaccagcctggacaacaaagtgagacctgtatctacaaaaaatgtcaaatttttttttttgagacagagtctcactctgtcgaccaggctggactcactgcaatctccgcctcacgggttcacgtgattgcagttttagtagagacagggtttcactatgttggccaggctggtctcgaattcctgrcctgaagtgatccacccaccttggcctcccaaagtgctggaattacaggcgttagctgccacaccaggccccaaaaatgtaaaaattagctgggcattatggcatgcacctgtagtcccaggtacccaggcacttgggggcacaggtggaggattgcttgagccagggaggtcaaggctgcagggggctatgagtgtgcgactgcattccagcctgggcaacaaagtgagascctgtctcaaggcaaaaaaaagaaaaaaaggggggcgggggctgggtgtggtggtggctcacgcctgtaatcccagcactttgggaggccaaagcaggtggatcacttgagtgcagaagtttgaggccagcctgtgcaacagggcaaaaccctgtctctacaaaaaaatgcaaaacttagccgagagtggtggcatgttctgtggtcccagctactgtagaggctgaggcgggaggatcacttgagcctgggaggtcaaggctgcagcgagccgtgattatgccactgcactccagcctgggagacagagcaagactctgtctcaaaaacaaaatcaaacaaaaaaacacaccacttatttgaaataaaatactgtaattggctcttacctgcccaagaactaaaaggtcacacaaaatttgaatagatcttttcatgtatatttcttagccacctcattaggaaatgttttaaagctgaattatattttgtatctgggatcccatttatagccctagagatgatgttattcttctgaaatactaaaagaggccagctgtggttgctcacacctgtaatcccagccctttgggaggccagggcaggtggatagcttgaggtcaggagttcaagaccagtctggccaacatggtaaaaccccatctctaccaaaaatacaaaaattagyccggcatggtggcagtcgcctgtaatcccagctactcggtagtctggggcaggagaattgcttgaacctgggaggcggaggttgcagtgagccgagattgcaccactgcactccagcctgggcaacagagtgagactatgtctcaaaaaaacaaaacaaaagaaacaaaaaaagaaagaaaaatactaaaaggtcaggtttaatagacagaaaaagtaccaagacctctttcttttaggttctttttctatacgtttatgtttgttctcagtacaactcttattgctctgtacaataccaaacttaaatttttctaagacagctcataggaataacattaaaataaacattttaaaaagtgtaaccctgaacaatgtgagaatttttgtgagctgctttgagatacaactgttgtcaagtgkgrcttattaggcagaatattttttccctttttattttaggaaaggttatttgtcaatgaagaaaatgttaatgagtttcttgaagaggtcctgagctctccattcaaacagtctatgtccttgaccccrccattaattgaagttcttcaagttactgataataagattcaaattaatgcaaaggtaaggaagttgatgggctctatagaggagtaatgaagcacagagttaaaacctaacaaattattgatttcttaatatcataactttaaayaaaatttacataatggttgggcagagtgatgttaagagaagaaaagtttttcttttttttttttttgagatggagtctccctctgtcacccaggctgaagtgcagtagcgcgatctcatctcactgcaacctccgcctcctgggttcaagcgattctcctgcctcagcctcccaagtagctgggactacaggagcatgctaccatgcctggctaattttttgtatttttagtagagattgggtgtcaccgtgttagccaggatggtctcgatctcctgacctcatgatccacccgcctcggcctcccaaagtgctaggattacaggcatgagccaccgcgcccagccaagaaaagccttttgtctgtgtatgtattatgtgctaaacactttgctattcattttcacattatttaatcccaaaataaccctacaatgaggaacaaagagaaactaacacttaggaagtttgagtactagtccagggacatacaatcttttttgactctcaaaccatgagaactatgttatacaatttgtacgttctttctaattcaatcttaattttggtcatttttatagtcttcagtattgaagatgcaaatgatttagtaactaccacaatcgacagacatatgtattagaagggcggctctgaaaaattagaggaattcaagaaaatttaagaaattcaacaatgtgcttataactgttaaatagttttgtagaccatgttgaaaagtatggattattgttgtgaaaggatataatcaggatattagtgccaggtttacattgttaaaaaatgactggcagtaggctgggtgcagtggctcacacctgtaatcccagcactttgggagaccgaggcaggcggatcacccgaggtcaggagttcgagactagcctggccaacagtgaaaccccgtctgtactaaaaatataaaaattagccgggcgtcatggcaggcacctgtaatctcagctacttgggaggctgaagcaggagaatcgcttgaatctgggaggcaaagattgcagtaagccaagattgcgccactgcactccagcctgggcgacagagccagactcaatctcaaaaaaaaaaaaaaaaaaaaaaaaagactggcagcagactagtcgtgatggctcatacctgtaatcccagcactttgtggatcatttgaggtcaggagttcgacaccagactgggcaacatggtgaaaccctgtgtctactaaaaatacaaaaattagccgggcgtggtggtgcatgcctgtaatcccctctacttgggaggctgaggcagaattgtttgaacctggaggcagaggttgtagtcagctgagattgtgccagcctgggcgacagagcaagactccgtctcaaaacaaaaaaagtcatccttcaaatgctgcctgtctttttctttttttgacagggtcttaccctgtcacccaggctggagtacagtggcactatctcggcccagtgcaacctccacctcccgggttcaagtgattcttctgcctcagcctctcaagtagaggggattatcaggtgtgctccaccacacccggctaatttttgtgtttttagtagagatggggtttcgccatgttggccaagctggtctcgaactcctgacctcaagtgatctgcctgccttggcatcccaaagtgctgggattacaggcatgagccactgtgcccagcctggaggatgaattttgacaggraagcctggatgtatacctgcaggtctgtaagggctattacctcacaactgttaaaaattttatttccagagggtagtacaatttaattttgtattatttaaaataattattaatttgttgtttctcttgacacagttgcaagaatgtagtaactctgatcagctacaaggaaaggaggaaagagtaaatgaagaaagtcatctaactgaaaaggaatatatagaacattgtaacacccctacaactgattctgattcatctatagcagttaaagcactacaaatagatagctttggtttagttacatgctttcaacaagagtctcttgatgtttctcaaatgatacttggaaaatctcagcaacctgagtcaaaaatgcaatctgaatttataaaagaaaaaagtgctacttgttcaaatgaggaaaaagrtaacttaaacgagtcagtaataactgaagagaaagaaacagatggagatcacctatcttcattactgaacaaaactacggttcacaatatacctggattcgacagcataaaagaaaccaatatgcaggatggtagtgtgcaggtcattaaagatcatgtgaccaattgtgcattcagttttcagaattctttgctatatgatttggattaattctatataattttggacttttaaatattaaggttaaaaaatacctgkatctaaaattgattctgttaactgktgtcttaaaactaaaggtattaaagtataaaattaaaatttgcaatttttttwaaaaaattgcaattttgattctcatgggggaaattggagataatttttttttttttgcctctggagtttaaagtttccttatggagataagttttgtgattcctgtaatagatgtgtatgttttctatttgagagttaaaacatttgagagttaaaacatttagttttaatacaacctatgtatatatacttctgtgttaawttttgctttgtcattaataaaatttaaaaatattcactaattgtgtttgtcacacaaagtaattctcaagaatgcatttaactggaattataagtacatgtgtggggggtagaatttcaaaactgtttctcagtctcactaagtaggacatatttaagcttgaaatagagcttagaggggaaagaactttactaaccaatattaatctaaacaattacgatacaaattcaccagataaaatgtagtatttttcatcagctctatattttgtcacacaaactatatatatttttgttacataaagtatatataatagatttagttatttagtaatgattttcaaaattcaattttgaagtatttcttagaagttattgaaatattaaaacatcttgtggttttatagaaatttaagagtaaaactggaatttttaaaatctggcaatttgctctgataggaaaattgccttcattacattattacacagaaaaacaaaaaaaagccagtgtttcctaatcactttctttttttttaagagatgggtcttgctatgttgtccagactggattcaaactcttaggctcaagtgatcctctcatctcagcctcctgcataatcaatttcctttataacacctaaaatgtgaggcaaagagaagatcctaacaggtttttttcttacaaaaaattttagggcagccaaagaaaatgaaaggaaggaaatacagaaagggaaatatttgttgatttaatcactaaccccaaagccaggagctgatctatttgtttcaaaaacagctactacttcacactctggccttcttagctcagtcctggaaataacctaattttttagttctttgaactagtgatgtcaggtcagagtaccagaaataggtacaaagcctcctgattcacccttatttataacccccaggcaaaatcttgcaccagactgggccgtgggtaagtctaaaggtagctcgtaaagcaagagaactatttgcctcaccttagataagcatatgtgctcttaaactactatgaatcttaaattgatgcaataattttgagactgccatttaatagttacaagtttaagtaacgtttttttttttttctttagatggagccttgctctgttgctcaggctggcgtgcagtggcacgctctaggctcactgcaacctctgcctcgagactcaaaggatcctcccacctcagcctctcaagtagctgggactacagatgcaccactacacccggctaattttttgtatttttagtagagatgggttttcgccatgttgcccaggctggtctcaaactcctgagttcaagcaatctgcctgcctcaacctcccagagtgctgggattacagacatgagccaccacacccagcccgtaatatctttacacagaaattagtcttttatgagaaattctcggttgaatgcaattacaaattaagggaaacttctataaacgtctacattaaatatggagcaaaatttaagcctgtttcctataattttctgtatctgtccttttaaaacgtatgatttaagttaaagctggcactagaaagtatttcactttggcatgactgaactttgtatcatttctggctttcaaaaacaatttaggctgtatttcccttacacagcaactttttatcattcattttcaatgcctgggtaatttgaaagccaaacagtttcttgcacagggaatgcattgtcataagctgggttttatttcaaactcaattatacaatgtagcaatagtaaatattaaaatgtaatgctaactcaaaacttgtagaatgccttcactgaattttggtataaagagtaaacaaaacttattctgcaaaaggattaggaacctttttatgcaaaaatgagtattttattttgtcagcactaaaagaaaaaaaaaaacaaaaccactgtatttctacattgaggtgaaaacaatgtttaaactttcttatcaatcaaatacattccaaaagaaagtgtgttctatgaaggttccaaaacacactcaaaacacaatagtacaggaatctaatactgaaaatgactgttctgacagggtgtttaacaaacataacttttaaattattaaaccagtgaagcaatcccttcctaataagtgtgtcaagagagtgaaactgggtttgttccattaataccctaacaatttcatcgtaatactttttactgctatgacagttttaaataaattttgctgtacttaaaataggttttgaaagtggaaaagtgtacaaagtttcagataaaaagattaataaatgcaatttaaataaaatttcccctcttctctcatatcaacaataatcaattttagcagataacagattgagctttaaaaccctactcccaaaatgaaaccttcagttttaaatcttaatcagacataactggaaaagattactatgtatttggacaccttttacaagattttgtttttgtattaaagcagaaaccagttcctaaactcttttattcaattgtatgtcctgtttggacaaatatcaaaaatagaagactgtcgcttttgtaactgtgattttcactgcagtcttctataacttttacagagttcatggtccctaatatctccccaccctccattttttctaggtggggaaatggctaccacagtaaacttttcactgatagttagagtttctggaaacatgtattgtttgttattatttaagagtgactcaatttgggcactctgagtggatggtctacaggttttcttgtgatgcataccacagtctccagcatgaaagatcctaggaatttgaggaaccagcactttccagaattttggaagacaagatacagtcaagtattgaagagtccagtcccagttataatcatcataagtacagaaagtgtctgtgcactcgatcagcttctgataggcattccgggtcaaggctagacccatattgtgctctgtggatttccaagttttcacatctaccttgtcagccatgccatagaaactgcgactggcactataggtccccagggagagaacatcacattcagggcactcttgctgcttcagtttccacatctttttgaagacatggtaaaagtctggggctaagtagtgatcctcttctaggaaaagtataaggccagcataatctcgaagaattttcactctttcccacacaaaatgcagcttccaccaccagtgatgtttggtctgggagaatttggcctctctataatggccgaaggagtcgggatactcagcattgatgcaccccaatttcaaagcggcattcttcggcaggtctctgggacaatctctagggtcactacctggaaactcgttagggtacaactgaatgctgaaaggaaagaacacctgcagaaccggacagaaattcaccccggcgatcagctgattgatctcggtcgaccagaagtcatggctaaagatgacgaggacgttgtcaattccctgggcttttcgaagtgagtccagcagcagtctgaggtattcgggccggttatgcacctggaccaccagcaccagctcccggggggcccaggtgccagccttatctacattcctcagggtctgatcaaagttcagctggtacaccagggaccggtaccgcagcgtcaggttgtccgcctcgggctgggggaccgccgggaccagggaagccgccgacacgttggagaccctgcggatgcccacagccacagaggggtggtccccaccgcggccgccggcaccccgcgcgggttcggcgtccagcaacggtggggcgagggcctcgttcttcctttgtcgcccattgctgctccagaggacgaagccgcaggcggccaccacgagcgtcaggattagcaccttccgtttgtagatgcggaacctcatggtctccagggccgggagcgcaggcgggcgggcgcggaaaggagcagctgcttctgcacggaaggggcgggcgggcggcggccgtcgccttggcctgtcacggtcggaactggcccccgcggctgccctcgctaactcatcccgggccccgggggtcctggggcccgagacctctcatttaccccgcgccgcctgcgctccacacatcctcgcctggcagctacagctcgagcatcggcgccgccgctaggagccgcggctcggcttcgtctccgtcctctccattcagcaccacgggtcccggaaaaagctcagccgcggtcccaaccgcaccctagcttcgttacctgcgcctccagcggccctgcgtcctctgcgctctcatccttacaggggccctagacggccagaactgagcgacgcggcctcgcctcactccggcggggaccgttatgacaacccgcaactgccccgcggcacaccgcggccctccggcccacacccctccggcccgccccttagaccgttggttggtgctttccagacgcgaccgaaggcgcctgaccgccgtggccggctgcctattggtttgcagtactgtcgctcaggtgcagttcccacttccgcctctttcttccctttcctgttaggcgagagctgcgaaaggcgagagctgcgaagggccaggtgtcgggcgctgtttctcggtaagctaagaacgaggctgtagcggctccaataggagcctcccttgctcagaatcctgggtaggactaggccttcttaggaaagggaaggcgagacctatggccctcgccggccttagttcgagagcaggcttctcccttcaggaaaaaggtctcaggcatggcggctatagaatcgcggggcgcgccggcttgataaggacacgtcagccctcgaggctgctgacgggtgactgtgcttcggaggggaaaagtgatactacgctgatgtggttctcgtagaaggaacggggcgggtcgtaaccgtagctacaacgtcgcgcgctgccccagccattctctagagctggaaaatggaggaggtgggtggggggaagggggtcaaagaaactctggtccttaacttccttttcggaagaaaattagatgaaccgcacttttcttttggagcagtcacaataaattaaactcatttcgtacggaaaacggactgtattgggcctcctaaagctgctgctgtcggttttcgtgagtcttgttctatatgagaaaagaagaatggctcggagcattgttaattatttgagatgtgcaaaatttgccgggcccagagagacagcagtatgggacttcagacacctccccacttaatgcctggcattttattcctgactagctgcttcacccattatgtccgcgttcctggaatttgtcataaaaagaatgatgtatagccaatcaatcgcttgtgttattttaatgtaaattcttggtagacaatttaggaactgccattttttcctctaaaaacccacttgcaactgctgctactcagggcattttgaatctgtgctctgggttgcaatcctcaaacttgccccaaataaacattctacttatatgaattgtgcctcagttcttttttttttttgagacgtaattccgctgttgttgcccaggctggagtgcaatggtgcgatctcggctcacggcaacctccgcccctccccaccccgcccaagcgattctccttacaggtatgcaccaccaccacgccaggctaattttgtatttttagtagagacggggtttctccatgttggtcaggctggtctcgaactccggacctcaggtgatccgcccttctcggcctcccaaagtgctgggattacaagcatgagccaccgtgctcggccttgcctcagttctttaggtcgacaaattagtcctccagtaatttaaacgaagtgtttcaaaaaggtatgtacttgtatgtgcgtttattcatatggaaaaagagtacgtggtggatttatatattactcatttatgtgtacggttttcctgtatatacttgtatagcactttcacttttcggaatgtttaacg

SEQ ID NO: 97172 - DNA, 26150 bp, Homo sapiens
gaggggggcagaccagtggggatctgatcccaaagatggggtgaccccagggtcagggaggctgcccccaggcctgtatatttaacccctatgtaccaggagtaatgaatagtaataattctatttatgtaagttatgatgacgggtcaggtagagtgagctggggagggaagtggatccatttctgctaaggaaattctagtcaaatgcatctctgtatagacaaaatgttagtggagaagatcttgttaatagaatgtctatcatcagaatctcagttgatagggtttctcttgtaatgaagtctctacaaattgggttagctacatctctgctaaacagttgatggggtatctcttgattagggggatccctaatatccccagccccagccagaagctgtgaaacctcaagtcctatggaggggagaaggactggaatgtaccccatctcccttgactgcagagcaggttcctccactgccccaccccttagacaccatgaccccatcaggttaatcccctgttgccatggttatggagagcttgcagctgccatcttagatgtgctctttggggaagcccatctaacaggaggacattggtttgggggtgcacctcctgaagaatgggtggggaaggctttctctaggatcagattcaaataaatcaagtatgtattgagtgcctactctgtgcaaggcactatgctagatctggtgcctagaagccctgagaaagaacttaaagagctaggaggacagaggcccccaagctgatctggtggtgcatccacgcacccccaccctgggactttggatgctcccatctccacctccagtgacttttaaagccgcttcgtgcctttcctgtaacgttggatcctccttttctgtcccctgctgtctcaaggccccaagttaaagggttaaagccgctggagcttggggagagaacattgtggaatggaagggatcatgccctttgtggagtcttttttttttaatttaataaataaaagttggatttgaaattttgtcctggtgagaaaaggagaagaggaagggtgaagcgagggccaatggttttttttccttagcaaattggggactactcatgggcgaatattctattgtgcacgtttgctcacctatgctcgcggtaaaatagtttatcggccgggcgtggtggctcacacatgtaatcccagcacttcgggaagcccagaagggcggatcacctgaggtcaggagttcgagaccatcctcgctaacatgatgaaaccctgtctgtactaaaaaatacaaaaatcagccgggcgtgatggcaggtgcctgtaatcccagctgcttgggaggctgaggcagaagaatcgtggaacctgggaggtggaggttgcagtgagctgagatcgcgccactgcactccagcgtgggctgcagagcgagactccgtctcaaaacaaaacacaaaacaaaattgtttctcggtcaaatcctccagcggtgttcagtttttgggcgtgcagtgctttctgcagagttgggaagactcactggtttctaccctggccctttctggactgcaccaactgaccctggtcagggcagtgacgcgacccgagcgcgggcaccgcggttgcagtgcggactcctgcgcggccccagtcgggcggtggtgcggctcccggcgggcagactgggcctggcacgtaacccgccccctgccctgggtctgcaatcagtcgtgcccgccacggagttagccgaagaacaaaaaccactctgtggcagcatccccgagccacaatagggctttgtgcggcccccgccccccaaggttaccccgctgggctgagggggctcacaggccgctccccccggcctgggcccgactcccagctgcgccccgcgtcggactgtccaccgcacgggtcgcaagaggggctgctacgggtgggagggggccggcgatcctgggggggctcgggttacgagccccctccccaccctgacgccactcccgcccccgcccaggtgcgaaatctcctgccctccggctgggcgcgcgacttcaaaggcgctttgaagaaatccgagttccgaagacttctttagtgggctgggggctgtgacggaagagacccgggagagggggctggggcagaggaaaggcggggggcgccttggagctggtctgagcgaggcggcggcctggagtggaaccccgggatcccgcctcaaccccgccgggcgggctcctccggaccccccagagtctggccctctcgcctcccggtctccgcctgtccggtgccagctcccgcccgccgcagcctcgcggtcctcccctccccaacccttcggcccctttcatcttccctagactccgcttggggttttgctggtttctgggagataaaaaccgcttcaaatagcggcggcgcgctgccaggacaaacagggccgggcgggccatgtgcgcctggttaccggccccgggtcgggacgccgggctccagcgggcccgggaaggggtagcgggcggagctccgggcacccaggctccggtgacgactcccaaagtagggggccccttttagaagcggcctgcgcgctctctcggttcccgcccaggtcgtagggaggggccggcggagaccgcccgctaagcgctcggagcccatagggcgtgggtcacggtcgctgcgttgcctggccagccgcgccccctggtgaagttactgggtgagcgcgccgggcctggacttgggcctttctagaacccgcaaatggtgaaaagcgttccacaaacgttaaataagcagtatggaggaggggacagtacttgtgccaggccagggcgggggcagcgggcggaacagcactgttccttctctccagttcaccttacagggtaagaagcaggcacctaaccgatcattataacctgatggtgaaaatcgaggtttcatcgaaggatgcaagttgcaggccggagtgatttttcctaggggtatctgggtttggatggtgttacgactaaggtacaaacggaaactatcgtgggtcctcagtgctctccactaatctgtcagtcaccgacttcctctccctcaaacctgcccacttccccttctcagggaggctttcccagccaggttccccaaaccatccccagtgtataccttatgttcttcaagctttctgtgacttcccaggtgacggtgaactcacataggaaattaaatggggctatgggaaaaggttagagcaggggtcgcgccacggcccgtcgtgtcggtggcctgtaaaggaaccgcacagccggagacgagctgagcaagctgagctccgcctcctgtcagatcagcggcattagattctcatagtagcgcgaactctgttgtgaactgcgcacgtgaaggacctaggttgcccgctttttatgagaatccaactaatgcctgatgatctcaggtgtaacagtttcatccccaaaccattccctcccccgctccccctggaaaaactgtcttccactaaacctggtgccaaaaagttggggaccgctaggttagagccttgctacttaaaatgtggtctgtgcagtatcagctggggattctttggaactatagcctctgagcgccaccttaggagatgctcaggtgattcctatgtcccttaacagttgagaagtactagattagaggagatccacttgccttctcaggtgaagtgcattttcaggagactctggagccctttgttttctgacctggtaataactctcttggggggaatttttcaggtgaaaaagaagggcagacacggaatccagaatactagaactaaatgccccctagattattcaatgagactggtagctcttgggagtggggacagccttctacatcttcaaatcacttaacatttgttaatgaactctgaccaaggtcacctagttgatggcacagttatagctattaacctctgacatttgtttagcactttaaaatttattaaatagcttcattttattattttgtatggaaaacaaccatatgaaataattaggacactgcaaatgagaaaagtgagactcaaagaattcaatgttttttccaaagtctgtaagaggggcccccattctctttctttctttcctttctttctccctctcccttccctcccatttttttttgttttgttttgttttttgtttttttttttttgagacggagtttcgctcttgttgcccaggttggatggagtgcagtggcgcgatctctgctcactgcaacctccgccttccaggttcaagggattctcctgcctcagcctcccgagtagctgggattacaggcatgcaccacaatgcctggctagttttgtattttttagtagagatggggtttctccatgttggtcaggctggtctcgaaatcccgacctcaggggatcagcccacctcagcttcccaaagtgctgggattacaggcgtgagccaccgcgcccggctctttctctctggcttgcttgacagggtcttgctctttgacccaggctggagtgcagtggtgctatcttggatcattgtagtctggattctcctatctcagccttctgagtagctggactaaagacgcttgccaccaccacgctggctaacttttgaattttttgtagatacagggtcttgctattttgcccaagctggtcttgaactcctgggctcaagagatcagcctcggcctcccaaagtgctgggattacaggtgtgagctaccacacccagccttacttttattcttaagtgagaataactggtttgggtgtatctaggtccaatctctctgtgactcactttcctcatggtgacagaacagcacccaccttatggggttgtaaagattataaaagcacttatcgtaacaagtgctcaggaaatagttttgcagcccggcaaggtggctcaggcctgtaatcccagcactttgggaggccaaagcaggcagatcacttgaggtcaggagtttgagaccagcctggccaacagataggacatcgtctctactaaaaatacaaacttagctgggcgtggtgaagcatgcctgtaatcccagctactccagaggttgaggcaggataatcgcttgaaccggggaggcagaggttgcagtgagctgagatagcaccactgccttcatcctgggcaatagagcgagaccctgtctctcaaaaaaataaaataaaataaagttttcctttttgagacgaagtttccctcttgttacccaggctggagtgcaatggtgcgatcttggctcactgcaacctccccctccggagttcaagagattctcctgcctcagcctcccgattagctgggattacaggtgcccgccaccacgcccgactaatttttgtatttttagtatagatggggttttcagcatgttggccaggctagtctgcgaactcctttcagatgatccacccacctcgacctcccaaagtgctgggattacaggcgtgagccaccgcgcctggcaggaaatgttagttttccaaccgtccccacctccctttccaggacgcctaaccgtgtgggtgcagcactgttcctcctctctgaggcttttccctcagctttccagccagctgcctgtgacatagcctgtattttcctctgggtgatccacaggcctgggaggattaatttggtacttccctgaatgtggcttatttcgggctttctaagcgctaagatagtgagtgggagaaggtgttcgggaattcggagctgggaaaaacagtagtctcatggaaaacaacagaaaaaaaccccactccagcctggtaaccaacggttggccgggggacgtgtccgcgctgctccccctccggccgccagggggcgcaggaagaagctttggaggtctgtcccgggaccgcgtactcgtccttctttcccgttagtcttttcttcacttccgttgagttcygcctcgccgtttgtcccttgcggtacccgtccgcatacgaatctagcccgggaaccgagttgcgggagtgcggtctgtgccgttccggccaggagtttgccgactgcagacgtcctgcgaaccggcaagatgtgctctctggggttgttccctcctccaccgcctcggggtmaagtcaccctatatgagcacaataacgagctggtgacgggcagtagctatgagagcccgccccccgacttccggggccaggtggccagggcgaggagggaggggacctacaggcatgggggcggagtcggggactactggggaaaggaggcagtgtgacaggggcagggtcacagagtctggcggagtggaaacagcttggccccggcaggagrctagaagggctggaatctgttttaggactgggattggagtataacgggggaacggttaaggagctgtggaggaggcctagagggaatggagagaatgagggagaatctagggagtgtgaggatgygggagaactatctaaaagttggggacagtatctggggaggatcagaaggatacaacatggaacttttttccatggtgttcctgggaaggacaaggaagggaaactgacatttattgagcgtttgctatgtaagaaagaggctgagtcaggtgttttctaaaaatgtcatatggtttcataatcacagcaaccctatgaaatattattctagttgcacagatacgggagctaagacttgtttcccattctcacaagtgttagctttgtggaaatgggaaacagacctctggaatctcttatacttagcccagcggtgggttggagatggcacggaattaaagatttgggaagagactgamtcaccgtcacacycctcacttttgtgctatagtggatcaatcttcctgtcctacaactgacaaaggatcccctaaagacccctggaaggctggaccatggcacaagaactgccttcatccatcaccgggagcaagtgtggaagagatgcatcaacatttrgtgaggcatggcaaagggtttcctgggtcacagtctgcagatcctggaaaatgagtcamcacccctttaccttggggtgttcttcaaaagacttttattcaggctgtctccacgagagctgtatatcctaaatcatatgaaatttttagtccttattatagaactcaaatgctcaataaatgtcaggttcccttccttgcccttcccaggaacactatggaaaaagtacttccatttcatctctagtaacttgccttgctttctggcttgattaggtgaacctgctccctgcccccacctcatggcattaccacttctgagcttttacctgaagctcagcaagatcagatataaggttgcactgaataatctcctacataggtcatccactttgcacttgtaggagtggagctacactacctggtttcattttcttttttttttttgagatggagtttcactcttgttgcccaggctggagtgcagtggcgtgctcagctcactgcaacttccacctcccaggttcaagcgattcttctgcctcagtctcccgagtagctaggattacaggcatgtgccaccacgcccagctaattttgtatttttagtagagacagggtttctccatgttggtcaggctggtcttgaacttccgacctcagatgatgtgcccgccttggcctcccaaagtgctgggattacaggcgtgagccaccgcgcccggctcattttctttttttttttcttttttttttttttttgagacggagtcttgctgtgttgccaggctggagtgcagaggtgcgatctcggctcactgcagcctccgcctctctggttcaagcagttcccctgcctcagcctcccgagtagctggtactataggcatgtgccaccacgcccagctaactttttgtattttagtagagatgagatttcaccatgttggccagggtggtctggcctcctgacctcaggcctgccttggcctcccaaagtgctgagattacagctactgcacctggacctattaatggcacatattaattcctttaagggttatttatgccaggcacagtgactcacgcctataatcccagcgctttggtaggctgaggccagcagattgcttgagcttagtagtttgagactagcctggggaacatggcgaaaccatgttcttttctctacaagaaaagtacaaaaattagctgggtatggtggtatgcacctttattcccagctacttgggaggcttatgtataggaggatcacttgagcctgggaggtggaggttgtagtgagccaagattgtgccagtgcagtggcactgagtgagaccttgtctcaaaaaaaaaaaaagggttacttaatatttttattaataccattaccatttgtaggataaattcctagaaattaagttgctggctcagagggtatgttcatctgtaattttgtgagctgttccaaatagccctctgtcaaaatggtacatgtatatggtcccaccagcagtgtatgggagtgcctgttttccaacacatgtgctgtcaagctttgatctttggtacttcagtacagtttaatgggcatgcctgtgtgtgtgaagttgaatatcagtttgttgaaaagccattcattcccaggctccttgtctcctacttctgtggctgctgcttctcagggtttttggtggctcctcttcctgatgtcccttaaatgttggtgttcttggggctagatttccagttgatgcatcagacctggtgttcacgtgtttgccaaattatcctgcttgaatatttcgcagacttcatatattcagcatgctcaaatccagtctctttatttctctctccaaatctgcttctctggatggttcactttaaggaatgatcatattactcattcaggaaaaagtggtttgagtataggttctggggtagatagatggttgaatcctgactgctactttctacttagattaccttgttcatattaattagcctcttcacacctttgttctctcatctaaaaatgcagtgatagtctgggcgcggaagctcatgcctgtaatcccagcactttgggaggccaaggcgggtgtatcacttgaggtcaggagttcgagaccagcctggccaatgtggtgaaactccgtgtgtaatcctaattactcaggaggctgaggtgcaagaattgcttgcacccaggaggtagaggttgcagtgagccgagttcacaccactgcactccagcctgggtgacagagtgagactccgtcttaacacacacacacacacacacacacacacgcacacacacacacacacacactgaaaccccatctctacaaaaaatttaaaaattagctgggcatgatggtgtgcacccgtagtctcagctcctcgggaggccgaggcaagaatacctgagctcaggagattgaggctgcagcgagccgtgatggtgatattgcactccagcctgggtcacagagcaagaccctgtctcaataaaataaaaataaatgcagtgataacaatacctatcttgtaggattgtcataatggcttgattagttaatgtgaggcacctagtccagagctggcacattgtaagcatattagctgatgtaattattacctaggtgtttctgttgtattgctctttcctttactaatgtctgattagtcttcacatcttgtttatgctaattcctaaatctctcaaatctgtctctttttcttcatccccaccagttcaggccactttcacctttttcctaggttcctgaagtagattctttttttttttttgagacagagtctcactttgtcacccaggctggagtgcagtggcgtgatctcagctcgctgcaacctccgcctcctgggttcaagcaattcttctgcctcagcctctgagtagctgggactacaggtgcacaccaccacgcctggttaatttttgttttgttttatttttttggtttttttttttgagacggagtctcgctctgttgcccaggctggagtgcagtggcatgatctcggctcactgcaagcttcgcctcccgaattcactccattctcgtgcctcagcctcccgagtagctgggactacaggcgcccaccaccacacctggctaattttttgtatttttagtagagatggggtttcaccgtgttagccaggatggtcttgatctcttgaccttgtgatccgcccgcctcagcctcccaaagtgctgggattacaggtgtgagccaccgcacctggccaatttttgtatttttaatagagatggggtttcaccatcttgaccaggctggtctcgaactcctgacctcgtgatccacctgccttggcctcccagcgtgctgggattacaggtgtgagccaccgcacccggccctgaagtagattcttaactgatttatttttctctattattattattattttttgagacagcatcttgctctgttgcccagtgtggagtgcagtggcgcaaacatggaacacggctcactgcattgtcagcccccagggctcaagtgatgctccttcctcagcctcccaagtagctgggactacaggcatgtgccaccacacctgcctaagttttgtatttttttttgtagagacagcatttccctatgttgcctaggctggtctcaagctcttgagctcaggcgatccacctgccttggcctcccaaagtgctagggttgagccactgcacctggactttttctattttttctcttctttttttttttttttttttttgtctgagatggagtcttgctctgttgcccaggctggagtgtggtggcacgatgttggctcactgcaatcgccgcctcccgggttcaggcgattctcctgcctcagcctatggagtagctgggattataggcatggaccaccacacctggctaattttcatatttttcaacatgtttcaccatgttggccaggatggtcttgatctcctgacctcgtgatccgcccaccttggcctcccaaagtgctgtgattacaggtgtgagccaccgcgcctggccttttctattcttttttttttttcttcttttttgaggcagagtctcactctgtcgcccaggctggagtgcagtggcacaatctcggcttactgcagcctccgcttcctgggttcaagtgattctcctgccctgcctcagcctcctgagtagctgggactacaggtacgcaccaccacacctggctaatttctgcatttttagtagagacggggttttaccatgttggccaggatggtctcagtttcctgacctcgtgatccacccacctcagcctcccaaagtgctgggattataggcgtgagccaccacagccagcctggccttttctattcttatcactctctaatctgcagccagactgctctttctaaaatgctgctgtgtgatctgtttattcttctccttagaacccttccatggctttccattcattgtcttagagcaagtcccaactccttaacctgctcacaaagccccaaaagtcctctgagccttggttgtctcatccgtaaatgggtagaatctcgttcagatttgtgagatatgtaaatgaaaggacagcmcgtagagtgcctggtacatagttggcactcattaaatgtgagtgcccatatttttaatacatgtatattgaatgaatgaaactggtagagagggacagaggggatcagagtaagctgacccacattttcctcccttatcaggcgtgatgtgggcctttttggggtgctaaatgaaattgcaaactcagaagaagagggtaagtatttttccctccagccttccctagttttgtggttatctcctctccatattcttgaactcacccccgacacctgttggctcagcctcttttagccctatttttcctgtcctctcctctacctacccaaataacccagagtgggtgtccagagtgggtgtccagagtgtggtgttgagagcacttactgggcagaaggacctggggagtgcctgtccttccttgtctttcacctagaaggtacctggtaagaggcctgtgaatggtttaatcagagctgcttcctcaaccctacagtgtttgagtgggtgaagacggcatccggctgggccctggcactctgtcgatgggcctcttccctccatgggtccctgttcccccatctgtctgtaagtttggcttcctccccagccctctgcatttgctgtgtccccatcctactctgccctcattcctatccttgcaggtcagggttgggtgtgatgacttcagagggtaggagtggtccagctcccctgttggaatattgaggagatggactccttttgccccagtgtgtcctgtgtctatcttgttcttacagctcaggagcgaagayctgatcgctgaatttgcccaagtcacaaattggtgagtgcacaagccctggagctttgtggaaaggaagtcctgaacctcaaaactccctttggggagaaggcaaagactcctactccttttctgattgctcaccatattctcattcctcctgttcccccaaaaaagaatacaagaaaaagtaggaaaaaaccatgtccttactggaaatgaatgtgagcttctgggctagggtagggataggtgcaggaactcttcatgttaaccccttccttaggtccagctgctgcttgcgtgtctttgcatggcacccccacaccaacaagtttgcagtggccctgctagatgactcagtccgtgtgtataatgccagcaggtgtgtgtggggacaccaggtgggctctgacttgtcaatatcaccttcccttgccagccttggttccggggagtcctgtagttcttgaacctgattcrtggggctccttccagaactggggtcagggaagctccataactggatgcgtgcttcttctagacctaacctttatcccctcctgtcctatggtgcccctggcccctggatggatcatccttcttctctgtggctttccctccttaactgcactctggtccctggagccttagtgttcctgccttgactcagtttcctgccccttcaccctagcaccatagtcccctccctgaagcaccggctgcagcgaaatgtggcgtctctggcctggaagccccttagtgcctctgtcttggctgtggcctgccagagctgcattcttatctggaccctggaccctacctccttgtctacccggtaagtcctagtagcctgccttaccttggcctgagagttgtgcaatgctaggcatggtgggtggtgaggacgtctgaaaggagaagttctttgtcctcacagcacttcccagggctatgggaaaagcagaagtaagatcaaggtgggttgctgagaatactctaatctggagaaagagaactaggggctttttggattgtggggacaatgtgtctgtgggttacggggtggaaagactctttcagaggactatacacttcctttacacttaaaggaagtgtaaagaaaattagtactaataagatcagaaactaataaaattagaaaaagaatacctgtgaaaactaactaaaaataaaaccagaaactggttctttaaattatgactaagctgggtgcggtggctcatgcctgtaattccaacactttgggatgtggaggcggttggatcacctgaggtcaggagttcgagaccagcctggccaacatagcaaaaccttgtctctactaaaaatatgaaaattagctgggcatggtggtacacacctgtagtcccagctactcgggaagctgaggcaggagaatcgcttgaatctgggaggcggaggttgcagtgagccaagatcatgccactgtactccagcgtgggcaacagagcgagactctgtctcaaaaaaaaaaaaaaattatgaataaaggctgggaacagtggctcacacctgtaatcccagcattttgggaggccaaggcgtgaggatcacctgaggtcaggagtttgagaccagcctggccaacatggtaaaacctgtctctgctaaaaatacaaaaattaggccaggcgcagtggctcatgcctgtaatctcagcactttgggagaccaaggtgggtggatttcttgaggccaggagttcgaaaccagcctggccaacatggcgaaaccccatctctactaaaaatacaaaaaaattagctggacgtggtggtgcgtgcctgtgatcccagctacttgggaggctgagacacaagaatcacttgaacccgggaagcggaggttgcagtgagttgacatcatgccactacagctgtactctggtctgggcaacagagtgagaccctgtctcaaaaaaaaaaaaaaaaaaaaggccaggcgcggtggctcacgcctgtaatcccagcactttgggaggctgaggcgggtggatcatgaggtcaggagatagagaccatcctggctaacacggtgaaaccccatctttactaaaaatacaaaaaatcagctgggcgtggtggtgctcgcctgtagtctcagctacttggcaggctgaggcaggagagtcacttgaacctgggaggcggaggttgcagtgaactgagatcacgccactgtactccagcctgggcaacaaagcaagactctgtctcaaaaaaaaaaaatatatatatatatacacacacacacacatatatatgttatatatatacacatatatatacacgtatatatatatatacgtgtatgtatacgtgtatatacgtatatatatgaataaagaagaaaacctcttggttagcctaattaaggagaaaaagaaaaccaaagtatactattttcagaagtggaaagatatagatacgggagaaaatagaagaattataaaagaatattgtggacttgtttaggccaacagatttgaaaatctgaaggaaatgtttgatttctttttttttttttgagaaggagtttcactcttgttgcccaggctggagtgcagtggcacgatctcgactcactgcaacctcagcctcccgggttcaagtgattcttctgcctcagcctcccaagtagctgggactacaggcacgcactagctaatttttgtatttttagtagagatagggtttcaccatattggccaggctggtcttgaactcctgwccttgtgatccgcccgccttggcttcccaaagtgctgggattatagaagtgagccaccgtgccctgtggaaatgtttgattttctagcaaaatataagttaccaaagtggattgtagaagaaaataatgagattttttttttttgagatggagttccacttttgttgcccaggctggatggagtgcagtggtgcaatctcggctcactgcaacctctgcctcccgggttcaagtgattctcctcttgacttcgtgatccgcccgcctcagcatcccagagtgctgggattacaggcgtgagccaccatgcccggcctgtcctcccttttttttgttgcaggatcttcctgatttatttttataaagctaatgtaaccctgatacctaaaccttgacaataggtactataagaaaaaaacacgtgatcacagattttttttggggggggatggaatctcactctgtcgcccaggctggagtgcagtggcgccatctcagctcactgcaacaacctctgcctcctgggttcaagcgattctcctgcctcagcctcccaagtagctgggactacaggtgcgtgccaccacaccggctaattttttatttttagtagagacaggggtttcaccatattggccaggctggtctcaaactcttgacctcaggtgatgcgcctgcctcggcctcccgaagtgctgagattacaggcatgagccgctgcaactggcctgttttttggtttttttagagatggggtttcattatgttgcccaggctggaatacagtggctattcacagactcaatcattgcacactacagccttgaacacctgggctcaagtgagccccttgccaagtagctgggactataggtgcgtacaccacgcctggaaggttgttggttttttttgtttctactaaaaatacaaaaattagctgggtgtggtggcgtgcgcctataatcccagctactcaggaggctgaggcaggagaattcacttgaacccaggaggtggacgtttcagtgagctgagataatgccattgtactctagcctgggtgacaagagcggaactcgatttaaaaaaatttttttaaataaatgaacaaaaaacaaggccaggcgtgatggctcatgcgtgtaattccagcactttcggaggctgaggcagatggatcgcttgagcctaggagtttgagactagcttggtcaacatagatgctgtctatacaaaaaataaaaataaaaaaactagctgggcgtggggtgtacgcctgtagtcctagctactttagaggctgaggcaggagcctcaggactttgaggctgcagtgtgctatgactgtgtcactgcactccatcctggagtgtgaaccaccatgcctggcccaggaaatattttttacagcattatgtataataaaaaattacaaacaagtcaaatgtccatttgtagaggcatgactcaataaattatagttcatctattgagtggtatacaatggagccactgaaaagaatgagatgaatctgaacccacctgcaaaggcagctgtgatttatcataaagttcaagagaattaaattgtacatccatgactaagacttcactggagctgaaggtggttatagttaggtggaaagagaggtggcattaattcaggtagtagccttcgtctgtcaggccaggcacatggctctggaaatacacagctgcagacacatggcaggtgccctcaggtagttccctgctggtgatggaggccgagccacatgctgcatcttttttttttttttttttgagacggagtctcgctctgtcgccaggctggagtgcagtggtgcaatctcggctcactgcaacctccgcctcccgggttcaagcaattctcctgcctcagcctcccaagtagctgggactacaggcgaacaccaccacgcccagctaatttttttgtacttttagtagagacggggtttcaccatgttggccagaatggtctcgatctcttgacctcgtgatccgcccacctcggcctcccaaagtgctgggattacaggcgtgagccactgcgcccagcctgcagcatctttatgataaggagcaaacgcgggagctgcagagttgggaggtactttgataaggcaaggcaggagggctgtttgggagcacaggatgtgttctgaggagtgttagataactggagagaaaaggttggaaccttgaagtaatgtcatagattattaatcctggatagatggatggccaggctggatggcctgtgggcggagagctgtgttctggggtagggcctgatatcgccccaggggcagtaccttctaggttactggttaggttttgcctcatggcctatctcgtgaaagcactctttcaccctggcctgagaccttgcagattacctcttctctgttgacctgctcgtggtgacttggtcgtttttccccttcgctgtttttttcttttaactttcacaatccttattcctttttcacaacctggatttgagcccagagtgggccatcaggataggaggttttagcaggaggcaaagaaatagaattttggggatggcttcttgtcatcttctgactccacatcctctgtgttcccctccagaccctcttctggctgtgccyaagtgctgtctcaccctgggcatacacctgttaccagcttggcctgggcccccagtggggggcggctgctctcagcttcacccgtggatgctgctatccgggtgagtgggtccctgcccctcatgcacatttcagtcctggcaaaagtgttcctcactcggttgtggaaacatcttgggggaaggaggagggaccttggtccattcagtcttaaacttacccagagaggagctttgccatcagactcgtgaggtttaaaattccgctgtctgtaattgtcagcatgaacccgtgcctcatgtttcacagtccctctcccgcttcctctcgtttctggctctttgtacattagagaggccagcccactgtgagatgatggggtgcttgagttttcccttatctcctgccccactctcctaggtatgggatgtctcaacagagacctgtgtcccccttccctggttyygaggaggtggggtgaccaacctgctctrgtccccagacggcagcaaaatcctggctaccactccttcagctgtctttyggtgagtgggacaaggatggagggagggcaaggacctagagaaaggcacttagctcctggaagctctgtcaagggaggtaggtccaacttttagaacttagaggtcctgagctgtaatttgcttttctctggctcagagtctgggaggcccagatgtggacttgtgagaggtggcctactctatcagggcgctgtcaggtaagaggggactctgattcacagacactggggaggagatgattccaatgggcccctgatgctcccaaacctggccacctctactttccctcctgcattctactatagacataccttctcctgccttttgctccctgaccccagactggctgctggagcccagatggcagccgactgctgttcactgtattgggagagccactgatttactccctgtcttttccagaacgttgtggtgagttagggcaacacttcagtatttggggtggtcagagggaggcagcaacctttggtaagatgcagctctgagggataaagggaaatatagaagcttaggagatttcgaggtgttgatgcctttggtgagctggcrggggaccagtgagaggcctgtttcttgcaagaacctctctgctcttatttgtccacaggtgagggaaaggggtgcgttggaggtgcaaagtcagcaacgattgtggcagatctgtctgagacaacaatacagacaccagatggtgaggagaggtgagctgagtggttgagggagtggcagtgaaaagcaggtgggagggaccacactgaaactctcctaacctgtccttacccacaggcttgggggagaggctcactccatggtctgggaccccagtggggaacgtctggctgtgcttatgaaaggtgagaggcaaggatgaagggctcagcccacagccatcttcccagttaatctaatgaggccgtgccctggcctggagttctcctctgcccatgtcctgggactctgccttcagagttcctcccctatccctggatccatttcttacaggaaagccaagggtacaggatggtaaaccagtcatcctcctttttcrcactcgaaacagccctgtgtttgagctccttccctggtaagtgccatgtgggcccttaggtctggacttctcaccagccttcctgcacaaacaaacccacatcccactacattcagctcccttcttgcctccggttgcctgctcaccttttcttctagtggcattatccagggggagccaggagcccagccccagctcatcactttccatccttccttcaacaaaggggccctgctcagtgtggtgagtgcgccaggctgctggggcttccaggagttggatggagaagctgagggccttggctgctgtatggctctgccaggtggcccttctttgggcccagactctgatccttttctttcccttctctgcagggctggtccacaggcygaattgcccacatcccgctgtactttgtcaatgcccagtttccacgttttagcccagtgcttgggcgggcccaggaacccccygctgggggtggaggctctattcatgacctgcccctctttactgagacatccccaacctctgccccttgggaccctctcccarggccaccacctgttctgccccactccccacattcccacctctaagaataaataagttttccttttgttttccactcagttaccagtctgtcttttccagggagttgcagtggggtacagtaggggaaaaaagcatggactttgggttaaggccctgttctgtcactttttagccacttgtgaatttggtcacgttatttaatcctagaaactgtggtttcaaatgatttgggaagcaaggctgagaagttactgtgaagaaaatatatctagcacagggtcttacacataaatagttgtttcacttttcacaagtttctggaatggtgtagggcaagaataagtcaaggactgggtcagtatgagatggaaggttttattagactaggagatttgtgggaggtatgagcgctgggccaaggtggcacgggccatgctcaaggcaccctctcgggtgcggtgaccgccaatgaagccgcttgcatggacgaagatgcagccagggatcccactgacctggtccagggcctcgtcccgaagaccccgccatggctctggcaggggcagcctgggcagaaagagggagtacagcaggggtcagagttggcagccttctcttaacaaggctgagacaagcctgaaggtctgcagagtggttccctagggcctcaccggctttggaatgagtggggctccttgggcacacactgtattcgccactgtccagcctggtcagtgtagataacaaagaagatggccactggaggggacagcccagattccaggtggtagagatgctccttccagggacatgcacctttcgccagttccacaatctctccacttgggtccacctgaaagagggagagcatagctagaaggtttaaggtaggctgggcatggtgatcatgtttgtagtcacaacattttgggaggctgaggtgggaggatcagttgagcccaggaatttgagactagcctaggcaacaaagtaagaccctgtctctacaaaaaatacaaaaattagctgggtgaggtggtgtgtgcctgtagtcccagctactcaggaggctgaggtgggaggactgcttgagcctaagaggttgaggttgtctgccactgcactccagggtttagggtagaagaagcaggagttcctgttgattggcagtcagtaatcctcaagccataatgcctcctccaaggcctatacctggaatcgctgggcaagggcctcttccaccaaggcccgggctggcagccagctgtgttggtagaaatctaatctctgcagaaactcctcttgaaccagatccattgcacgcttgaaccctgcctgggaatgatgagaattagaaccatgatgctggcccaaacttggaatttgctagggcttaggaggagcaaatgctcccattttccccccacccaaggttcttacaggtctccgggtctcctcccaggccaccttacctcagtgtcttggtcggggtggttccaggtaggattaagtcgagcaactcgtgcactcagggtagtggtcagtgcatatcgaggctccccctctgcccactgggagatcccattgtccacagcatccacctcctccacaaagttctcatacatctaaggcagcagcaggggaaaccttcttgaggctacctgctacttatgtgaaatcttacatgattcaaagtatgttcatacacactctttcagccctgtgaggatctctcaacattaactggatgagaaaagggagaattggcaagttcagcagctcgctgaagctcagacagctcgttgtgctgtgactggaattcagatcacctgatttctaatccatgctcattctgctgcacaaagcccaaaccaaagccaacacgtgtagggaggggactgctaacttttgaacaaggaaggtctctaggtgctagaggctctctgtgggagtgggtccctgtggctgaaggctggtaaatctccaggtggggtgagtaggtattcagtgacacggttaatgaggtgcaggagcggctctggttgagaacacaagtcaagtgggagaaaatgagtgtgagactagacaccaaaagctggttgctgggttagggttccagggaagcccataatgtgcctcatgacatcagcagttgtctcctgggtctgaataaatggtaggataatgcctcaagagtctcggggcagaaactttatgcaaaattaccctacaaaataggcctccataacagtacacctgtggtatgtagaaaagtgctactctcagagcactgagaaagtaactcctatgcccagctcttcttggtttggaccccaacctgatgctcagttaaaacatgggtttaggccgggcgcggtggctcacgcctgtaatcccagcactttgggaggccgaggcgggcggatcacgaggtcaggagatagagaccatcccggctaaaacggtgaaaccccgtctctactaaaaatacaaaaaattagccgggcgtagtggcgggcgcctgtagtcccagctacttgggaggctgaggcaggacaatggcgtgaacccgggaggcgcagcttgcagtgagccgagatcccgccactgcactccagcctgggcgacagagcgagactccgtctcaaaaaaaaaaaaaaaaaaacatgggtttaggctgaggtgggaggatcacttgagcccaggagtttgagtccagcctgggcagcatagcaagaccctctctacaaaaaaattaagatatataattagccaggcatggtggcatgcacctgtagtctcagctacttggggggctgaggtgggaagactgcttgagcccaggagttcaaagcagcagcaagccatgatggcaccactggactccaacctgggcaacagtctctcaaaaaaaaatacgggttaaatttagtcaattgttgctgggattagtggctcacgcctgtaatcccagcactttgggaggccaaggtgggtgcgttacttgaggtcaggagtttgagaccagcctggctaacacggtgaaaccccgtttctactaaaaataaaaaattagccaggcgtggtggcaggcgcctgtaatctcacctacttgggaggctgaggcaggagaatcgcttgaacccaggaggcggaggtagcagtgagctgagatcgtgccactgcactccagcctggatgacagagcaagaccccgtctcaaaaaaacaaaaaaaaacaacaacaaaaatttagtcagttgtttagaaacccttcagcagtggaagggaaaactgacccaggcagtctaaaatcttgatattccaaaaactctatagttacagagggcagaaaatgggcaagctaaaactgagaactgatgggccgggtgcagtggctcagacctgtaatcccagcactttgggaggctgaggtgggcagatcacgaggtcaggagatcaagaccatcctggctaacacggtgaaaccccacctctactaaaaatacaaaaaattagccgggcatggtgatgggcgcctgtagtcccagctactcgggaggctgaggcaggagaatggcgtgaacccgggaggcggagcttgcagtgagccaagattgcgccactgcactccagcctgggcgacagagcaagactccgtctcaaaacaaaaaacaacaaaaaaactgagaactgaattcaacagcctacctgcaagaaatacagctgactgaacctgggctttgacttgtaaacaagtaagtgtcctcagtactgtgcgacctgacttgcatgccagggccactagccatattctttccctaagagcaggaagctgcttgcaggggacactggtggaatccaaagacagtttcataataaaactcttctcagctgagcttcccaatttatgtgccactagtgaactacagtggtgcctaacatacactcccctcaaccttcagggcagccagaacctctgagccatctgcttccacacataagcagcctcccctctgtttacccaaaggtgctgagcaattgctgtttgtgtgtgtcaataaaaagacggggccatgctgctttatggttttcaaagcccttccccatatattacagcatccacttctcacaaccaccccaggatgtagacaggggaggtatcaccattcccttgtgagatgagcctgactgagggagaggatgagtgttgggcctgctataggccaggaaccctgacccgaggcccagtgctgagtgctgtgtgagcactgctcccaggcggcctgctggaaatgcatgtggggggcatctctgtcctcaggtccccaccttgtcatagagggtgcccaccatgctgtcctcttcactagtgcccagcaactgggccagcagcttgtgcccgaagtgcagatagatgagtcccgcactgctcagcttggtctgccacggcttcccaggggacagggagctcatggtctctgtgaaagacctgaggagcatagggaggtggggctgaggtgagggaccttggctagagtctccatgcattcattcaatggttaactcaatgcttcctatctgccacattttatgttttattagacattaaggataaaaaaccaagacactgtccttgctttcagattcatctgccggaggccgacaaacacaaccccctgagtactctcactagacgagacaagggaaaggaaggaagggatgaggaaagggttcagaggagagccttcaggtcagttctgaaagatgaattagtgggtgtccaccagatagacaaggggtgaaagagaaaaagcattccaagcagagagaacaacatgaatgatggctgagagacaagtgtcttgatggaacttcagcaaaggcagctcaggtgtgagaagtgaatggcaaaagaaaaagctggaagggcaggcagggccagaccatcggactttatctgtgggtaatcgaagtcattgggggattttaagcaggcaggtgcatgttacagcattgcaccagccagcatggagaacagatgcaaggagattacctgcaatggttcaggtgaataaagaaggcaagaatttgaacagcagtggggcagaaaatagagaaaagatataacagatgttagggaagcagaaactacagccatgatttctaaataccagtccatctcagaattacctagggagctccatttgttaactgacttttattattaaatattgagtaaatacaggctgggctcagtggctcacacctctaatcccaacactttgggaggccaaggcgtgatcacttgaggtcagtagtttgagaccagcctggccaacatgctgaaactctgtttctactaagaatggaaaaattagccggacatggtggcacacgcctgtagtcccagcttcttgggaagctgaggcaggagaattacttgaatctgggaggtggaggttgaagtgagctgagtgccactgcactccagcctgggcaacaatagcgaaactccatctcaaaaaaagtaaaaataaaaaaaatgaggctgggcatggtggctcacacctgcaatcctagcactttgggagactgaggcgggtggatcacctgaggttaggagttcaagaccagactggccaacatagtgaaacactgtctctcctaaaaatacaaaaattagctgggcgcctgtagtctcagctacttgggaggctgaggcaggagaatcacttgaacccagcagacggaggttgcagtgagtcgagatcacatcactgcactccagcctgggtgacagacgagactccatcttaaaaacaatttgataaaaggaagtggtcaataatgccaagtgctaaagagatcagttgagaccctttaccagctccctggtttggtgctgaggtaactggtgcccttctgccgagcagttccagagaagacactgggagagtgggcttgaggggaatgaactggaaaggaacaggtgaagccacggtcagctgttttttgaagggtggctgagaagcaagggtgagagcttaggctgtaaatattgggagggtttcttcctga

SEQ ID NO: 97173 - DNA, 47763 bp, Homo sapiens
  misc_feature (1)...(47763): n = A,T,C or G
aaaacattcttcctctccccaattttcctaatggcttacaacttaatattttaaacacttatagaaaatttcaaaaaatgcaaaaaaataaaaaataaaaataatgcaaccatatctcaactatgacaataatcaactaatggccaatctagcttccttcacactcctactcattttccttgcccccaacaacctagatttttctccatcatagtactgcagctgcaaatatttttgtacatatgcttaaaagataaggactccttttttgaacatcatcacactgccccaaaagcaacaatagatgcttaatatcatcacatattcagtgttcacattccctaattgtccttataaatgtcctcttaaaaatctttgcttgcctattgggaaaaattagtcatattaaaaaattgtttgaaagtttgttgtttggggctgggtgtggtggctcacacctgtaatcccagcactttgggaggctgaggcaggagaatcacttgaacctgggaggcagaggttgcggtgagccgagatcatgccattgcactccagcctgggtaacacagtgagactctgtctcaaaaaaaaaaaggtgtgtttgaatctgcatcaaaacaaggtcccaggtgggcatagtggctcacacctgtaatcccagaactttgggaggctgaggcaggaggaccactagagcccaggagtttgagaccagcttgggcaacatggcgaaaccccatctctaccaaaaatacaaaaattagccaggcatgctggtgcatgcctgtagtcccagctacctggaggctgagatggaaggatcgcttgagcctgggaggcaaaggttgcagtgaggcatgatcaagactattgctccatccagcctgggcaacagagtgagaccctgtctcaaaaacaaacacacaagggcagggtgtagtggctcacgcttgtaatctcaacactttgggaggccgaggtgggtggatcacctgaggtcaggagttcgagaccagcctggccaacatggtgaaacccccatctctactaaaaaaaataaaaaataaattagccaggcatggtggtgggcacctgtaatcccagctactcaggaggctgaggcaggagaatcgcttgaacccaggagctggaggttgcagagagctgagatcgcaccattgcactccagcctgggcaacaagagtgaaactccgtctcagacaaacaaacaaacaaacaaacctccaaaaaaccaatgtcaatttattgtgataattaacatgtctcttatgggcaacattgtccttttttagcctttgccctcaaataaaaaaattgttatgtagcaaaaacaaccatttccagatgatgcaagagttcaaaatgctggcctgaagaagtctatgaaaatgtcaagtcatgcctttgcgaggagataactacttggcatatacctttccctgaatgataaagaaggaaagaaaaaatgtacttccagtaaacatattcattagccacagagagctgcatataaacatgatgcttggaaaacaaatgctctgcagtaaatgggaattgagaaaataggtaataagttgcaaatctgaaaatcatttctttatttcaatgtaaggtaagtttataaacagtcagaccaaaaggtctgcttttaaagttttgcaaatgctggtcagattgattagtccttttttgaatttttttttttttttttgagacggagtctcgctctgtcgcccaggctggagtgcagttttttaatcctaaagctttttaatttaaggctttttaattttcagtttgcttactccattcttttgtaaaagaaaaaaatcactttagattaaatgaaattgtaattaaggcttctacttccatttctcaccttacaagcttatcttctggatcccccacttaaaaaacaaagttcccttttcatttaaaaattaaagaaactcctgggttagtacttaacacaaacaaactaataattaccatgtaatagaagcaacaggacaagctcacagtaatattacaatgcaggaggtaaaaacttgggcaacatagaaagaaggctccgtttcttagtctgtaaatggggacaataaatagctgcctcataaggctgatgctgggatcagtcaaatgagatcatgcaaagcacccagcactggctaacactcaataaaaaatagccattatgatcattaggaagatataggaagagacttttgtcattgtcacagtttaatcttgaaaaggaacttactgtatggtagcattctgagtcagttacaagagaaagtaacaagtgacctgcattgctgaggatcctgcctcctccaagctaccctgctacattgttaaaacaccctgggggagaaaagtatcctattcagccaatgttaaactgtttccttttctgaaagttagaaatagatgaaaatagcataagaaataactctgtatatagtaagttctgggtaagacaatattgtggtaagtgaactaaacaaagattaatctgaaattggactctgatccccaagtgaaccagccagtgtagcccagtccttactggacctgaggaggaaaaacaagcctgtgtctatctcaagcgtgatctggctagatatgatctaaactttgaaaagtgcctaagcgtgtttcagatgcatattatgtgttaaatactaagcagggagctctgagctggggcagtgcaccctgatgctgaggaactgacataggaaaatgaacacctagcattgtaatttggccttttgctatttatttatttatttatttatttattttgagacggagtctctctctgtggcccaggttagagtgcagtggtgcaatctcggctcactgcaacctccggctcctggttcgagcgattctcctgcttcagcctcctcagtacctgggattccaggcacacgcccccacgcccagctgatttttgtatttttagtagagatggggtttcaccatgttggccaggctggtctcgaactcctgacctgaggtgatccacctgcctcggcctcccaaattgctgagattacaggcatgagccaccacgcccagcctattctctcattttagtcagacaagttttcttttctgttagatctctccccaataattgcaaaaaccaaccaaataaataagtatgggagagaggtggttatttatattatgaaagcattcttcagtttaattcattgcagaatctaagatcctttcctccacagtgttaaaatccatagccctctcaattactcttccacgctttgaggaaaaggaagacagggaggagagatctccaatggaaatttccttgttaataacatcttatgtttctctaaatgttttacagtttcaaagcactttcagactcactctggtatgttagttaagccttgtgcaagataccataaatcatattatactcaattaagaggtgagaaaagacaaggctcagaggtgaagcaaatataaatagtagtaattagttttatatatatatataactaatatatataacattcatatatatatatatatatagagagagagagagagagagagagagagagagagagagggcgcaattggtacatgtgagacctgaagccaagatttttaaactaagtccagtggccaagaagctgaagcaagtagctcacactcactgccttggtgttgctgtttttcctcccttccgtgatttggttctaagcatcttcccttttttttctcagttaattctgattcatgacttccctcatgtaattaataaatgggaaagacttgagtgaacaaatattcagccaactagtatttattgagcaacaactagaaaccagaactttgaagggttttaaacaaagnnnnnnnnnnnnnnnnnnnnnnnnnnnnnnnnnnnnnnnnnnnnnnnnnnnnnnnnnnnnnnnnnnnnnnnnnnnnnnnnnnnnnnnnnnnnnnnnnnnnnnnnnnnnnnnnnnnnnnnnnnnnnnnnnnnnnnncctgggcaacatggtgaaactccacctctactaaaaaatccacaaattaaccaggcatggtggcatgcaactgtggtggttacaggtactcaggaggctgaggccggagaatcccttgagcctgggaaatggaggctgcagtgagctgaaacagcaccattgcactctagcctgtgcaaccaagccaggattaataactttattgatgtgaaccaattatccaaaaataataatcacatattagccatagcggactccccagctagatgttttctgcctgtgtttgtaaatcctggacatagttaaatttcaagtgccttcaataagaaatcaatggcttggaaaacatctctgcgcagtcttgataagatttctaattgtggtgaagcctcattccttaaattatttattcaacactaacccattctacaaacttacatctgctgggctctgggagtaacaagatgagttagatgcagcagtcccaaatctaaaggaggttggagactagaaagaccagtgcctgctctgagctctccagtggtccccagcctctcagtcaggcctcacaggcccctctgccagaggcggaaccagcttgcctccgctctgcagccacactggccttttctttcatttctgagaactctcctcactccctcccactttgggctctgcagaaatcccagttccctttgccttgaaagctcttggtcaatttagctcctcctccttcagccctcagctcctgccttgctgccccaataatctttttctgactgcagatctggtcaaatctttgtctgaaaccttagagcccattacatttgtagttttacgtgtacacgtgtgatcatttaatatttgacggtgtgctctcaggtgcctacgctcctggagaggcaggggctgactggttttgttagatgccagtgcctgacacacaataggccctcaaggggtgaaaaaccaaccaaccaagtcaggacccaagcaacctgggcctctgtggaagggcagaatggcctgagtttgggtttgtcgagctaccttaagatcaggcctcctggctcctattttagcccttctaacactctgaagtgtagaggttgtttgttccaagtccccaaggtactgtaagctcccagatagcagaaatcccattatattttagtgctgtggccccagcatccagctgcgctgttacttagcatgagatccacatgaaaaccatttcgcaactattagccattgccagtattaatactttccggaaggtggcacaaagtgggggatgttatagacagcttcaaagaaacgtttaagctagagttgactctttaaataatacaagccatccccaaccaaagattaaaaatttaaatacaaaaaaaaaaaaaggaaatttgcctaccccccatttgtgaaaacaaagaaaaaaaaaacagttaacgtcttaacttttctaggccttcactctcgcctctccccgcgctacaagggcgaattctggacgtatctacacagtcaccgcggagtctgcaatcgccgcgacgtcccctggcatttcttggccaggctgcaactttggtgacggtgtatgtagttacatcccctgtagtgcagctggtatttagggtcctcattggcaaagttgagggtataagcagggagggaggggaccttggcttctttccattcactggcatgttttcggggcacggtcatcccacgctgggctccagcgccagtcccaaggcctcgccgaactccagcccgggagtgcgcgcggccccgcccaccgggcggccgaggtcccgcccctacctcccccgccacacctacccacccaccccattgcaatggtctctgcacgcaggcgcagtggcgcgcgggggaggcggggcgcatgtgggcttcatttaaacagagcagagggggcggcgcgcggtcgccgcggtgctgctgctcagtgggagcgggtcttcgcaactgtctccgcgtggcgcgcgcctctagccgcccttcccctggcggctacggcyggagggagcggaggcgagcgggagtcgggctccatggagagcggcggacaactgggcagaggcggagctttcatctcggcaccctggttccagtgacccgcgctagcgtcccgtcccgcccgcgtcggagcggccgccggccccgggactgaccggcctcgccgcacctcccgcaccgactagcgctcccgggcgctcctgcgcccgactcgccctcgcccccactccccggcggggtggcggcggccgggcccccacggcggcggccgkagcagcagcagcagcagcaggagcccgcctctatgatgaagttcaagcccaaccagacgcggacctacgaccgcgagggcttcaagaagcgggcggcktgcctgtgcttccggagcgagcaggaggacgaggtagggcgcccggcgccgcacgctgccctccggggcgccggggtctagggcccgggtgcttcccctcgctccccgcccctgcgcaggctgcggggctgggagggattagcccccttcctccctccctcctttcctccctcactcctttcctccctcacttcttccttcctttctctgggctgatagatgagacaaagggggctcgcccagccccagtttctccatctgggcactcgagaaggcgcctggtccccgggaaggtcccgggccgcgtaagtctcgcctagcgggagtcaccatcttaacgtgcgaattgagttgaaagccggataaacctcgagtgctcagcgagaggagggtggaaatggcgtgagtgttgcagcagagcccttgtgcctcttttacatattttccttccatgttacagccgtttgcggtctcggattcgatctaagcatgtttgtggagtaacagacagtcctcgtgcttggaattgagtctagtcttggcaattcttgtgggtccatgaacccgcaagctgttggcataattatgcctcatttttaaaacggccttcccttcttaaagttttctgactgcagaaaaatggttagtgaaaaatgtggaataatgccaaaagggagacgatggactagagatgggcaaagctgccattttcagacagtaatctccagctctcagcttatgtataaagggttctttgctgtctggcttgacatctggaaaggagtagcctttctcgttctcagagcagtcgttcttggataatttacccatctgcattgggctgagaatgagacccttggggtttccctggagagcgatttttacttaattcagtagtatttatttaaaatggctaactgttgaagtttgcttagggcaatagtagccttttggtattgccactcttaagataaattacataggtgaaaaaaattaacattctgagttctgctttcataaccaaccgtgtataaaatactaggctaaggctggagatgggaatttaatggcttccttactgctagtccctgtagttgtgatgaatatgacacagaatacactcagtggcttagttcttgttatgttaacgaaaagttctcgaaatttgcccttcaaacccttgttttgcctttatttttttttgaaaagaaaccaagccctttaaatgggttgctctgtgctcactcataacctttacgtattagacttgaatcccaaacgagtgtgcagagaaatacggccccagcctttgagatgggtctgcttaggagagctagaaactgcaaagggaaaggttattaacttttacaaaatgaacaagtcaacaagcattaagtgtgttctgtaaaaaagataaagccttagcggaaaggggccatgttgaggcaaagtagtaaactttaaatataaaagaaatgatagccaaaagggatcaagatagatcaaggatcttgtctggtttcctcaatattgtgtaatgatattcttaattgagtgcttacaatgtgccaggcgctgccagaagaaaacttgttatacatttaatccttttaacactgggaggtagtgaagttactcccattttataggtgaggagacagttgcagagcataagtaccttcccaaatgacacaattaggaagtggtagagtcaggattcagggtccagtccttactcctgatgttgggctctgtttgttgartgagtgagatttttgtgaggctaagtttggaagcctatctgaaagtggtgactgaagtgttgccataatgtgaacttggaattcaggctttgtaaaaatactagactctaggggaaaatatgagtgatggaaattgaaatgatgatctctattgtgcttatggtaaagcaaagactgatagaagctttaggaattactttagcaataaaaataaatgattatttttatgcttggatattatttctactgaaataaatactaaattcatagcctctagttgagtcaagagacccgtgtcattaggtaaggtgaagtagggagcaagttttggagaatgtattagaaaaatccattgtataaaactttgtaaatctgataacctgtaggttgagaattgaagagagtgagtcatcttgttagaggatatgatctgagggaagactctagaattctccttaagtgaaatgcacagccaattttaacatctggtttagctcttcagaattttcatttctgtgattgtgtgtagttgaggctttatctattacatgattattacagaataaactctgttagctttcctggagattctattgtttctctatgaatttgccttcactctgttgaaattgcattgccagacttcccaggacagtctagaaaaccagcttgagcccacctctctagttaataggtgagaaatgtttccctctactggatgaaaaacacctagatcctggttagaagatttaaatgtatgttttgtttgaggatgaaatgtttatatagagtacaaatggaagtaaaagagtaattgcaatttgaccccaaaaaagctacgtggcgctcccatctggctgttcctgtactgaagttctcagtaagtttctactttaaaacagattgttctaggaaagaaggttgttctaagagcagagttattcttttaaggtggctttatatattaaatattttccattttatctttttctgttctgtagggtaaataagtattagtatttgtttaggaagaaattaggtagcagaagtaacctatcccaaggtcacagaagctggcagatccttttgagctctggtcctttgtttctaaatgttttgtttatttgacctacctccccagctagttatttctgtggggaagcaccctcagttttggccgctgggcttctagacaggcccacagctaattgccctgtagagtagctgggtmctgtgcttgtacagtgaaagatgacaatgcttttacaaataggtaatcagaaatggattctgttgaatgtatttgcatatatgatagtttaaaaggggatgaagagatgaggtcttagctcctaagaawcattctgtagggaaaggttggacaagggatcaatggaaagggaaataaagtaagggaaaagtgcggtcgggtattctggggttcagatccaatgtgagtcatttggagttggatgtgggtgactgggagaggagggaccaggcgtcccaaatagagcaagacttggggctgtgatagatttggctgcagcttagggatagcatagaatcagtaatagttgaaaaatttgcaacacttcaaatgtaaggttgagaagttgctacgcaagaacaaagttttgttttgaacttagttttgaacaaagaacattgagatagtagatgtgttcaagcttgagagtgatctggcagcaaaataggtttagactgctaaggggagaagtagaatgacttgatcctgtgtgaaatccagacatagttgcaagagaggcattaacaaatcagtctgaaggactaaccactacaggccaggcgggtggctcatgcctgtcatcccagcactttgggaggcggaggtgggcagatcacctgaagtcaagtgtttgagaccagcctggccaacatggcgaaaccctgtctctaccaaaaatacaaaatacaaaaagcagccgggcgtggtggcatgtgcctgtaatcccagctactcaggaggctgaggcatgagaatcccttgaacctgggaggtggaggctgcagtgagccgagatcatgccattgcactccagcctgggcaacagagcaagaccctgcctgcaaaaaaaaaaaaaaaaacaacaaaaaaaaccactactcttccataggacttgctgccctaattagcttttaagctctatgagccaggggctgtcttctacagatggtctgctataatgctgaatatatattcctgaaaaatcttgagctgtacaaaatcatgcagtaaagctttggtgggaaaggtcaagtctgaaaacctaaaaccagagctccgatgagcaacaatactaattcaaaatattactagagttaaatctcaactagcatttttatacttagaatcaacagtcagtccacccttttcacacatactctggggctcatagttcttcagagttaagtccttgaaggtatttctttcaaatggagaccactttcatcaaaaataagtactatccaaaggtagccttttttttttttttttttttgagacagagtctcgctctgtcctccaggctggagtgcagtggcgcgatgtcagcttactgcaagctccgccttccaggttcacgccattctcaagtagctgggactacaggcrgccgccaccatacctggctaattttttgtatttttagtagagaaggggtttcactgtgttagccaggatggtcttgatctcctgaccttgtgatttacccgcctcagcctcccaaagtgctgggattacaggcatgagccactgcacccggcttggaagccttttttaaacacagggaagtgtcaccaacttcttcatctgtgcctccagctctcccagaaggtttcccgtcattaaaccaggcattaacgtagaatttgcattggattttttttttttttcttagggtcttggtatagctcaagcttttctctaattgaaaaaaagcttataccccgtcactttaaaacattgacctgctaggtaaaaaatccatggtcaacctgatttacaacattattgataatacttatctaccaatcccatataagttggagctaaacatagtttagaagaaagaactgttatttctggtctactctgcctctggtccaaaaagaagtactaattttcttaatagtaggtagctgtttagcatgtatcaaaccattttcataacctatgttcttttaaaatgtctatgtgcatagtgggtgtttctaataacacggctggcctaattttggctaaattttggttaagtgtagtagaattaggttaacgtagtttcaaccattcatgataccctgatttatgataatttggaaagaaagaatagcaacctcgaaacagtttctgagtaggccaggtgcagtggctcacgcctgtaatcccagccctttgggaggccaaggtgggtggatcacctgaggtcaggggttcaagaccagcctgggcaacatggcaaaacctcgtctctactaaaaatacaataattagccaggcgtggtggtgtgtgcctgtagtgctggctactccggaggctgaggtaggagaatcccttgaacccaggaggcggggctttcagtgagctgagattgcgccactgcactccagcctgggcgacagagcgagacagcgtctcagaaacagcaacaacaacaaacagtttctgaatagctacaattttcataataaacctcttcattcttaggggtcacttgaggttctctggatggctcctccgctccccttcccgggaacagaagtggtatctatagtggttggagttcctagagccaagccatgacaattgcatctttaagggtaaaagctgaaacacaaatgggaattcgaggcccaaggacctacagcctctgaaggcataaatgcattacatagcccttgaacagcacccttttatacatcaccagcgaggaggacccgtcaggtgataaagggtatagattctataaaatagatcaggggtgcccaagcttttttttttttctcgctctgtcaccaggctggagtgcagtggtgcaatctcagctcactgcaaactctgcctcctggattcaagcgattctcctgcctcagcctcccgagtagctgagactacaggcgtgtgctaccacgcccagctaattttttgtatttttagtagagacggcgtttcactatgttggccaggatggtcttgatctcctgacctcgtgatctgcccacctcagcctctcaaagtgctgggattacaggcgtgagccaccgtgcctggcctggggtgtccgatcttttagcttcactgggcctcattggaagaattgtcttgggccacacataaaatacactaacattaatgatagctggtaagctaaaaaagtaataattgcaaaaatattttataatattttaagaaagtttacaaatttgtgtttggctgcattcaaaaccatcttggactgcatgcagtccacgggccacaggttgagcaggcttgcaatagatcattctaattcatagacttttatccaataagatttagggttggtttcctgttgactactgtcaatacactattcttttttttttaagagtctcactctgtcacccaggctggagtgcagaggcgtgacctcagctcactgcaacctccgcctcccaggttcaagccattctcctgcctcagccttccaagtagctgggattacaggcacatgccatcacgcctggctaatttttgtatttttagttgaattttgtatttaaattttagttaagttttgtatttttagtcaccatgttggccaagctggtctcttactcctgacctcggcctcccaaagtgctgggattacaggcgtgagccaccatggccggccaatacactattcttaaagtgataaatgcttttctccaaatgcttaaaaccttaggtatctaggaaaagacaaaataactcttcagcagtgccaggtgagtggtgtttttttctggtaattatctaatacatgggaagagggagtaagatttagtagagtagtaggaagaaagaatgcttatgcgaagataggttgaatagagtaggaagagatgtcttcacttttcaccacactaatagcgttggctttggggtctgagtgtgctccaggtctggctctgcaacctggtagaatgagtagcctccttttcgtaaatctttcatatagtcacagctctgatttatctggaaggttgaatgcatcttccttcatctctgtcatcgctaatgtaacagaccagtatcttgatggatacagaaaatctagtctactcagagaagggaatttcaaacctatgaatgaccatgtgtggctctgtcaactgttggtgtgtctttgtagaatgagcttttataacccatctttagagcattaattagcatgctaactatactagtagctttgggggtgtgatagaaatgtgtagatggctgttgtgtgcgtttagagtgagtgttgaagaataatgcattgtgatagggttctagagattgagattcttccacttttgtaggaggggcttaggagcagctgcctattannnnnnnnnnnnnnnnnnnnnnnnnnnnnnnnnnnnnnnnnnnnnnnnnnnnnnnnnnnnnnnnnnnnnnnnnnnnnnnnnnnnnnnnnnnnnnnnnnnnnnnnnnnnnnnnnnnnnnnnnnnnnnnnnnnnnnnnnnnnnnnnnnnnnnnnnnnnnnnnnnnnnnnnnnnnnnnnnnnnnnnnnnnnnnnnnnnnnnnnnnnnnnnnnnnnnnnnnnnnnnnnnnnnnnnnnnnnnnnnnnnnnnnnnnnnnnnnnnnnnnnnnnnnnnnnnnnnnnnnnnnnnnnnnnnnnnnnnnnnnnnnnnnnnnnnnnnnnnnnnnnnnnnnnnnnnnnnnnnnnnnnnnnnnnnnnnnnnnnnnnnnnnnnnnnnnnnnnnnnnnnnnnnnnnnnnnnnnnnnnnnnnnnnnnnnnnnnnnnnnnnnnnnnnnnnnnnnnnnnnnnnnnnnnnnnnnnnnnnnnnnnnnnnnnnnnnnnnnnnnnnnnnnnnnnnnnnnnnaaatcacacctgtaatctcagcactttgggaggccgaggtgggtggatcatttgaggtcaggagttcaaaaccagcctggccaacatggtgaaactcagtctccactaaaaatacaaaaaaaatgagccgagcatggtggtgtgtacctgtaatcccagctactcaggaggcttacgcacgagaattgcttgaacccaggaggcaaaggtkgcagtgagccgagatcacgccattgcactccaacctgggtgacagagtgagaccctgtttcaaaaaaaaaaaagaagctattaatagttgagttttcccacagagttttagtagaaaagatataatgaagctgaaaaatgtgagtatgtaactagtaaaaacacggactgctcagaactagtatctccaaaatttatgtaagaaacaaaatttccattattgactatactagatattttcatcattctcaaatttttgtggaacacttaaaatttgtattagcagatatgtcaaatcttttgtctaggttggaaaactcttaactggaagaacatagctaaatctttgataatgaaagtacaccttcttattaattttggcctctggaaaacaatactgaatgaactctgatttttttttattattattatttttgagacagtctcactgtgttgcccaggctggaatgcagttgcgctatctcagctcactgcaaaccgcctcctggattcaagtgattctcctgcctcagcctcccgagtagctgggattacaggcgtgcaccaccatgcccagctactttttatgtttttggtagagatgaggtttcaccatgttggccaggctggtcttgaactcctgacctcaagtgatcctcctgcctcggcctcccaaagtgctgggattacaggtatgagccactgcacccggctagactgttttatttgcatgctctttacaaaacgtgttttttcaagctgaattgctttagtagttccataaaaatgtagtccagaaaaatctacattgatgattttcattttcaacagattccaagtgaattcaacagaaaagctgtaattcttgagttcctgatagttctggagtgacagtactccactacggtgcaactcctcaccaccatccccagtttctcttttataatctcaggctttttaacttggtgaaatgtttttctggaaagagaaatggtcatatagcactgaacaatagagcaggtgtggcggttcttaggaaacactgagttatgttttcatcttaatctcaaccccttgcctaaaaagttgttagtgtcctctgttgtctgcctaattaaaatataaacatgctccaatgtgataccaactttttttcatctgtactggtctagatctagtgctggggaccgcttccaagtgcatgacagaccccaggtgatcacaggatggcctagctatcacactagttggccttaagttaaaagacttttcactgttattggggttgggggcaggcaggggactgttttaattgtccttctctctactaatgctgttcatatttttccaccctggcagacatacgccatcatccagtctattctcttatctggagtgtatccctcagttcttgctcactcttagtcactgccttctccccaccaccacccccccagatgtggccttgccctcatttgaacacycaaatgaactattcaagatgagtaggcaagtacttaatgaaacagacagactttcaaatctgtcaccatgacatctgtgtgagacctcttttcataagctagttgtttagatggccagtcatttctatatcacagatattaagtacccatttaaagcgatcattttatggaaagataatttgaagttattggtctgaccaaatttattcttcctgagatgtcaagggactcttggatgataagttactggattaggmtaaatcgtttgtccacaatttataatgatatagatttatatagatgtatgtgttcttgcagtttttagacacaaaatattgagcattctatgtgactgtattccaaccccacctccaagaatataagctctttgagggaaagatgtatattcagtatcttttcatcacatacaattcttgttgagtatcacacaattagtagataaggaacaaaatcagcaacttctttctccacagtgcttctctttaaggtggagaacttgtgctgaattgtcactttttgacaggagtcagtctgttctctgtccttctagaggctgaagattgtaaagacaaaagtgaatggatttagtttggataccatgtgcatgatgcttctttcctgctagcccattttcatgattctgattttctttygaaaagcattttaaagtggtaaggttttgcatgaaaatttaagtggataaataactaacagttacatattttacctgttctgaaaaggatataccattaattggctgtagatgtccaatatgtgacccttgagatgagcacttgaaatatgactggactaaggaattgaattttaaattttatttaatcttaaatttagccatatgatgctagtggtgactgtgttagctgtaraccctcaaaagcatgaaaggttcaaaagtagcagagtttaggacagactggaattaattggcagatcaagggcccagaggagcccaattctatctgcaggtttgtcaatttagatgagtagacaagtgcttaatgaaacatgctggattttaaaactaccatcaccaaaagttggatattagcacatctgccttaagctagtagtttagatgtgaatcatttctggaccatagataattactcatttaaatttatcggccttttttttgaaagatacatttggctgggtgtggtggctcatgcctgtaatcccagcagtttgagaggctgaggcgggcagatcacctgaggtctggagttcaagaccagcctgaccagcatggagaaaccccgtctctactaaaaatacaaaattagctgggcgtggtggcgcatgtctgtaatcccagctacttgggaggctgaggcaggagaatcgcttgaaccggggaggcggaggttgcagtgagccgagattcttatatcataaattactggattgtgctaaatcacttatcaaatttatatactattttcatgaggctttctaaaaagtaatttatgaaagagagatgttgagacacaagggttccatattactcatttttggaagaaaagtttagtcatgctgatgtcttgtagatgcaggattggttttaaatctgaagcatagaccgggcgcggtggctgacacctgtaaccccagcactttgggaggccgaggcaggtggatcacgaggtcaggagttcaagaccagcctggccaagatggtgaaaccccatctctactaaaagtaccaaaatgagctgggcatggtggtgggagcctgtaatcccagctactcgggaggctgagggagggaattgcttgaaccaaggaggcggaggttgcagtgagccgagattgcaccactagactcaagtctgaatgacagagcgagactctgtctcaaaaaaaaaaaaatctgaagcataaaatgtttcttcagaaaagcagacacatcttatactaatggtttttcaacattattaatctcctgtaatttagctctgtcttggagaactggaaacatcatagtcaatgacctagatacatgagactttgcatttcatttattcaggactgcaacattttgaatatggatgattttgaactccctatttactatttactaagtgatgatgtacttttcaggcggctagccacctgcgttatgtcccattattaacgtaatccaggaagttgcttagagagcatagaattgtgtaacaagaatttcatctaggcaatagaaaccagtttattcctaacccaaacctagtgaccagaaaaagaggcctgtaactctgcagtccggaccagtagttgctgtttacttttccagtgatgcgagacaaactcttaacatttttatttaacttaaaaactaacattcacttgccagtcttgatagagggccagtgcctttggttgccatagatcctctgtaagcctccaattttgaataaaatacaaaggttttgaaatctgatttgtagtttctctgttgaaagtagaatttgaacttagagacccttgcatgcacttttggatttttaattttctttttctaattttctataaagtctcatctgggtataatttgataatgtaataaccccccctccctttttttgagacagtctcattctgtcgcccaggctggagtgcagtggcatgatcacagctcactgtaacctcgacctcctgggctcaggtgatcccttccaccacagcctcctgagtagctggtattatgggcacatgtcaccatgcatggctgatttctgtatttttttgtagagggagttttgctgtgttgcccaggctgttctcacacctgcccgccttggcctcccaaagtgctgggatgggattacaggcgtgagccaccatgcctggcctggaatgctgcttttctaagaggaggttctatgcctaaatagatactctcttttaactcagcattttgggggcttgagagaagggtgggagttgctgaattgtcagcttgaaactttccagtttggaaaagttcctggtaacttagtcaaatgagagaggactcctgtgctggctgagaactcttaaaggccagcagctcctggcagcagggagggagcagggcagatagaagtgctggcatgcatttaaaagaaaaaaaaatcagtcatggctcttgcctgtaatcccagttgggaggccaaggtgagaagatcacttgagcccatggttttgagacctgtctaggcaacatggcaagaccccacctctacaaaataatacgaaaatcagactgggcatggtggcttactcctgtaatcccagcactttgggaggccaaggcaggcagatcacttgaagtcaggagtttgagatcagtctggccaacgtggcgaaaccccatctctactcaaaatacaaaaattagctggtcttggtgggaggtgcctgtaatcccagctactttggaggctgaggtgggagaatcacttgaacccgggaggcagaggttgctgtgagccaagaccatgccactgcccctcccagcctggatgataggacgagactccatttcaaaaaaaaaaaaaagtacaaaaattagccaggcctggtggtgggtgcctgtactcccaactgctcgggaagctggagtgagaggatcacttgagcccgggaagtgaaggctgcagtcagcagagattgtgtcactgcactccaacgtggatgtccaagtgagaccctgtcttagttatcatcatcatctctatgcacactgggaattaaacttcgtgataaaccctatgtgttttcgagggagaactgtttaaatttacttgaaggtagtatactaagataattttgtggacacttttgttcaaattgacttatttatttttattttttatttttttgagacagagtctcactccattgcccaggctgaagtgcagtggtgcagtctcggctcactgcaaccttcgcttcctgaattcaagcaattcttgtgcctcagcctcctgagtagctgggactacaggaatgtgctaccacacccagctaatttttgtatttttagtagagatrgggtttcaccatgttggccaggttggtcttgaacccctgacctcagatgtccacccacttcagcctcccaaagtgctgggattataggcatgagccaccacgctcaccttgagttgattttaacttaagtgaagttcaacctaagctagcccacaaatattcctttgtttcccycccccccttttttttttcctttttttgagacagaatctagctctgttgcccaggctggagtgtagtggcatgatctcggctcactgcaacctccgcctcccaggttcaagtgattctcctgccacagcctcctaagtagctgggattacaggtgccttccaccacgcccggctaattttttgtatttttagtagagatggggtttcaccatgttggccaggctggtcttgaactcctgacctcaggtgatctgcccacctcagcctcccaaagtgctaggattacaggcatgagccactgcgcccggccagatattcatttaaaagatgggtatgtaatacctgttacctgttaaataaaatctaggatacttgtctaaggtaatagggtatttttgtaacaatttgtagatttcagtcttttttttttttttttttccccgagatggagtcttgctctgttgcccaggctggagtgcagtggtgcaatctctgctcactgctcactgcaacctccgcctcccaggttcaagtgattctcatgcctcagtctcccgattagctgggattacaggcatgcaccaccacacctggctaatttttgyatttttagtaaagacggggtttcaccatgttttgtccaggctggtgtggaactcctgacctcaggtgatcgcccacctcggcctcctaaagtgctgggattatagatgtgagccaccacgcccggccacatttcaatcttaatgctattcttggtaaggggtccatagacttccaaattaagggccagacaaacattttaagttttgagggccacacagtctctgtcacaactgctttgactctgctgttgcatcattaaaacaaccagacaatatgtaaaaatgagtaagtgactcgattctaataattccatctgtggacactgaaatttgaatttcacataattttaaaatgtaaaaatacttctggctcacagactgtacaggtggtgagctgcagactgccagtcctgttctagatcataaatgatagctgcctgttagaagaatgaagtgacttttgcctatgtatgcaggtttaaaatgtgaaggatgcttcttgccacctaatcataacagtaacaagcactctktatcaagaatcgtctttatgtgcatttccctatttctttctcacacatctgttatcttcttagtattcttattttttaggtgaggaaacaaggtaacctacctatggtcatttccttaaatttggaatattccataactaaataaacttatgtgaccatagacctcagtgcatacaactctggctaataagccaagtttctgttttttgtttttttgagatggagtctctgtcacccatgctggagtatggtggcacgatctcrgttcaytgcarcctccacctcctgggttcaagcgattctcctgcttcagcctcccaagtagctgggactataggcgcccgccaccatgcctggctaatttttttagtagagacggggtttggggtttcaccatgttagccaggatgatctcgatctcctgacctcttgatccgcccgcctcggcctcccagagtgctgggattacaggcgtgagccaccgcgcccagccaagtttctgtttttatcctttgttattatccaataatttgagagttttaccaccagtagtttatttcattagataaggtgatttggtagtgtgaccatgttaatgttaattctgatttcagaaagatggtgtttaacaaaggttgtcaattgcatttttgtggtgtaatgcgtaccccctaattttaattaaattttaaaatakwttaatctagaatagagttataaccttgcagaggtttgagaatgttgtttatatacgwagtgcttctcaggctggaagtatacagttatggttcaccttacaggtgctgctggtgagtagcagccggtacccagaccagtggattgtcccaggaggaggaatggaacccgaggaggaacctggcggtgctgccgtgagggaagtttatgaggaggtgagatgttctttcacacaaattctgtttcggagttttaaaaacaaggccctttgctacataacactaagacagcgagacgggtccaggagtgctttttgcctgatgcaactttatttttaattttaatttttttttttattttttgagatggagtctcgctctgttgccaggcctggagtacagtggagcgatcttggctcactgccacctccgcctcccaggttcaagtgattctccagcttcagcctcccgagtagctgggattacaggcacgtgccaccgcgtctggctaatttttgtatttttagtagagacagggtttcaccatgttggccagactggtctcgaacccctgacctcaggtgatccgccagcctcagcctcccaaagtgctgggattacaggcgtgagccactacacctggccttaatttttgtatttttagtagggacagggtttcaccatgttggccaggctggtctcgaactcctgacctcaagtgatccttctgcctcggcctcccaaagtgctgggattacagacatgagccacagcgcccagccagaaatactaatttttgatcagtccttgccgctgatgaagtaaatgacaataaaaacttcacagaagcaggaagatagtgagttggtatggggaggggtattgtatttaattagatttaagtaaatagccagagtgtaacttgtatttatatacattttgttataaaaaggtaaacattttatatttcatctttttytaataggctggagtcaaaggaaaactaggcagacttctgggcatatttgaggtgagttaaaaagtaatcttcactttgctgataatagaattaatgatttcttcctaaccaaccaaataatgtggcagcagcctgaaccagacatttctctcagactagcagtaggcagtcagtccaggattaggtagggagggaagtaaaagccactttttcatatgccaccacttttatttatttatttttaattaattttttttaagacagagtytcgctctgtcgccaggctggagttcagtggtgcaatcttggcttactacaacctctgcctcccagattcaagcaattctcctgcctcgtcctcccaagtagttgggactacaggcacgcgccaccacgcccagctaagttttgtatttttaatagagatggggtttcaccatgttggccaggatggtctccatctcttgacctagtgatccgcccacctcggcctcccaaagtgctgggattacaggcgtgagccactgtgcccggctgccatcacttttatatagcattattatggtagtgattacttctgtttgaaaatacagtggagctgatactgaaatgtttatcttaatccactgtagactgtttagggtatagatcttttaggaggtacaatatttttagtatgacctaagagcttaggtctcatgtgttttatctggaaatgtccccattgcccttagcaaatattatatgatacacctagtgacttaaaggattgtacgaagatataaatctcaggtacatagaacagatgctaaaagaatagaattctctttcatatattctcttattactgaaggcagaatagaattttcagggagggaatttgaatgtgataggcagtctctggaagccagggagaaaggaggtccagatgtatcttcatccaagattcagacctagatacacagtataccagaaacatggtcactttccttttttcagggtgctgtttataggttagtacagcctttatagtagaaccatataaattttatttttaagccttaggaattcagaaaaaatcccgattttgtagcacttggtagaattgatgatgacttttaccggaatacagtaattaagagtaaagttggccgggcgtggtggctcatgcctgtaatcccagaactttgggttggccaaggcaggaggatcactaggtcaggaattcaagaccagcttggccaatatggtgaaaccctgtctctactaaaaatacaaaaattagccgggcatggtgacgcacgcctgtagtcccagctacttgggaggctgaggcagaatggcttgaaccygggaggtggaggttgcagagcggcactccatctcaaaaaacaaagagaaaagtcgttcaagtagaattcagtcttttccagaattcagcagttgcttcacccagttaaatagcaccatctcctggttaaactgaaaaacatactgaggtttttacaaataacacatttgtcaatatgctgacaaggtgtttgaagaaaatgtctcacattataaataaagyttaaataatatgggaaggtaacagtattaagtgctttacaaatactgtttaacagcacacgtcaatcaaaaaatacctttccccttagaaaatataagggaaaattggattgccctgcccattcatcccagtgatttttgtgaatttgtgaatatagcataataaatgtactgatttgtgagacatagaaataaaacaactgattcttaaaaataatgaatgatgtgttaattgacagttgcctctaatttattgttgtttttattccttctcagatataaaaagataatccttcccagctgtaaaaacccactgttttgagtagatttttcaggttgtttgtggccaaaatcaggacaattatctaaagtcgtggactatggcaaagaaggctaactttartcaggatgaaggaaggccaacttgtttaatttttaacccagaaacaagctcagttgcctgttttatttaatttatgttttttttttttagatggggtatcattctgtcatccaggctttagtgcagtggcatgatctgggctcatcgccacgtccgcctcctgggctcaagcgatccttcacttcagcctcccaagtagctgaattacaggcatacaaccacgcccggctaatattttcgtatttttagtagagacggggtttcaccatgttggacaggctgggctcgaactcctgacctcaagtgatctgcccgccttggcctcccaaagtactgggattacagacgtgagcttctgctccaggccatgggctattctttatgtgcaccttgataggcctgcaggaggagtgcttaaaggaactggtgctgtttgctcttacaaaggtcctaaaggaagcagttttccatgtcattgaaaggttgtcaggattagccccagggaagaggggataggataaaaactatgggaatgcaggtctattattttaataagattgcattcaactcttaagattttctttatgaaaataacatcagataggccaggtaaggtggctcacacctgtaatcccagcactttgggaggccgaggtgggtggatcatgaggtcagggtttaagaccatcctgaccaacatggtgaaaccccgtctgtactaaaaatacaaaaattagccaggcgtggtggcgtgcacctgtaattccagctactcgggaggctgaggcaggagaatcacttgaacctgggaggcagagattgtgggggagctgagatcaygccactgtactcctgggcaacaaagcgagactccctgtctcaaaaaaaaaaaaaaaaaaaaagaaaagaacatcagatatatagaaataagtgtttaaagtttagtactggaggctgggtcctcatacctgtaagctcagtttttgggaaggccaaagcaggaggttcccttgagggcaggagtggaccagcctgggcaacatctccagacttctacaaaaaaagtagtattgagagccaatttcaccaccagtaatgatgaagctctagttctagtcttctgtttaacttttaaatgttttgtcttatataaagtcacttttgtgttggactgtacaactgaatatacttgcctgtgctgggaaatacgctatgctaatcagcagtatgccagactaatttttttcccttggaaaatgtgtccatggctagctcctgtagattaaaatgcatttctttttatattcaagcagaaccaagaccgaaagcacagaacatatgtttatgttctaacagtcactgaaatattagaagattgggaagattctgttaatattggtaagttcccttttgttatctgartactctgttctaacagaagattgggaagattctgttaatataggtaagttcccttttgttatctgaatactctttgcttatattcctgtgtccagtttccatcctagatttttttttttttggtcacttttcatttagagcagggaagataattcaaatgtagagatgcatattcatcttaattattccccaacatattgttgtctaagtcatttatcggggagtaagtggacattacttatatggcttactttttaaaatggactgtcttgtaaccaatgtcattcttttctctaggaaggaagagagagtggttcaaagtagaagatgctatcaaagttctccagtgtcataaacctgtacatgcagagtatctggaaaagctaaagctgggttgttccccagccaatggaaattctacagtccsttcccttccggataataatgccttgtttgtaaccgctgcacagacctctgggttgccatctagtgtaagatagagagaactgggtaggcctctcccaccatgtgcagtctcatggggagaggcttctttcgtttcctcgtcaaacatctgattgacgcttgcaaactgtctgaatttgccatgcaaggttttcaaacaatttgcatgtttttcagatgctttcaaatctttttttaaaaaaatagtgtaaaatattttaataagccaaagccatgtggaatttttgtttagatgccttaactgtgccacaccccacaaccccctatattattttggttgtctatttctcacagcatattttcagttttttgtccatttgacatcagtctgtggtttattttgtcatcagattacttgtgggtatacctaccccaaaattgttttctcattcacagcattagcatattcagcaaatccatctgtggtgggaattaaaaatattattggtwttaaagaaatccattcaccccaaaacttgttttacaggattacaattttaattcaaaatttccagatttgggctatttctgtatgatccaataacttattttgtcacagggcttaatttgccatttttggggatttgtcgactcattttgtctgaattttcacaactggtattatgtcactagctacctgatayggctatttcccttataactcaatagtaccttaacacaaagtataactctgtagagttggtgaatattttagggaaatattagcaaaatgcatgtagtaaagacatcttatgaaaactstattcatggaatttgatttagcatgctcagttgccagttcccattatcgatactctttctatgcagaataccttagaaccgttatttccctcagtgtagattgctcttaaaatgtattcagttatttagtggcccccacaggagtggagtcttgaaatctaattctaaatgccagtcagtgatgatcgcatcacagttgagtgaaatggccttcctgttcagctgttagagactgaagattgttagggcaccttagaatgtctcatcttttctaggttgtcaacaggtactatttgtcacataactaactttcgaggcactggaacatacctgaactaagaattaaatcttttactttatactcacttaaaatcaagaatcccatctaaaacacataggtaccttatctgaaactcttgcacttccccaaccagggcagaaatgaggtgggagaagtttgactaaaatgagggatgggggaaagtaaaagatgttttttttttttttgagactcgctttgtcacccaggctggagtgcaatggcacaatctcaactcaccgcaacctccgcctcccaggttcaagcgattctcctgcctcagcctcccgagtagttgggattacaggagcctgcctccatgcctggctaattttgtatttttagtagagacagggtttcttcatgttggtcaggctggtctcaaactcctaacctcgtgatccgcctgcctcgacctcccaaagtgctgggattacaggcatgagccaccatgcccagccaaagatcatttttttatatagacttcagccctttgtaaatattgtaactggggagtatagagtagaaaaaaagtatagttaaaacatttgttctacaaattaacctttaaaaatataattactgctaaaaatagagtgctgttacacttaaggaaaattagtgccattttggaaatgagatcttgtgccataaatacagctgaactgaatataaatgttcacaaattaatgctgtcaaaggaatgagtaaagcagaaraacttttaaccagcaacatttcaagtacgtagtgtgatcaaacatgatcatccagaatttktatatttttttctttgtacagaggttacatattctgggtgttcttttataaaggaaacattttaaatcccacaaattgacactttctatcttcaatggactaagatttttttggtcagtaatctctgaaatttccttaaattatatacttaacatagcagagaaactggattgtttttgtatataagactgcttccacctgaaatgctgtcataagtactgggggggtgggggagtgcccatcttgtacatgatattcttagaggtaataaggtaatgatgcatgaatttattttataaactcttggactatgtatttgacatgtaaaatatgtacagtattaacgtcaaccatctctttaaagttagcctataaatattgttgtataattttctttggtcagaaacacttggactgaatagtgacactcggtaaggattttcagtgccatttagcaaaacgtctttagtctatgcaactagcaaaaatctgcataatgcaacaacacagttttcacacttcaaattttacatgaggggttcttcacgattctcctggaacccagtctagcmaaatgagaggaaaggccctagggagatttatttctgttaaatagttaactctgctgagtatgacaaatagtgtctactatctcaaccctccaaaatttgcagagtgttgggactgtcatttgtgattttttttttttttttttggtggggtagttgaataaaattgggcagctaaatttttcagttccatgtgcctcccaaataaaaaacagaaaataagtagtttttgtgaattgacttgcagacaaagtagaaactgtgctgcatgatgttattttgtaaacagatgacattttctgaccaggcacatgccatccaattttctgtcaatcacactgttgtataaagcagcagaactgaaggggaaaaatgattgttgtatacactgaattgctttgcatggtctcatttgagataattgatgtaagaatcctgacttttttatatttggaaacatcaaataaaaatggaaaaaatgatcatggctttaaaaaaaaaacaaaaacacacacacatgaactcagatttgcaaaccaggtttctgaaactttgggtaaggtgtatgcttttaactttgaaatgtataaacacccagcggaaacgtatacctttcagtgcatagtgcattgtgtgcttaccctgggttgtttaaacttgtgttcaaatattccccctccaagtgaaagcctgtcgggaattccacagtaacacctttactgttctcccattgatgatcatatacgttacctcttcctagcggtacatttgtatgatccttactactggaattaccgggttaaaaggaaatgcttaccactaagatgtcagtattctcctcatggatattttcartctcaatgttgccagtctaatagtatagtatgtggttgctttactgctgttctccccacccccgtggagttgtgtcattattttaatgaatgtgagctcttgacttactctagaattctaatacagatactttctgcactagtatcacttttattattgcagttccatttaaaagcataactggctaagkcaccsccccacccgccgcattacatttcctaaaacatactgctgccaaagaccaactgtagaatccttaagtcctgttcaagtgtcacttcattttttattaggggtttcttagttggagggcatgagaaacttggycctttccaatgttgtcttcacattggagtataagaattctctataggactctttaatttttttttttttttggtagagatggggtcttgctgtgttgcccaggctggtctcaaactcctaggcttaagcagtcctccagcctcagccttctcaaagtgctaggatgattggcatgagccacctcgtctggcctgcaggtctttttaagcatttgctgttcaataataagcatcttctttatgcctagtatttgtgataagagcacaaaacaattttctaatctcaaagagcttatattctagtggggtagagataagtgatttatcttggtgtagttttggcttttttgtttgtttttttgagacagcatctcacactgtcgcccaggctggagtgcagtggtgcaatctcagcttactgtaacctccgcctgccaggttcaagcgattctcctgcctcatcctcccgaggagctgggatcacaggcgcctgccaccacgcccggctaatttttttgtatttttagtagagacggggtttcaccatattggccaggctggtctcaaactcctgacctcgtgatccgcctgcctcggcctccctaagtgctgggattatgggcgtgaaccaccgcacctggcctatcttggtgtttttacatccttcagtatttttcaaggttttacagcttttttatctatagacttataccatcttcaaaagcaatacaattttatttgtagacgtgatttcccccaccaaatgcacattttatggagctctaggacaaaagtcaggatgaaaagtaatctatcgctggtgctactttaataccttcctgactggtgccactggctaaattctagcagtacgatgagagggccattaaggcctatcttagcaagcaagacattatagcaaagacctaaacactcaaaggttcaacgtcttctagccagggaactattctctaattcttccaccttgatatgatttcagcaaattctgataacccggtattactcttaatgcatttttgtaacatttgacaaacatctcccaatatgtagactcccactctcctgatgctaatcagtatcagacaatggaagtaaattttcctgcttttctcaacttttcctcaaattcatgttagtgaagtactttcatttggccatcattatttatcaaccttaagaaacatgcctattgacgaagtaaatatactaggaattcaacgtatctacgggaatgtggacaaagacatataccaagacaaggcactagagtgaaaagccattaaaataaaatgctcagcagcaaaggatttgtaatggttaacttgcaatatatccatatggtgtaatattacagtcattagaaatgacatttgcgtaaggatctgagtggaaactgatacagcctgtcggagagctactgagtagtattttatcacagctgcatacataccctttcacccaacagttccactcctgggagtctagtcaacaaatggacaagttgcacaaccaagctatggtcaaatatgtgtgttgtaggatttatgaaactggtaccaatttaatattcaaatgtgattaagtcatggcaatctatttactggatactttgtggttaccaaagagctatgtgctgccacagggagtcctttcaatagtgattgaaaaaggcagaacactactagacagaactacctgttttatgcatgtattggcatacactgaaaaagcttagtcacttaaaatgaggttgtacagattgtagattttgtttttaaacgcctgtatggtttaaaaaatgttttgggaaatagacatgagcagggcagagaactacaacctacaggccaaaccccaccccactgcctgtttgtacggccaacaagtttaaaatttttttaatgttttaggtttttttttttttwwaaaaaatactatgcccatttgtttacaaatcgtctgtgggtgctttctcactacaatggcagaattcagtagttgagacagacctatggtccacaaaggccgaaatatttactgttttaggagaaaaaaacaacatgaattgtaataacttggacttacttggttgctcagtcctgatgtgtcctgttaaaacctaagagaaacagcaccaagttcaatctagtgcaatcagcctatcacatctaagctgcttttgccagatctgatatctactcccgaccttaagccaggagactttgtaaacttactaggttataataaaacttaagaactatcgatatttactaatctacatcatggaactatttcaaaagcagtcatatggtaagatggatcaggagtctttaaaaataaaactgagaaagaaaaatcatgtgatcaattcagtagtagagacagaggttggtatcaagtctatgttcatacacttaccagtgccacccagcagggccatacaagacacatgaaatgagatcagctcaagggtgacaagatgaaactgggagagggccggggagacccgaactcttaatattggattccacacaagaggaaaaattttagtccagctcccagcatggcagctaatggcaagttagtaccataaagccaactcttggaatatacctgacttccacgataaaatggagatgagtgcaggggtgagtgtatagttaagaaaacaaacaatatattactagtccaggtggtagatgacagatttttattatttacacttctctcaaattattacattcagcatgttttgctttttatgttatttaaagtataaaccctcatataattccctaagatgggtggcatgccaagtagctaaatgaaatatcatcccagcccaaaagtacttattcgaatgaaatattacatttttcttaaataaagcaataaattaggtaccctattatcatggtattttcttttttggccagcttttctagataaggttgtattgctactgcaactaacaaaaaagatgtggcagggctgggcacggtggctcacgcctgtaatcccagcactttgggaggccgaggcgggcagatcacgaggtcaggagatggagaccatcctggcccaacatggtgaaaccccgtctctactaaaaatacaaaaaattagccaggtgtggtggcaggtgtctgtagtcccagctcctcaggaggctgaggcaggagaatcgcttgaacgcgggaggcagaacctgcagtgagccaagatcatgccmcagcactccagcctaaactacagagctagaaagtggctagagcagccmaaaaaaaaaaaaaaaaaaaaaaaaaaaarggttcctgaaccattcaacagaaaaatgaggcctattcctatcatttcctcgatccaatttagttccacttaggtcactgtgtttataatgtcttttaggacagatttccttccccattctccatcaaacaaccatagcacctgtgacttttatctgttggtttgtatttaatcttatttttaagtgcttctttgaaattgttttacaagtacattcttggtctagagtaaggttctatatagttggccctccatatccatgggttccacttccgtggattcaaacaaccagacaaaatattccaaaaaacattgtgtctgtagtcaacatgtatatttttgtcattattccttaaacaatagtgtaactatttacatagcacttacattataataggtattataagtaatctaaatattaacataagcgggaggatttgtgtagattgtatgcatatacaacatcattttattccagagacttgagcatctgcgaatttggatatccaaaggaagtcctagaaccagttcccgacaaataccaagagatgactttactttagacctaagatcttgctagacagcctttgagaggatgaaggataactagagcagaagcaaatcgcagcgaagtagactacaacaatcaagtcaaaaaacataaagctcctatcaacacctcaagattttagaaaagcctcttaacgggcaattttcttttaaataaagactgggtcccactatgttagccaggctggtcacaaactcctggactcaagtgatcctcctgccttggcctcctaaagtgctgggattacaggcatgagccactgtgcccggcctgggcagtcgattttcaggaagccacttaatgttcagattcttttcttctctcccaggactttgcagatgctgctgttccctctgcctggagatgttcatctggcctgaatccaaaagtctgtccaagttacttctcttttccatgacagagttacaactatttgtctgtcccccttccccattagagtatatggtccccaaaggaaagccccatgccattcactcaccacctaatcatccccaacaactagtgggcaaacatgaaacacttttgttgaataatgtgtttcctttagcccagggattacaaagtcaaaggcttacaagggggaaggactagcaggtgtgctcggaggggactctagccaactggagagtaactggtgagaagacaatgacatgctcttagggtgtctgctactcagatcctctcagttaagtcccgtgcacaaaggtgggtcaggtctactgttgccagatcttcagatcattcaaaagttaccygaattctggattttcatgcaaatctcccaatttttaaaaatgttggcatcaaattcagaatgttttaaccagccacactgtgtgggccagggaaaacaggcccaaaggccaggtgaagctgcagttttcaactgctgccttggcctctcccagagccccttaagtcctaagaaggctcagtcaacacactggcactcgtttcatcccactggttgagaaagcaagtcttagcaaagtaatgggggagtcttaccaaaactgcaaaggaaaaaaatatgataccatgaaattagaaattcactgcatttgaaatgaaaatgacttatttctgtacttctataactcacaaatttagcagacatcatttagacatttttgtagtgcaacagatttaaatctggaatttcatggtttgtaaatcactatgtgatactagctataaccatgagcaatattacgggcagtaaatgttgatttctatttcgtttcttgaagttttgtgtggttcatttttaaagtgagattcaatttccttagctatagtcaaatgtaccctttaaacagcccaagaattgttataaatgacagctgctatcagttttcaaattttacaatattagggttgttaactatttcattctgaattaagctaacatttgttaccaagcaatgcatttatttggaaggataccagttaccagtcatcaaaagcttttgtatgttgaaaatgtaattttaatagttaattcttcatcttacataggagcacaataaaatacaccacaatctgaagaaactccagaattacgagaataagagtgaagaaaattcaaatgggctacaatatccattaccttaaactgcaagagacaaggttgcaacccgaaggttaacatttatgtatttatgactggctacatttatgacttaaaaataacaagaatcaggaattagatatggagagaggtgggaaagaacagttttgtgaggggaggaattcgtcaataaagaagaaaaattactgaattccaaattaaagaataaaacgagctcccacagcaaatactggagggatgaaagcaagaatcattaactgaggacttgatactctcaaagggataaacctttctgatgacacacaagctagatagttgagatctgctcatcaggtttataaggaagactcacaaatgcctcagcaaatcccaaatgatcagatcagtgtttcttaacacacatgaaaggttacagatgaaattttcagataagaaccaagaaaaatgtcataacccaaattttaggcaaaaatgtggcacaactgtgaaagtcctacatgtcagtcacaactgctatctttgctgtgactttcctgtacagtaatttttaaacattgtggcaagacaccaatgatcatctaatcagacaacacaaacacatttatttcaaattcctagaaggttaaaaaaaggtcagatactgatgctttatgcatgctcagggccagtttataaatactccattcagtactatcttaacacaaatctgcatcagtgaaaagaaactggcaaaatccacctcttgccattcaatttgtcagatggtgaagaccaagaaagaatgttccatcagtttcaattttaaaatacgattgtcaaattgggaaaatgaaataaacacagtaaaataaactgtacaaaggcaaagtagaataacaaaaaawattttaytaaaacataagwtttacagaagtttccagacaagccatwcaaaatggtcacaagctttttttgaaggggggaatctacacttgacagcaatgttattagtgagggctgtgatgtttgtttaatgttcccattttggttccaacaatcaagcttgtccatctacagcgtctaaataaagttagacttggctaragcatattctaaagacctggttagctgcttttaaccaatgcaattagatcaccaaaaaagggggaaaggagcccataaaattaaactacctcccccctcaaaaataaaataaaataaaataaaataaaaacacccacacccctgcagctaacctgacaactaccttcattcacagtgctttatacttaaaccaggatgggggaaatgaataaaagcagggaggggccactgcttttaaacgtttcacaacaatccagatgatacttctagcctctgctcatgctttatgacagtgaatcaggacaagacatagatttgctaatgtgcatttaatcaccaaaggactgaagatgtctgggcttttttattctgtaatgtttctaagactgtgtccattaaatgcaaacaaagaggaggaagtcttggcagaacaggagaagtgatgcacacttgatgatcgtatcaatttaaatattattcatggcatatagcctagtccatgctctagctgtagacagaaacaaacatacgattattattttacttagttcaatatgttactttccaaactataaatggcaaacaaccactattaattatggaaatgtcaygctgtaatctgttaaattcacrcctttttctataaattggatcagggctgaaagattttgtaaatgtccaattaccaaaacactacaataaaattaagaagttctagaaaattcaagaggatgaatcaagttgtccatttctagatacacaattctccccactaattttcttaaaatctgtagcagaagcttcttgactccaaattccgtagccataaacagctgaatacyttaatcaawkgggttacaaaaacagttcaagttttccagtattctttacatataactagataaatggtatgcactcagtatttgttaaaccaggtgtagttacaagagactccaagatctttcaattacaggttgtctttatatttggggggtcccatagcaagccattttgttaagacgtatttacatactataagcaggatctcacttattatacttttttctatttcttttccttgccaagagctttagaaaagtttaagtggtaatacaaatttgtaaaagtggaagtggtgtgaaggaraatgaatattagatacctgtttctatggcttgggcttcgttggtcttccactgctccgctacatcatttgctaatggatcatctggattgggagcacttaacaaggcctggatcgatagcagaactgtgcggatctgcagtgctggggaccacttatctatgaaggcaacaggcccagtatgataaagcatgaaaaaaacaggcccagaactgcttcacttccctcccacagacctctctgatctttgtataatgtttacattctaaacatggaatgcttaagagaaaaaggagaaagcttaataatagcatatgctgataaagataacacttacctttcaaaatatctaaacatattcttcccaacttgtctacattaggatgataaattttggtcatgaaacgtactttaggggctgccattgggtattcttctggaaggaatagttcaagtttaaaagtccctccctcaaagggggaatcctgagggccagcaatgaccacatgaaaataacgggcgttgctctcatctggttcggctttgatgccaggaactggttctgccagcaaacgctgggtttcctatgacagaaaaacaaacacatttgtgaaacaaatgtcattttgctagacaccaaaagtaaaattagaaagttcatctcttagaactacgcataatagaacagctccaatctcccaacagatttagcttataaaatgcaaaattcaaaaaaataccatttaaataattacaaccagctgaatgaaactgcaagcgaatactaatgatgttatcatacattttggctacaaatgtctacaaatatgttaataaaattagcttaataaaactgattttttactcaagtaaaataaagtaacattaggattacataagtaaggcaacttgctctaaactcaaccaaaaccaagctatttaaaaagtaaaattagcttttttggtggttttttttggcttgtttgtttgtttttgagacaagatctcactttgtcactcacgctggagtgcagtggcaagatcttggctcactgcagcctcgacctccctgggcccaggtgatcctcccaactcggcctcctgagtagctgggattacaggtgtgcgccaccacacctagctaatttttgtatttttagtagagacggtatcaccctgttggccaggctggtcttgaactcctggcctcaagtgatttgctcgccttggcttcccaaagtgctgagattacaggtatgggccaacacactcggccaaaaattagtttttaaacccactgaaaacctcccctctgaaaaatgtaacggactaaagaaaggagataagaagaggcccaggtacctgaacaggactaaagaaatatatttaacaatgctgattactctaaaattgacaattaacttcagaggaacccttaatactcccaacaatcataccattagttctctttttcatcattctccctctcccctaaataattgtattattattatttctcttctctcttcaaacctccagcatctccatccccatcctcacttgtggctgatgtcctgcttcctatttcatgacaagttagatacttccatcagttcccactgtagcatttggacatttccctgcatctgcacccatacactctggtttttctcctgtatagatgaaatgtcacgtactcttggctagggccaatcggtcttgagcactagatcttactgatctctgaaatgtttgttcttcggtaccataaagaaatagcacttgaacataaatttaatttatttagtaaagccatttttacttcctgcagaaagggtacactcgccaggagttttgccacaagagtatactgaacaaaggagacagggtcatttataacctgacgcgtccaccctactgctgtgtccggtttccactggctggaacgggatctcacattctgtatttgtcctgactggctagcaacttagaactttttaaaagaggtaaaggtagaggggaacaaaggaaggaggaagtaacttgtggaatgctgagaaaggtaaaaacacttttaaataaggaagaggaacaggctatgacctaatgcttgcttggaccagtataagcatgccagggcaaatatttaggctaaattgtgggagctaagaacataaagtatattgatttctttattatggctagcaaatatttaagaatgtttgcacaggtcttcgaataaattttgcttctaagagaagttactatttattcctaattagatggggaggaaagtctttgaagaggaacctctactttgcttgtctccaatttctctcctcctcttctgtcttgaacataccctccaatcaagctgtagttatcgctaacttgtttgttaaggtcaccaatgatttccacaaggttaaatcaaatgtccagtgcttaatctttatcttacctaaatgcgacatcttatccagctggtctccttcctctttgcaaagctttatctaacttcctataaacattctcatggctctcttcctccttgtctggcagcagcttcctttagtttccttgttggtttcttctatctcccaacatcgcaacactgaaatgcactggggctctattctagggcttcctctctgtttatacatttccacagtgatctcatgtaatgcaatgaatttaaatactaaacacactctataagctgaagcctcccctaattcatatctagcccagacctcwcccctcatcgtgcctcttgcctctataactacctgcttgatatacactcttgaatgtctaataagcatcccaaacttaacatgacctccctatccccaacctttgctcctcccataaagtcttccccacatcagttactggcaaacccatctttccaaatgatccaccttttccttcatatgccacacacatytagcctgattggcaaattggttttttttatacttcaaattctactcatgattggactgtttctcaccattccactgctacacctctgatccaagcaaccatcagctctgacctggcatactacaacagcctcctaacctgttcttcctgcttctgacctcactacctccctcgcaggtctattatccacagaccctttaaaagtcatagtcctgagccgggtgcggtggctcacgcctgtaatcccagcactttgggaggccgaggcgggtggatcacctcaggtcaggagttcgagaccagcctgatcaacatggagaaatcccatctctactaaaaatacaaaatcagccgggcatggtggcacgtgcctgtaatcccagctactcgggaggctgaggcaggagaatcatttgaagccaggaggcggaggttgcagtgagctgagatcgtgccattgcactccagcctgggtgacagggcgagactccatctcaaaaaaagtctgggcatggtggctcacacctgtaatcccagcattttgggaggccgaggcgggtggatcggctcaggtcaggagttcgagaccagcctgatcaacatggagaaatcccacctctactaaaaatataaaattagctaggcatggtggcgcatgcctgtaatcccagctacttgggaggctgaggcaggagaatcgcttgaaccccggaggtggaggttgcggtgagccccgatcatgccattgctctccagcctaggcaaaagagcgaagctccgtctcaaaaaaaaaaaaaaaaaaaaaaagtcatagtccttgtaatgggcccccaaaagacgctctatatgatgccctcactccacctacctctctgacttatcttcagctgttctctctccatcccctaaccttctctgttccagacaaaaattagcttccttgtagttcttcaacgtgccaggcatccgctcacctcaagggctttgtacttcctcttcctccccaagatatccatatggcttgctccctcagctcctaagatcttcatgttttctcagtgaagccatcataactgaaattgcaaaccccattcaaccctaccctgcacactccctatccccactccctggctttatctccacagcactactaacaaatctcatttctacttattttgttcagaatttaagctccatgagaggatggatttgagtctattttatggactgctatatcctcagcatttggaacactgcctggcacaatagatattcaattaatatttactgaattctgaatctatttgatgttatgaaaagagggaaataaacgatcagaatttcatcgttaacatcattaaggcagggttattttcaaggcaggatgtgcacattatggaaggaaaacaaaaggagccactcaggtatggggaaaaatagtctaacttctacttatatttatttttaaccagaaaaatgttcatatttaaataagcttttaggtatgaaaaacaataaatgagaacattttatttacactgccttcacctaaaaaaaaatacatcataaactgtttcattccacaagctacagggcatacgttaaaaacaacaacaacaaataacttctctctcagcacagtaatatactgaaatagtcataagatgtaaatacaaatcaaatgcttccccaaaatgtgttaattaaacccatggccattttaggtaatgtctctggtattttaagactagttttttgttttgatcatggcgatgtaagagcaagtgagaaactgacatgttctttaggttcaaactaaaacatttttagagtattaaaaagctcaagaggcaataatgaagcctctgaccttgggaagtcctttaacatgtgaccagaacaaaagaggctggtcttcattttttaggaaaaaagttaagatattagggatgaatagcaggagtagaaaaatgagaaaataactggatggtaaaattccttgaattctgggctctcctcacctccatcctttaattttaccccaggtcttcatgtttttagaaagccataaattgggtgactggaaaaaaaagaaagccagggcccaagagtcccaatccaccactcaccagttacacaaagtagtagcagctctgtatctactataaaaagctacagaaaggcctccaaaagcgtatcccaaaatagcttcaaaatcactctcaatacacagtggcagagataggtatggcatttactttctcatcttcagttcaccctcaaaatcagatattctttgtaaagaatgtacatattaagcacatcatgtgacctgatcaagcctagatttaattggaacacattctaaaataagctttcgtgtgtagaaaacattttgaaatagtccttataatatatgctgctctcaagttctaatggactgacacaaaaacatgcataattatttcactaaactgttggtttccctaacaaacccacagcataaactgtgggaggggaaaaaaggaataaaatccaaactaaatgaaacaagtctgaaatggcagcatctgaaaaagtctcaaccacagaaactgatgtcaacttttttcctaaaaaggcaaaaactggctaggaaataaaatctttccggccactattcaacacatgactaactaaaataccttctggttttacactattctttggtggaaagacagagtacagtatgatttctttaagtgaagaagtaaagggctaaaattcctactgtttcacttatctatctttttttttttttttgagacaagtctcgctctcttgcccaggctgcagtgcagtggcacgatcttggctcactgcaacctctgcctcctgggtccaagtgagcacctggctaatttttgtatttttagcagagacagggtttcaccatgttagccaggcaggtctcgaactcctgacttaaagtgatctgcccgcctcagcctcccaaagtgctgggattgtaagcgtgaggcaccacgcccggccttatctatcttttggcacaaataatttacattgcaggtgggatgccatggttcacacctgtaatccctgcactttgggaggctgaggcaggcaggggaatcacttgaggctaggagttccagaccaagctgggcaagcatagtgagaccccatcactaccaaaaaaaaaaaaaaaaaaaagttgacaaatgagatcacataggaaggccatagttgtttacagaaaaacagaataacccttaaatgaattttgtgattctattatgtttaaaagcagtccaaggattgaatcccaaacagaagtgagtttagggccatgcataatagaaagcactgtagactatgttcaggaaattagttaatgtagactatgttcaggaagttagttactaaaatagacaggtaagttggtaaaggaatagggtatggatttaaatgtccacaaaattaagtctaaaggaaggtatctcatcttatagaacgcatacaatagttaatgctacaaatatttttaaaaggaatcaaatatcacatcaaattgatctaattatcaacagatctactgggtcttgaagagcaaaccctagactcacactactgtaaactatactgtagttagtcaattataacaactgacattctgtcaacctatctctattaaccaggactcttatttttaagttgaaaaataatttgtgctcagtacgaagcaatgacaggtcttagatgctcttctgcaaggcaatgattggagtatgtacagtaaaattttggggtaataaacagtattcttagaaaaagtgctaatttgtgtgtgagaaaagttggtccagttagtaactatctatatcccagtgcatcctgtctacagtgattaggttttttagaatattctctgaaacacaaaattgcaatatatgaccagtaatatcaactgtagatcttttagctcatctcaaacaagagctgtctgataactcagtaactgccaatttcattactgaaaaataagtgttaaaaaactgagtgatgcttcaatgatacctactctgtaaactccaacctgtcactacatctttaagcgattctaaaatattaacaaacagggttctggacaaagttgtgtgttatagaaaaaaaatttaaataaagaaaaaaattatgaaaaatttgtaagataaaacaaacgggctccttttttgggatcactaataaagcaagtcaattcttcattatgtacacaactgtaagttacttatgagaatctgcaagttcaccctctatatatataagtgggcatttttatttatcactttttttgtagagatgggtttctctatgttgcccaggctggtctcctgcctcaagcaatcttcccgccctggcctcccaaagcaatgggatgacagacgtgagccaccacacttggcccaataagtgagcatttaaaaaatgttaccaccagcctgggcaacatagcaagaccccatctctgcaaaccaaaaaactaaaaaaattagctgggcatgctggcatatgactatagtcctagcgtacttgggaggttgaggtgggagtactgcctgagcccaggagttcaaggttacagttagctgtgatcataccactgcaccccagcctgggcgatagtgagaccttgtctcttaaaaacaaaacaaaacaaaacaaaaagttaattatcatcaatggacattttcaagtgcataccccttgcttcattttatctgtaagccctgtgaattttactacatgattttgtataacataacattcttagaaacatataatgtctcattatagtaaaactgactgcctattttctagctgggattagaaatagaaccaaagttttgctcaagctccccattacactacttccttacaaatcataaggccacctagagatacactaagataaaaatggctgatgagtacttttctccacagcactgctatccaacagaaatataatacaagccacgtaagtatttaaaaattttctagtagccaaataaaaaagtaaaaagaaacaagtaaaattaattttaatatattttatctaaaaatgtattcaaaatattatttcaacatgaaatcagtatgaaattaatgatgtattttatcttttatcatagccttcaatgcccactgtgcaaattacacttgtagcacatgttaatttaaactagtcatatttcaactactcaacagccacatggaatgattagtggctcccaaattagtctggagagtgaaacacaagacaatcatgttataatgttactgcctggtcattatgaataatttaatttatttcatataataggtaaaattttgtacagaaactttaaagcatcactattttcccctcaaaaaattctatacaaaaagtaatgtcaggccgggcgtggtgtctcatgcctataatcccagcactttgggaggccgaggcgggcagatcacctgaggtcaggagttcgagaccaacatggagaaaccctgtctctactaaaaatataaaattagccaggcctcgtgctgcatgcctgtaatcccagctactcgggaggctgaggcaggagaatcacttgaacctgggagacggaggttgcagtgagccgagatcgtgccactgcacttcagcctgggcaacaagagtgaaactccgtctcaaaaaaaaaaaaaagtaatgtcagaacatttgacatcactaataacagaaatgcatgtaacaacagttgctgtttgctacactcacaagattgtgtttgaaaaaaatttatggcaatttcaaaacacattaaatgaacaaaaattaattcaaacaagctaactgaatgatgaagtaaagagttcactgaggaactattttaatttttacagtacacactaccccctagtggacataagacatcatctacttatttcaccacctttcctttgcaaatgaaaaaactgatgctcttaaaagttactgtacccaagtttgctaagctttttaaacttacattatatgatcactccttgctttggtaaaaccaaaccaaagttagcacctacctaaacacgtccttgaaaaagacctatagattccaacagtaaataaaatgaaaatagcttaagaaaactaataaaagcaaaccaagcaaagctaagacaattttgtattccctttctgctttcacctcttgtgcctatcttgctcctaaccacttagactcccccagataagctaactgggtccatgagaatttcctgaaaatgcctatcctaaagtcaaatggagaataatgattctcaagacacacccctcccttgttctttcttttcccttctactcccacatatttaaatctcaaaatttcttaggtggcagattcagagaaggaaaaacggaagaaaaatctatttctaagattctgcgtac

SEQ ID NO: 97174 - DNA, 162754 bp, Homo sapiens
aatataatttatccgatttctgactgtgcaactgtttaagaactctatgcagacccaacaggatattggaccaaaaaacgtacaggcagtattttaatgatttagcttgaccatgtggcatctgccatacataatgcaataatactcctttatctttgccctctgtgattcaagttctaggatgtctcctcctccatgctataggagttctgtgtttacaagaaagatgtagtatacagtataggggacaagttctcaactgcagccctagtgaacacgtagacggtggtatgttataatggaattttactgtttgaatagctgcaaatgcctgaagccataattctgcaataattaccatatctttgagaactttctgcaccatcagtgagaaaacagaattcaaaattaccaaacaaaatcatcttgaaaacctagtttcttctgagccaattttctcttttctaagcctgcctgctgataaaaggtggcacatatcttctggcttaacaataatatgcttggcctccttaaattacttggtgttctgcaagaaataaaaatctctcaaatctacacactaaacccttttatcacatctcagaatctactctattaaaaataaagtaaaacctagaaaaccagtccccagtatattgaatatgtaactgattcacccagttgttctcagtattccctttctctttaaaatgaaagcacacaaaaggagggactccttgtatattcagggcaaaccattgtcacaatgaactcatttggaatggattttggaagctcttcagtctccagatttctatgacactctatttttcaatacgatccatttacttgtcactcagtctttttcttttattcagtctgcactggtcacctaaccatcacctactgtgtcactgcataaaatctgaaactgcagtgattcaaatttctgacccaccactagttttgtacatcctgtattcaagctcatcaagttctctcttgcccccagcttttgaacatgctgtcctctctgcctagaaagccctctctcccctaactcattttgctggactgactcctagttatccttcaggattctatttggacttcatttcctccacgcagcatcccctgaggccctaatcggagctggttgtcccgctttatcaggctctgccacaccacgctgtgctcaaatttataggacctaaatattgacagtaactacccacttagctgtctgtgtctccactgaactagctccgaaggcagtaagcacacccatccatcctgctcactatggtgtcctcagtgtctagcaaactgcctactcatcataggtgcttaatacatatttaaagaatgaacacaccagtaatttgacagtaagcaaactgtaaaatatttttataaccgccttataaagtaggatcctcaagtgccaaagtacttaagagaataacatctaatgaagtatttttaacctaagataattaccaagtcaatcagaatacagccactcttaatttaagccaactttgttctcttcatttaatggaattggctaaatagaggctcaaataagtgcttgttaattatactaattaacaaatgtttgcatggttgcattaaaatatatgagctctctaaaacctagttaaaatctgaggttaccatgtgcatgtagtgagctcagagtaagtaaggtagtttcttaaagggatagttgttgctgcctcagttatttgtggggtttctctgagtattcaagacacccaatgctgcaacttttggttagggggatggggagggaggaatgcttatctctggaggctttttcccttctccattcttagcaatgtacagctaagaaattttacagccagtacaaaaaggggatgctgtatcccagtagtaactccctaggaatccactggcagatttcccagatgtatgaagaaagcccatggaagatgtcttcatatttaattcttattttattttataaagaagtttatttgcattcccttttgtattctcagggcctggtacgagccttacaatagtaggtactcagacaggcacctgataggtaaatgatcgcagaagccacctttccctaaaggcatttgctgagtccaacaaattccaacttccattttgatggtgaaagaacagaaatcaccttcataaaaggtgggaagtctaacacgagatgctccttacaataaagggaaatctaatagctatgcagtgagaatgaattggagataaaccaactcttatgaggaatttaagtctgggattaacctaggtattctagagaactttaagccgtgacctaaattgacttaacctatgtgggagtacactaggcacttggcagaaataaaaagcaggttctcgtattattcatacaaataattttccaagtatcatgaccagctcatagtcaaagataatcaggcacacaaggaaatgcaacaccatgagcacaaaccagcggagatatcaaattaacaaaaactaagatctaaactaacttttgctgttattagtttatccatatgcatgaaaattaggaaatgtacctctctacttcttcataataggaattagaatatatttggagccaaaagacagtgaaaatactgtataccaaaactcatggtaaaatggtacagccactctggaaaatagtttggcagttcttcagcaaggtaaacataattaccatatgactcagcaattctacttctaggtatatgcccaacagaagtgaaacacattcacacagatgttcacagcaccattattcacaatagccaaatagtgtaaacaacccaaatgtccaccaactgatgaatggataaacaaaacgtggtatatccatacaatggatattactcagccacaaaaagaatgtaagctacatgctaaaacatgaatgaacctcaaaaaagtatgctacgaagtcaaacacaaaaagctatattatataattccatttgtatgaaatagccaaaataagcaggttcatggaaacagacagtaaatgagtggttgctggggcttggaggaggggggtgtggggagcagctgctaatggggatgaggtacctttttgtgatgacctaaatgttctggaattagataatggtgatggctgtgcaaccttgtgaatacagtagaaatcactgaattatataccttaaaaaggtaaattttatggtatgtgaattatatttcaactttaaaggctttgtgggatgcagctatacatttaagctatttaatcttaaatacatatattaaatgattattactagtttgctggtaagaatactctctagtttacttaatattctttatttttctttttttggacagggttttactctgtctcccaggctggagtgcagtggtgcgatcacagctcactgccacctccatctctcaggcccaaacaatcctcccatctcagcctcctgagtagctgggaccacaggcacatgccaccatgcccggctaaattttctattttttgtagagacacagtctagctatgttgcccaggctggtctcgaactcctaggctcaagtgaccctcccacctcggcctttcaaagtgctgggattacaggcatgaaccaccgtgcccggcctaatattcttaccagtaagaattctatactagtttggttactattcttaatagtaaagatatacttgaaaatatctgcaataaacattgacttataaaactgtagcaaattttaaaagaaccaagtagaattctagaaataaaaaatctaataacctaattaaaatctgagggatgatttgacaatggactagacatagctgaagagagaaatgattaactggaaggtaagttggataataattacccttgatcatgtaattagtatgttcaccataagtgttgtgaagtgtcaaaatgtctgcaacttaccttcacaaagttcagtaaaacatgtctctctattgatataatgcatatataaacatgtttagcaacagagggagataaggtgaacatggcaaaatgttaacaactggtgaatctatgtaaagggcatatattcaatgtacaactgtatactcttggtttccaaacacaacgcgctattgtttaattctacctgggtgatggcttgttctcagtttccttcattggctcttcaacttttccttaatctctttgttataatcgcctaggactcaggccttcaacttctctccatgatcatgcttagcctgttggtcatttcatttcatctcatagttttaaataaccaccaaatcctaactgcctgcctccattccaatctagactccctcacagacttggctttcacatccaggtgcctacttggctatctaacagataattgaaattaacatatcaaaaattgaatgtctctaaattttctttacctatagccttcctcatctcagttgatggcaaggtcatcttgaatttctgttgcttggtccaatactttgagtttgtcattgactcttctttctcttataaatattttgtccaatccattagtgaatccctgaactaataacttctcactcaccctcactatgcccaccctgctttgagccatcataagctctcatctggatatctgccacagcctgctaattggcttccctgcctcaccccatgttcttgtaccagttcccctgccaaagcaagagcaatcatttagaatcaaagttgccgggcgcagtggctcacacctgtaatcctaccactttgggaggcagaggcgggtggatcatgaggccaagggatcaagaccatcctgcccaacatggtgaaactactaaaaatacaaaaattagccgggcgtggtggcgggcacctgtaatgcagctacttgggaggctgaggcaggagaattgcttcaacccgggaggctgaggcaggagaattgcttcaacccgggaggcagaggttgcagcaagccaagatcgcaccattgcactccagcctgggcgacaaagcaagactccatctcaaaaaaaaaaaaaaaaaaaaaaaaaaaaaaaagaatcaaaggtcacatatcattttatatcctaaacccctatcctaatttttattttcacagagtagaagccaaaatctctaacaattttttttttttttttgagatggattctcactctgttgcccagtggctggagtgcagtggcacaatcttggctcactgcaagctccacctccagagttcaagcgattctctgcctcagcctcccgagtagctgggattacaggtgcccgccaccatgcccggctaatttttttttgtatttttagtagagacgggatttcaccatcttgcccaggctggtcttgaactcctgacctcgtgatccacctgcctcggcctcccaaagtgctgggattacagatgtaagctgccacaccaggtctctctaacagtggtttttaagaacctatgtcatctgtcatctttgctccatgaccttgaactccgtctactctcccctttgctcacttcactccagccacaccagctttcttgccattcttcaaccacgccaaattcctccagctttaaggtcttttcactgacaattcctttatcacttaatccagtctgcatgatgaaaaccagtttcaatttgtctgggagcaggaccctggcattagtatatttttaaaatgtttcgtatgtcttcaaaataatcaggattattttagcctcgagttggtaattgttgaaactgagtgatgggcacatggagcccattacacgattctctcagacaaatataaaacaaaagaaaagcttctgtggtgattccagtgtgcagcagggttgggaatcactggcctgtaatccccaaaccggactgttttgcccataaataacagacatttctatttgaaaggctgtcttaatgaattaaaaagatacacagaagatgaaaaatatcaaatttattttctgaagtagaataaaaggatgcatttgaattcaccttgcaatatacattgacagtaaaaacatttgccccatgtccttcttgtttccatttaactcctaacactagcatctggaagaaagaaaagatttctggcccttggttgcagaacctaaaacttgcaaaagaatgtgtgaaatgtatacccccaaactcaatcctcctaggtcacctcagaggcttgttaacaagctccatacagttgaaagataaagagcttcttcctgcctccttatccaaaagctcttgaatagtcatttgcagtttgaggtcttaccacaattttcactaatgcttaacccatttgaggtacagagcatgaaagaatgaarttctcttctgtttcaaatgaactaatatctaaatctgaaattatcaaaggtgacatctttcccttttaaaaaataaaccacccaaatgaaagtattagtttgaaagatacttgctaataaacctgacaaggaaaaattaaaccatccccttttttgccataataatatgaatttatacaatgctaacgtaagtcttggggaagtggaaccacacgagttctatcaaaaatagatattgtgatgattagatctgatctgagctcccctcagaagactgggggacctgggaagactggcttatttgtgaactattcagactcatgctcatcaagatgttattgatgacattaagttcttggatcactgtgctcagatcttcatgtaatctagcgatcgcacgttttacctcccttaaaagaacactaatggaattctttgcttcaggttcctgggggaagtctttggttgactgaaaaccagaacaggacagagggatgaactggtctacattttgggtggaaaactccccccagtgactactagaaatgtgacttatattctttttagcagaatcagagttatttggaagaattcccagtagattgaggctatcattttcctctacatcagaagacactgggcccctagaagcaaaggagtgatgcagcttggctgtcttatcttcatctttaaaggaggtagaagacaactgttgatgggacagagtccagaaggaaggtccggccagaattggtgataagagatgagctgacttctctggagaggctaaatcaggagatgacatggataaaggagaaaaggaagatgctccctcagaagcagttgaaactaaaatgtgtaaatgagagaaaaaagatttatgcaacatacaaatgagagtaatagctaaaataattttataatgtaaaagcctatctggaagggctcaacataaataaactgcttagaattttaaatgttaactattcataataagcttaaaaaaacccaaagcaggaaactaagaaaatctacagatgtattatatatcaataataccatggaaatgaaactaaaatagaattatcaatattcatcttgactcatcttgactcaaaccctgcccaacatatttttacactaaacttaatcagagagagtagaaaagtattaaaccccattctactgactgccagcattttaagttggtatttaaagtagaaagtgagaaacctgtaacagattccttcaactttttaattttttttcctgtagagattattatggcaaaatgaactaccaactacaagtacccaaaagttagtgaaataaatatttttctgtctatagtgaaatataatcaagactgaagtccaacacatctgaaatctagaatactttagcacacgtatataatcattttttttctcaccaagaaactaagtgaagtaaaaagcattctaagcctttttttccataaaattacatatttgggaaagtttttacttcctttctggcaaaatcatattaaatctcccacactttattctaaatcatttcccaaacttttctgagaaacactgtgttccttcagatgttagaagatgttttgtaaaaacaggcttcatagtcaatacacctgggcagttgcatactgtgcctcccaaaaggagattaacagtgtccatcagtgcatttaaagttctgagaaatcttcggtaatttattcaagtgtcttccaagctttcttaaacatggaacttttttctcttcttcctggaatatctatttacattcacttatgatatgtgatacaaattggtggaatccagttctaaactctttgcaacgaactctgaacttactacttaaaaaaaaattccattgtaagtcacagaagagggaaattgatgcttactaatgagaacacatggcttatttttctacattattttattttgctttacatattcatgtcccttctaaactaaattggacctcctgtaaaaactatggccagggcaggcagcttctattttttgcttcaaagctttccatggcctatctccacttctcaggaaaaattccaatcacaaaactttttkggggatgaaatatattctcagccgatgcagcagcagggacatgaaaaggaaagcaggaacttcatcagcacatggtcaagaaaagccaagaacagttaggaatctaggtcaggctaatcgagacagactatctttggattaaaaaggtggaaagatggtagtgggcatgttaatgacgatagccatgagaagtaaaagttttgagaacctgcatgtctgaaaatgtctgtactctgcttttaggcttaatgatcrtttggttaaagaattctaggtcagaaatccttctttcagaattttgaaggccacatttcactgtcttcttgtttctagtattgctgtgcaggggttggarccattcgaattcttattcattgcatgtaacctgttttatctctgaagcattacagaatttcctctttgtttcagagggtttggaaacttctcagtgatgtaccctgaagtgagactattttcactcactgaggtcaactcaatcatgtgacctatttccttcagccccagaaaattattctaaatgatttaatcacttattttctcctctgtgttttctctgttgtctctttcaaaacctcctcttgtcagatgttagatctcttggactagtcttctaattttcttacttttctttcccattttccccgcctccatctttctgctttacttcaatgtagattttatcaactttagcttccaatcctctcattgattgcttatatttctgctattatatttttaaatttccaagagctcttttttttggttttcagaaattctttttgtaatgtcttgttcttgtttcacatactgtattctcttatttctttgaggataataagcttctttgaaaaacttttcctttcccttcatagtgtatgtttcctcaaaattatttttctttgtttttgtttcaatgttttatattagaagttttcttttttcagatgttggtaccccttgctgcccgcttatgtttaagtgtggaggattaaaagttgaaaggaacgttgagtgtgtgtatggcacttgtcaactttgagcttcagtgaatagtcatttgttggggaaccactaatatcagtatctttagttctttcctctaggccagttaggttctaggagaaaagttatcctatctcctacctagagggtaaaggtctagctaccagggtgctgggaggccagcagggggagggggctgcagcattcagcatgtggtttacatatcatcacataatcctgtggttttggtgacagtgcccacacttgtaactctacctagcatccctcatttcagagacctttcatctgccctctccagaaaacaaatcttcagactctgccatgggttgcagaggtaggtgggtattcatggttaattgttcacctgtctaaggacttaaccacttttcaaatgcctgttttgttttgttttttcttttttttagaaacaggaccttgctctgtcacccagactggagtgcagtggtgcagtcatgactcactgcagcctcaacctgggctcaagcgatcctcccgcctcagccttcctagtagctgagactacaggtgtgggccaccaatgcctggctcttttcttgaattttttgtagagaagggctcttgctacattggcaaggctggtctcaaactcctggcctcaagtgatcctcactcctcagcctcccgaagctgggattacctctgtgagccactgtgccccctcaaatagttgtttttaaattctctttgtttagcaccagatggagtaggttttataaccccgtttcaaatatgaggcaagggaatctgaaagaggctaaaaatctttcccaagaccacaaggctagaaaaggggaaagatgggattcaaattcaagtttctctgatgtcatagaatatgatcttaatcacaattctatacttctacacaattctattacattagaattatttttactgtattatagaattatgttaaattttgagtataaaatttagaaggcaggtaaccaggacagtgaggggacttgacatcttatctataataaatggttgatggatatgctaatctttacccgaaaagagatggtagaaggatgagaggctatatctaattatttgaagacaatcagaaaaccttaataataataccttccattactcttagtttgcaggagctagaactgggatcaacaggtagaacttacagaaaacagattttagcccacttcattaaaaaaaaaactttctcattgtcatggttcttcacacacgaaaataataatggtgagtgatgctcagagctcatgcacagcctgaataaccatttggtagggatatttgaggcaagatcggtgcatcactttacagaacttatctattcttgatgagattctaggacccggctgggcatggtggctcacacctgtaatcccagccctttgggaggtcgaggtgggaggatagcttgggcccaggaatttgagaacagcctgagcaacatggcgaaaccccttctctacaagaagtacaaaaattagttgggcatggtggtgtgtacctgtggtcccacctacttgggagactaaagtgggaggaccacctgagcctgggagtttgaggctgcagtgagccgtggtcatgccagggcgctccaacctgggcaaaagggtgagaccctgtctccaaaaaaaaaaaaaaaaagattctaggactcaaaacatatctgttaaagtactaagaaaagactctagaaatagaatttgggttccttctagtcagaaagaataacttaataagaaacattttaagtaggccaagacggaaataatatttgagtcaaatattaatatcattttcttttcttttttttttttgagacggagtctcgctctgttgcccaggctggagtgcagtggcgcgatcttggctcactgcaagctctgcctccaggttcacaccattcttctgcctccacctgacgagtagctggaattgcaggtgcccgtcaccacgcccggctattttttttttgtgtttttagtagagacggggtttcactgtgttaaccaggatggtctcaatctcctgacctcgtgatctgcctgcctaggcctcccaaagtgctgggattacaggtgtgagccactgagcctggcccccatgttatcatatatatttaaagatacgcagttaggttagtcacatatatatgctgtgactaaaaaacctggtatttaaattgatgccagtggttctcaaaatgtgactgcagtagcatcacctgggaatttgtcagtaatgaatttcttgggtcccagatctactaaatcagaaacttgggggttgggcccagaaaactaagttgtaacaagctgccaggtgtttctgaggtatgctaaagtctgggacccactgctttctactatttagccacctttcttttgccttatgactacaactgctgacgaaatcgcttatcattgtttacagttttgcagctttgagtcataggctacatgatgcttttgcttataaaaagccacttcatctataattgccgcataccaatttacttttgtttccaaacactccacagctgtacacatacttcaagctgctctccagggtgcatcctcactgcccatttagttctcctgcccaggctcactacagaagttatttgggtctcttgttaacattcacacagtctactcagcagaaccgaaataagctacaataaatcgctgtattttaaaatctcattgtgtgatatttgcacaccaattaatgttgggcttgcttgaagatagccctgatgaaattattccaaatgctgatgtgttaactttaacttattatactcataaataatattggaccagttaatcgtgatattaaaactttccattttaaaagcatttagaactgtgctgcaaaaataaactgagaaatttctagaaataattaaaaactcttatgagctagagatataaatctttctgtaggcagaaggtctttggtcaactaaacactttaaatagttcactgtaaaacagagaagtttttgtcattctccaattcacctctttcagttttcctagctgatatacaatgtctgtcaagttaactatatacaaattaaaatattctgattttgtcccatggtttaaaatgtaacactgaggggtcctgtcctcgggaccggtgataggttagctgggaacaggaggaggcaaccatgccgcctagggagttaccctggctgagcgargggttccagggctgggcactgggttgatctcacacccctcagtgaggtcatcgttactgcctgtggcctgcaagctaaggtgtgcgagcagacaccaggttgatgtctgcgtactcctggaccaggatcagtgcctcttcaatggaggattccgagacaggattcataatgtcctccatttgccattctggtagttgccggaaggccagcttttagagaaaggtaccaggaaactgacaatgcttccttgaattggcttctgtatttgcttcatcagtgtctctcatagtgaatattctggtgttcctatagatcaggttttgctgatttgggaaaataaagactatggatcaactaggaatactgttcatattaatgagaaaatgcttctgttagaaccttgttgaaggcacaattttgagttgatccagttcttgaactctgtagactctgataattctgaatctgttgttttgtcttttgctgatattttgtgtgtggcaaatgtcgaggaagccagttttctcagatttcaaaatagtatatggaaaaatgaagagaaaatgcaatgtgtccatcctttgcaactagtttgggatccagtgtcatctgctctaaaacacaacaaaccagtgaaaaatgatctgcttgtaaatgaagctgcaattaaaaaaaaaataggtgcccttgaagatgagctaacttttcttcactctcagattcctgcaattttggaaatgcaggaactgaaaaacagtacaaattctagttcctttggcttgaatgatgggcccattagtttgggacaaatgccatcatcacgggctgttcagctgagtggggagtcacacatatatatttgttctttactacatttatactctgttcctttgtagagtgtataataagccttaacataataaaaatcagtttccaagttcaatgctttcttctcctcctccactaccacttcctcctcagttttcttctctctagcttccatgttttcttcccatacaactaggatctaataatatttgtgactcagataatccagctactgaaatgaacaaacagcacccaggtgctagtatagtcatcatccaaaaagccacagaaataaagatgttctaaacatgttggatgttctagaggacataaataaagtgaagctctgtgcaattgaacagtcacctggtggcagatccattcataagaggaaaataaaaaattcatattgggatccgatgtctttaacgtctcatgcacttaagcagaaatttgcatttcaaaaagatgattcatttgagaaagaaaatagatcttaggagccttctccattttcttgtccagaaacttcaacatttggacatcacatttctcagtcagaaggacagtgaactaaggaagaactgataagcacaaaggctgttgaccaaggtatcagcaacaaaagctgtgtctacacttagaaggagagaccacagaaatatgtcagcctgtcttccactacacttcaaaggatcttctcttctgttaaacgaagttaaacaaagtctgcatactgcaatgtattagtggagaggtctgaaaagccttgattcttaagaagacttgtctctggttttggaagatccagcaatcaactggctactgatgataattagatgtacagatgtttttttcttgcatgttaatataattaaaagctgaacacatactttgaataatttttctaagcaattatgacttcctgagaagtcataggcttaaaagcctttgaatcttttaaaaattggtattgatctggtttacttggcttccagcaatttggagattttcaaagaggataaaattaaatttttttcattaagacagtcatagtttgaatcacataggttgagtcttctaaaacttcttgctgagacaataaattatttgtagaaactgattttgactgttaaatgttaaaagtagaagtatttaaagaatcttgacaagttttgtccatacttgctatgtaaatgtgtatgtctgtcatttttgtttcctttgtcctttactacatttatactctgttcttttgtagagtgtataatacatgagccttaaaaaagaaaaatttaacattttacacaaatgtttgtggcagaattatttgtaatagccaaaagcatatctatttctctatctctatagaagagagaaagctttatttctctctctctctctctctatagaagatagacagatctctatagaagagagagagaaatagatatactttttggtatactatatactatatactttttggtatactatatactatattctatttttctatctatctgtatctatatatatcttgttacaatggaattagccataaaaagcaatgaagtactgatatatgttacaacatggatgaatcttgaaaatactaggctaagtgaaataagtcagacacaaaaggccacatattgcatgattccatttatatgaaatgtttagaataggcaaatacatagagacaacaagatctgtggttgatgggaattagagggaaagaagaatggggagtgactgctaatgagtgtaggacttctagccagtgatgaaagtgtttctgaattagtggtgatgatttcacaactgagaatacactaaaagctactaaatcatacattttaaaaggatgcattttatggtacattaattagatttcaatttttaaaaagtgtaacatttggaaatttaatgtcattataaatatgctacataaaataatagatttaggaaaactcttaatcacttatgctaaattttaattgggaaaattggattaaagatgagttttctcacttacctataaagtataagctttgaaaattaaataggtgtggttttttgcctgtgaaacagcaggcaggagatgtatactacaagagttgctggggcttcctccctggagggatgatgaaggctgccttcaactctactctgcacggtgcttctaagccagcctgaccagtaactcaggctttgccaagacactttgcagaactgttttctaccattttcctcagtttctggctctgaagccttttacagacaaaaaggaaaagtgcatggttaatgggtcttgtgtgtgtgtgtcaagtttgatttctttcactttcaaaggtggactgaaaaacaggtatctagaacaagtactagtgaagaccatggtaaaaaaacaaagccaattggataggaaaaaaggatgaaggcagtgacaatgcctaccactatccaatatgagaaagtgtagaatactgaattttttcctccaaaagaattagaaagccaagaacagtgtagctgaacatacttactataaatgtggcttatgagaatatactgaaggctgactgccaccatttctagcttccaagaatctactagcttcctcctccttttcttgtgtacatgatcaagtatctaataacttgaaagaatagtttgagctacagataaataacttaaaatttaaactgaggggaagaaatgagctgttccaagaacagagttatttagaatcaagatcaaatgaggttgcagcagcaaatacatccctctcgtttggtacaaatattaaggtgtattaggtggctgccttcactttcctgatagttgagatccactaaaatatgagcatacaagaattttttaattttcctaacttgttatctccgaaaaggttataatgccagacctggacccttcatataaacaaatacttcttaaaacaaaactggaacacagacactatcttatctattctccatcaccctgagtgacgccaatgtccatggagactagccatccatcctggcctcactgtttcttgaattcctcaccgcaatgaccttcagccattcctctgagtagtccctagaacatgtcatcactcagtactgccctcctctgaaacctgttttccaaaattacttttcttctcgcttacttccagctctcccattctttttaacatattgatactttggcctcactgagagaacagatgcaacgaaaatcctcttattttctcccactctatcaacgcctgcctggctttgcttcctttcttaaccagtctagatccccattctccaccccttcaaccactttcttaccactcccttgctgccatgtattctgccttacctgctaacttgtaatccgggggtcagcaaaccatttttgtaaaggaccagatagcaaatattttgggctttgtgggacatatagtctctgtggcaattattcaactctgcctgttgcagcacaaaaacagcaaattagcatggttgtattctaataaaactttatttaccaaacaggcagtgagccagatttggcccagaggctgtagtttgccacccactgccctaattctattttgatttaaatatccacccttttcattcctgtgcccaggctgctcagtcccactggagaaaaccacaggcctctgcacactagggtggcaccaatcacgctctcccagcatcttgccagctccttcttccattctctacagtgtctgttctaaacctaagcgttctcttcatggtccctataccactccacatccctcaggcttggcaggtgacctctgatgagaagaaactgaggccattactcacagtgtgtggcacacaaaggctcaatacatcttatttattacaaataacaagcagtaacaacaaacccttccctcacatctgacacatcctttttcctccttccttacaggccctccagatggggtgagtctctttctttctggattcttgactctagttcacctctctcagatcgtgatccacctaaggctcctggctatctccctctacctcaccctctgttgtctaacacctctcacctggttttttacaacagcctttgaagtgttcctcacctccaatttcaccggccagatcagcatttcacattcctaaaacaaggtcattagcctagcttaagacctttactgaccagcactgtcttcaaattaaagttcaaatttcttaacctggcacacatagcttctatcatctgtctggcttaattttccagtgttttcttctaccgcttcttcatgcacattttccacttctgctttactaagctgcctttggttcacttattaaatattgaatactgactatgtgcaagctactgtgtttgctgctggggatgcaataagaaacagcagacacggtctcttctctcatgaagatgacatttcagttgggaagaaatattaatatattaaataacttagcacatatgcagtcaactagaatgacagtgtgatgaggataattatagggtactaagatagcatatggttagggggatttgaaataccctaggaggtcaggaaatcttaaagaagtgatattcgagctgacctctgaaggatgagtaggagtgaaccaggggaaggggtgggccgggagtgttctggtcagagggaacaaccgtggtgaagcaagatggtttatctgacaaattgagaaaatatcaggctggttagagaggcagaagctaggcttcccagggctttaagaacatggtgatcagtccactgtttaagttggggaatactagtgatcaaactactccagctgcttgatggagaactggagctccccagaatctctttgcttggttacaattctgcatcattcctttgcttggaatgccctttctggaaggataggcatttacttgttcctgagcataaaatgagaaactcctgggtacttttggaaacaactagagaggattttgagggttaggatgggactgaggttctgcagttctaaaggcggaattaaaaatatgtacacttgaataataatagcaaattttacattacacttatcctatcaccaggttccactctacacacttcgcatttgtaaatttattaaatccccacaatatctcaatgtggtagttccatcattatctttgttctatagatgaagatactgacctgcaagaggtcaggtgtcttgcctaaggttgcacatttagtgggtgggctgggattatgatcccaggcaatctcactccagagcctgtgctatcagcaactatgctattcatccaagtaggagcctagcttgaatttatggtgaggtttaaagggacattcgatttattctccgatctccctctaggactgggagctttgccatcctctcctatcaggctcatgctgcctcttctgtggaactaggcaactttcaaattgtggccctccgtcatggagccaagccatgctctgaccaattctgaaataatttggccttaatttatcaacagagaaatactgtatttcaccctattaagaatttgttaaatgttgttaaacctatcaatgtctctgtctctctctctctctctctctctctctcwcwcacacacasacacacacacacgcacacactttttcagagagagtctcactctgtcacccaggatggagtgtagtggcgtgatctgggctcactgcaacctccgcctcccaggttcaagtgattctcctgcctcagcctcctgagtagctgggattacaggcatgtcaccacacctggctaatttttgtatttttagtagacacaagctttcactatgttgaccaggctggtcttgaactcctgacctcaagtgatcctcctgccttggcctcccaaagtgctgagattacaggcatgagccacagtgcccggtcacacacacatatatttttacaaatcaatgttaaaatattatagttaagcaattacataagcaagttaagtaccacagcaatgactggaggaaaatattattctattattcaaccaatcaccttacctgatgttcaagaaatttcaatcagagggtcaatatttcaacatttataaaagcttctaagtataaaaatgatacaaaaatatatgtacaatagagacaatatcacactattttgattactatagctttaccgtaagacttgaaattaggtagtaggagtcctccaactttgttcttttgctttcaggattgttttggctattctagacactttgtatttctatttaaatgtaagactcagcttgtcaatttctaccaaaaaaaaaaaaaagccttctgggactgcattgaatctgcagagctatttggagaaaaattacatcttaacaatactgagtcttccaatccatgaacactgtgtatcttctcaacttatttaggtctttaattgctctcagaaatgtttcatagttttcactgcagaggtcttacatgtcttttgttaagtattttgtttttgaaaaatgctactgtaaatggtactgttttaatttcaatttctaattatttattattgttgtttgttttttgagatagggtctcactctgttgctcaagctggagtccagtggtgcaatcatagctcactgcagctttgaactcctgggctcaagaaatcctcccacctcagcctcccaaggagctgggaccacaaggtgtgcaccaccatgccaggctaaatttaaaaaaaattaaaaattttcggccaggtgcagttcgaccagcctggtcaacatggcgaaaccccatctctactaaaaatgcaaaaattagctgggcatggtggcacgtgcctgtaatcccagctactcaggaggctgaggcaggagaatcacttgaatccaggaggtagaggttgcagtgagccaagatcaccccactgcactccagcttgggtgacaaagtgaaactccatctcaaaaaaaaaaatttaaaaattttaaaatagggacagggtctccctatgttgttgatatggtttgactgtgttcccactcaaatctcatctcgaattgtattccccacgtgtcaagggagggaagtgactggatcatggggtggtttcccccatgctgttctcatgatagtgagtgaattctcacgagatctgatggttttataagtgtttgacagttcctccttcatgcactctctctcctaccaccttgtgaaaaaggtgcctgtttctccttccaccatgattctaagtttcctgaggcctccccagccatgaggaactgtgagtcaactaaacttctttcctttataaattacctagtcttagtcattgatagcagtgtgaaaacagactaatacagttgtccaggttgggacaatacattttttatgctaactatgtatcctgaaatcttgctaaactcacctactaggtctagtagcctgtttgacagactctttgagatcttccacacagataatcctatcatcttcgaataaaaacattttatttcttcctttccaatacatatgccttttatttatttttctggcctaactgcactgcctaagacctctaatacaatgttgaataaaagcggtgacagcagccatcctttctttgttgctgatctgagtggtaatgcattcagtcttttatcattaattatgtcagcagtacatattagggctttttaaaaaacattttatttatttatttattttggagatgggtgtcttgctctgttgcccaggctggggtgcagtggggcaatcatagctcgctgcagcctcaaactcttgggctcaagtgaccttcccacctcagcctcctgaacagctgggattacaggcgcatgccaccatgcctggctaatgttttaaattttttgtagagacagggtctcactatgttgaccactctgatcttgaactcctggcctcaactgatcctcctgccttggcttcccaaagtgctgggattacaggtgtgagccaccatatctggcctaaaaagtataccctttaaaaatatataccctttatcagcttgagcgaagttccctcttattcatagtttgcttaaattttttaaagattgtaaatgagtgtagaattttgccaaatgcttttctgcatgaatcaagataattttwtcatttccatctgattctgttaatatggtagattacagttacagattttcaaatgtcaaaccaaccttataattcggggaaaaatcccacttggtcatgatgtattattatttttctatgttgctggatttgatttgctaatattttactgaggatttctacatttgtgtaaatttttgaggaatattggtctataatttacttttcttgaaatgtctttgtcagattttggcattagattctgctagcttcataaaatgagttgggtagtccttccttttctactttctgaaaaaattggcacatgattatcattacttctttcttagaattcactagtaagactataggggactgaggttttctctgtgatgtgtttttgataatatatgtatatgtgtgtttgtgtatatgtgtgtatctatatgtcttttttccccagcttatttgacgaacacaaaggtcttcgcaggtcaattttagccagttgtcttatccatttcaactaaggcatcaaatctattgccataatgttgttcataatactctctcataatcttttggtaatctataggttttttagttatatactatctttaattcttagaattggtaatttgtaattatttttttgatcagtcttaatagggatttataaattttaacctttttaaagagccacctttaatctgtttttatttcatttattcttatttttgttgtttacttccttttactgactttaggtttaatttgttccttttttccaagcatcttaagttagaaccttctattactgatttttaaggcattcttcctttctcatataagcatttaaagctgtaattttccctctagcaatttcctactagttttaatgcatctcacattttttgattttcattatcattgtttgaaatattttctcatttctcttcagatttcttctttgactcatagattatttagaagcatattgctaaatttccaaatatttggagttcttctatgtatttcattgttaccaatttctaatttaattctgctgtggccagagaccatacttttttaagatttcaatcttttgaaatttattgttactttttgtttgttttcataccgcactttatttcaaaatagtttttgtttttaatgatgcagtatgtgttctttcttggtgaatgttcattttgcacttgaaaaagaatgttaaaaaaaagaaaaataatgtattctgcagtgattggatgttgtgatttagagatttgaagtagggtaatgtttttgaatagttattcatactttctacatactcatggatttttatgcctagttctatcaattgctgagaataataaaatctcaaattaaaactgcagatttgtgtaatttctccctataattctgtcagtttttgcttcatgtatttttgaagttcttttattagttacatacacacatttagttgctgtatatccctcatgttttggcctatgtatcaatatgaaatgttcttttttagtaataatccttgtcttgaagtcagttttgtctggtattaatatagctactcccactttattatgctgcttgcacagtacatatttttaattgttttactttcaatcaatttatgtctttgtatttaaagcacttccctcatagatagcatatagttgactcttgcttttctatccaatctaaagtctcttcctcttaattggaaagtttattccacttccatttaatgtaattattgaaatgcttggatttaggtcttctattttgctatctgccttctatttgtctgtttttgtccctcctttcttcttttgtgttgatcgaatatatttttactattccatattaattcctcagtaggactttggctataccactattctttctacaagcgtaattaaatatgcatgcttaacttatcgtgagttaatcatagttaatactgtactatttcatgtaaaatatagaaatctttcaatggtataattccatgaactttccattcttggtgctatgttgcaatatatatctacatatgttttaaaccccaaaatacagtattataagttttgctttagttacatgtactttttaattagaagaaaaatatgcatagtattttatatttatccacatatttataatttccagtgctcatcatttgtttctgtagattcaggtaactagcataatttctcattaggctgaaaataatccttcagtgtttcttgtagtatggattccccgatgatcagtttttattcacttgaattaagtcctgttttcatcttcatttttttggttctgctagatatagaattctgggttaataggttttgtcatttaacacttaaaagatgacttttcattgtctcctggtatacactgcttatgatgaaaaatcaggtgtcattcatattcttggtcctctgcatgtaatatgataattttgcttgctgctttcaagattttgtctctggaattcagctgtccaactatgatgtgtctagacatagtgtttttttctttaattctgtttgaaattcattgggcattttggatctgaaagtttatttctttcacacatttggagaggtttgagcattgtctcttcaaatgattttttctgacccctatgtcttttcctcaccttttagaactccaattacatcagtgtcagactgcttgacactgtttcacaagactgagtctctctgtttctttttctttaatctttttctttccatttttcagattagatgatttctattgatctattttcaaattcacttgctctttctttcatttttaatcttctgctaagcccttccagtaaaattttcatttcaattatttatctttcagctccagaacttccatttaattcctttttacagttttttgcctgccgagatgctcctttctattcattagttgtgagtactttaagttcttaaatggatttgtaatagctgcttttagaatttgtctgctaattgcaacacctgggtcatctaagggtcagtttctactgactcttaatatcttcattatgacccatattttcctatttcttcaaatgcctagtgatttttaaaattttatactggacatttggatgatacattgtaaagtgtctggattctgtgatactcctctaaagagcactgatttttgttctggttggaagataacttgcctggccttttcaaactccagtaagcaaaagctggtctcatctcagttcttttggcttccagtaggattttcttttctggtcagactcgctggggtccccctatacgtatagtttagtggtcggtcaagaatttgggaagagtttatacacaaataatgaggtttgccccttctcagtctcctcttttaggttttcattgataactttccagcttccctgccagaactgaactctcttttgacactccaggctatgaggactgaagagtaccctcagaatcttaatttcagctactgtatttttcagctctacaattttcatttgatttttttttttttgacacaggatctcactgtgtcacccaggctctcactgtgtcacccaggctctcactgtgtcacccaggctaaagcgcagtggcatgataatggctccctgtagcctcaacctcttgggctcaagtgatcctcctgcctcagcttccagggtagctaggactacaggcacatgctaccacatctggctaatatgtatattttttgtagagatggggtctccctatgttgcccaggcttatcttgaactcctagcctcaaagcattctccctgccttagcctcccaaagtgctgggattacaggcacaagtcactgtaccaggtccatttgatttttaaaatagatactagtattctgatgaaattcttcatctttcctgtcttcttgatcatattaatattaatcatagttttaaattacctatcttatacattcagaatctagattactgtggatctgtttctgttgtctacttttctcctatatttctggccgttttttcatatcctagtatgcttggtaactttttgttgaaagtcaaaattttcaatgaaaaattttaagagctctctggaaaggattgaattgtcttctggaaggcagatggaatacaagtcaatcactttgctctaggtgaaataggttttattaatagtatttgtgagggctgctcaacttctcatttgtccttactcctagagtatagtcctgaggcctagggtgtaggctatcaggggtcccagtggaaagcctggagtgtttcccatggctcctcccatttgctatatcctgaactccaacatttgtttccttgtatcatcagaatcatcagaatctctgcatagctcactggcctcttagaagctgcttcccatttagtttcttggcatctcatcctgaacgcatgtagcttagcagtaggcaaatgttttgaaatgacaaaaaggttttaggatttcttctctgtgattccctccctctggaatacaggcccttcaagtccctgacaccttgaaagctcaaactcctaccgtgtctcccaagctcagtgagactgcggaaagcctacgcctctgatttttcttcagcttctattatcttgctctgagaattggcaaatgactcaaggtggggaaactaaggtgactgagggactcatctcaatttccttccccctgggatcttaacctattatgtattttctacttggttgtttgatgatgacttcaaaccagcttttaataatttcctagatttaataattatttttggtagtagaattagatcaatactatctattataagcagacaaaaaagttctccttgttaaccagttttagaggaacttctcgctaaattttaagtgtacttggtacactcacagcgaccaaaaagtattttcaatgatctttttgtggtattcatgaaataaaaaaaccaaacgtatcaacttcccagcgacagccaggcacataatccatcagagccatcataaccagtactaacaggtttccacatcagcagtctcagaagaaaagttaattggttgacaaaactgagaatcagttttactacctttaggctattcagtatcaaaaaagtcttgaaagagcaccaaggaaaatcttttgttactcattgaccttactaataccaatataaatttctttaacttcaacatggtggcttccattgtttatatttatatgtacttttgatctgggtttgagtctgtttaaaagattcacgttaaaatctttattggccagacacagtggatcatgcctgtgatcccagagctttgggaggctgaggcaggaggatcacttgaggccaggagttcaagaccaacctgggcaacatagcaagaccccacctccacacacacaaaaataaaattagccaggagtggtggcatgcacctgtagtcgtagctatttggaaggctgaggggtggaaggattgcttgagcccaggagtttgaagctgcagtgagctatgattgcactgattgcaacagaacaagaccctgtctctaataaaaataaatacatttaaaaagctttatatttatatgagttggttagcactattatatgtaagaaccaataaaactactacttaktctttgaaaaattcataaaaattattattttactagtaaactttaaagtagaaagcataattatataatagaggatttagtaactgagagccaataacctgaaatctcaactggctttatcctttattacccagtctaaacaatactgcaatcttcttaaggttttttatatctttataatataaaatatatataatataaaaaagacaagatcccctgccccttttgtgcaatcagtacacagccctttttaaaggggcacacatacacccgtgtgtatgtgggggtgtgtgtatacaccaatacacataataaccaattctttttcatataatctcttaataagtaacctacatgtctaacagaaagcacttacttcacactagttccttctaatttggtctgcaccaaaattgctcagatcttatattcaaccaaggactcagaacccacggtgatgaattatctattagccctttaataaaagggggactttcccaactaagaagtatgtgtatggcatgtacattttaatatcaatgatgaagagtgaaaggagggaacaaaaaaaggagacagaaagcagagaaaagtaaaataatgcttcaaaagaggttttttgttgtgtgtgtgtgtgtgtgtgtgtgtgtgtgtgtttggcagactcaccccgtgtggttgtcttgaggattttatcatccatctgaatgctggattgtgctggtttctggtaggccttgttgattacaatctccttcactcggtcaaatattttgaatgagggagagagacagagtgtttctacagaggcctggttatggaaagtagaatctgactttgatacccttaagtcggggctgataaactcctctttacttgaccaacatgctggtaaaattgtcaatgttttaagaccttctgcagctgattgcttttctaaaggtgtttccaagaggttttctgtgacagtatttgtaaagataccatctgatctcttgtccaaactcacatctctctgcccagaaggactattttctgagagagtaggcacagcatctataaaagaacaaataagagctataatcaaaaaataaaactgaaaatactctatttcaaatctgttataattttaataaataggattttttaatgtcataacagaattctttcctatttagccctctgctttcttactatgcttctatattctgcctatttaaagtacacccaagctataattgacgccttagtcattttggtagctgccttctccctctctcctcactgaagcacaaagcaaggaaagcttcaaataacttgtctttaaatatttctcccttcacccacttatctgtcgctgaaaccaccatatttttagtactttccaactttcatcttttttacaagataaactagggaaaatatgccacatcatactggtctatccttacagaaccctcagctacaaaaaaaaaaaaaaaaaaaaaaaaaaaaaagaaagaaaaagaaaagctttctccccaaaaataaagaatgtcttcttccacacagtttctatatgcaaggcacattaaagaaactcagtactttaggtagaagcttaattttaataaatgctttgtctatacggaagaaaggaaacaatctttcagagctgttctgacaattagtaaaatataagttccactgggctggagatctttgtccattctagtggttaatatcaccaaagtacataaaatagtccctagaatataacaaacaatatttattacaaatagaaaacactgaaggaattgtaagaaactgaaactgaaggtgggcctgatccaggaatgtctattgaatctacgcattatagacctggtccgagtttctagatgcaaattcttaggaacaccctcagcgccagggcttgctctgtaacagctccatctgaaccgggatacgaaaagaaagaccgttatttttatgaggttgtgttcatgaaacgagaagcatgatgaggtagaagagggccaaaggaagaggctatctttcgaagctcccaaaagaggacgcagaaattgtgtgattcactattgagtgattatacatcacaatgtatgtcataaaatacttcagaatgcacatttacatgctatcctcatcacttttgggctctgagttattaaagaaaagaaacttttctttgtctctataaagcttccttttcattttcatctgcagttggaggttagccttagcaaaaatactgctggtatgtaccacagaattaagacagttcaagaaacttacattgctatcttcaccagaaattccatttttcttccatcctctcatcttttaaaactcaattcaagtatcactttctctttaaagcttgccctgacccttttctttcctcaccctatcctattattgtctatcttcacatgtcctgtttgaagctctgtgagtaattataacacttcatatctcatttatcttgtcccctacctgacaaaagtctccttgaggagaccttgcaaggagtcatcttcgtgtctcagcacctaacagtgccattcccagaggacaggttcaatgaatgctcattgggtgcaagggaaactgaagcacaaagatgaaagaaaaagtaacgccttcatttttctaaactgaatatagtttaactgcttaataatgattaaaggaaataggtagatgaaaagaacctctcctaaaatattcctaatttgcatatgactgaattatatttagatgattgaaagtctgttaaaaataccaaatataagccaggcgcagtgcctgtagtcccagctactgggaggctgaggtgggaaaatcacttgagcccaggagtttgagaccagcctgggcaacattgtgagaccccatttctatgaaaaacaaaacaaaacaaaacaaaacacccaaacgaatatattcctagttgagtactagattactagatttatggtatttcaaagtgactttgcatatcaccacatttacatcaaatcattcattaaaagtgaattttagttaaatatttttccattgactttcattttacatgtgagaaaaacaagacaaaaatgttttgctctatatgtaataagatcatcttaaaatttagcaatattaaactaggacatttcagaatgaccagaactttctgatgaaaatattcacaatacttaatctaaatctcaaaattcagatgcataaagttgtctgtatggctgccattttaaggtttagtaaaaaagtttaaaatgaaacaaatgaacaaatccttaaaattcaatgaagcaaaccagacagaagtcattccatttctacccaccccctttcccaatagcccgggaagaataggctgcaatcttttggttgcttggacttttgctaaagttgctaactttttaaatgaatcaaatactatgacctagaagaagccaaatgaaaaataatgatttgaaatggatagtacattatttcaaagagaaaaatgtttacttatacagaaagctaaagagtcttgaagattctagaaagcaagttgtaccaggtttctcttccatcagccttcatccacccctgctgtctatgcaatgcgtcaaattattcctctccaattcaattactactttatagtttatatttgaaaatccttcaaaaattgcctcttgtgtcagtgagaaagtccaaattccttgggtttcaaaggcccttcattgcttactttctgttgctattcaacaggaaacaaaccctcagtcaggccattctccctgtcactccacacgccatgagcatttaggtccatttagcttcattctccatgttaacacagggctcttgaccatcaccactgattccccatcctggaataccctcttcttctccacctgtttaaatcctattaaaccctactattcctcaaataactactacttctagaagctatttccaatcatgtctaccactctatcttaatctctcccttctctgaggtaatatttctataaactcatttttcacttaattatatgctatttagtgcctatcacatatcatattaagttcctgcattctgactttataactgcatcatgcttttgcatataggaggtgtcaaatgtttgttaaatttaactatatcttaatttataaattatttaatatcaactttatatgttgattttctgtataacaatgtatattgtatttgacgcctaaaaataggaatggtccatcaagaaatcattgttagtacccactgtttgtactgaactgtattaaatgcaggagatatgcacaagcagaagtcacaattcctactgtcgatgaactaatgccaatgaacgatgaattcctattgtcaataaacaaagtatggattatgtatatatagatagatacatatacacacactaacttgtgtatatgtacatatatacacactaacttgtgtatatgtacatatatacacacactaacttgtgtatatgtacatatatacacacacaaacttgtgtatatgtacacatatacacaccggtgtatgtacaataaacacataaaaattaataatrtaagttaccagttcgatttcacagtgtctagaaaattgtagcctcccaataaatgaatgaacatgaatatatttgctcagcaacaatttgaacatgttttagtttggataccccaaaaggcagacttggatgcaagtaatttggccagtgatttaaagaagcacaaacgagggaccgggaaatttaaaacaaagaagggacaaaagtcaataaagagtatatgaacaagcaatttactgttgtgggaaaatgagagccactcctgttgggttgcctcagaactgtcctcccagggatgagaaggtggaatattttttcaataactcttaactatcactggttgagggttgactctgggcattaaatccctgcaacttccaggctaccctgcacttaggatgaacaagtctaagggctctggagaaagctccggggtggagaagaagagagatacaggtactttcagtgtaaatggaactggtcaccaaggctgcagtagtactcagaggaaggccaagagagtatggggtggagcatcaacagtaccatctacaagatataatcactccccctcctttctcaaaacccattgaaatgacagaagtggaataaaaaggcaccaaccagaggggaaatagaacagaagagacaacaaaagataagaaatgtcaacaaattttgtgaaaaggaaaagtttgtggaggagtagaagcagcaaaacctaaatgcctgtagaggggaaagccaatgtgatggaaactgattctcacaacataactccagaaagttttaggaattggggactgggtatcttagaggtctgagaactttgtggctttgttttggggacagcatcttcattcaaagatagttgtatcttgttaggtagacaaagagggttgttgttgttgctcggaaagttaaatatgtgtagaatgtgtatgatgctgagtaggcaatggatgggctgtggcagctactgagctgctgtgtcagcttcatactcacacccttctatactcttgctttgtgatactggagctgtgacaccacataccgtgttcatactttgccagttagctttttgttaggtgctgccaacaagaggtgctagagggagatgggaaggttagagtaggaagagaggacttgctccttcctgtttgtcctctgctcctgactgcaacacccttgcaacgcttctccactccatcggtggagaagatagaaagaatgcgttcttgccagtttgcatttttccaacacttgtagaagcaaccttatcatactctcttaacattagcacccgccaacaagcaccccatcctaagaggcctgggtcaccaccccacagagccccttcttcaagcttctaaatttgaataactcctccagcgttagggctggtgacttatccctgcagttgctaccttgatcataccatgggtatrtgtatgataaacacataaaaataactaataatataagttaccagtttgatttcacagtgtctagaaaattgtagcttcccaataagtgaatgaacatgaatatatttgctcagcaacaatttgaacatgttttagtttggataccccaaaaggcagacttggatgcaagtaatttgcctgtacccatgatatccttggatgcaagtaaatcagcctgtacccatgatatcctggtacaggctgagtgtcccatatctgaattgcttgggaccagaattgttttagattttggactttttcagactttggaatatttgcattatactaccagctgatcatccctaatctgaaaatcccaaatctgaaatgctccaactagcacttctttgagcatgatgtttgagcatcacgtagtgctaaacaatttttggattttggagcattttggattttcagattaggtgtgcttaasctgtactctttttttttgccctttcagtttttaatacttaatgtttttgtattaaattctstgtattgtatcatatttttgtgataatggcagagtagtttcaagtggaccaactcctctgtagataacagccagaaaattaaaaaatgtaaagaaaccaataacctgaaggcataggagggggaccaaaaataggcagaaactggagagggagaagagttagaaggcggagaacgctggggaagtttgctgtttttccaacttgctaccctgaatccagccagctctacagtaattggctaaaartgggctgaaaccacagtcttaactggcctgaagaaccagaaaacaagattcagagctaccacagcactggaaaggggagaaatctggttaaaaaacaaaacaaaacaaaacaaacaaacaaaaaaactcagagaaaaccatacctgttatcatcatagtcaaattgctgataatcaaacataaaaatgaaaatcttgaaagtacccagagaaagatgacccattctatataagggaagaatgagatgaatgatgactgacttctcatcagaaacaacagaggctagaggatagcagaatgacaccattttttttaatgctgaaaaaaaactgtcaatgcagaattctatatccagcaacaatattcttcaaaattgaaggcaaaatcaaaacattgtaagataaacagaaactaagagaatgaattgcccgtaaaactttataacaagaattgttaatggaagtacttcgggttgaagacaaagtacaccagatggaaagttggatctttgggaagaaataaagagttctagaaatggaaaatatataggagaatgtaaaagattgtttttactcttaattttttaaaaataaaatatatgtaactgtttagaaaatgtaacaatatgtgtggagtgttataacaaatgtaaatatagtttaaacgactatagcagcagtccccaagctttttggcaccagggactggttttgwggaagacaatttttccacagaacagggtgtggtggggatggtttggggatgaaactgttttacctcagatcatgtggcattagattctcataaggagtgtgcaacctagatccctcgcattgcagttcataatagggtgctcctatgagaatctaatgccgctgctgatctgacaggaggcgaagctcaggtggcaatgctagcccacttgcttctcacctcctgctgtgcggcccagttcctaacaggtcacagactggtaccagtccgtggcccaggggttggggacccctggactatagcataaatgatgagatggtaaataggcctatatggttgcaatggtgacacaatattaactctaaatagaccgtgaatacctaaaggtgtataatttaatcccttggtataactaccaagtctaataggtaaagtggaattctaaaaattattgacttagctcaaaagaagaaaggtaggtaggaacagaggaaccaaacaccgacaaaacaaggagaaagtaatagaaaaatagcagttgtaaagccaaccatttcaataaccacagtaaatgcaattaacaggcacaaattttcagactggataaaaaagatctaattatatgctgtatacaagagacaccctataaaaacaaaattgcaaatgggttgaaagtaaatgctttataaagatataccatggaacgataagtataagaaagctgagtggctataataatatcagataaaatacactttgagaccatggtattagtagagataaaaagggatatttcataatgacaaaagggccaatcatctggaagacacaaacataaatgtatatatgcctaagaacagtgctttcaaatacatgaagcaaaatctgacggaattaaagaactagctaggcgcagtggcttatgcctgtaatcccagcattttgggaggccaaagcaggtggatctcttgagcccaggaatttgagaacagcctgggcaacatagtgagacctcatctcaaaaaaaaaaaaaaaaaaaaaaaaaaaaagaacctcaagaattaaagaactggccaaatccaactaagtcatatttagagagtttaacatcctttgctcagtgattgataaaacaagtagacaaaatatcagcggggatctagaagacttaacatcaaccaccttgacctaacagacatttataaagctcctatggcagaaaacacattttctttgcaagcgtgcaggtacacatggtctattcactgagatggtccatgtgctggaccataaaccaagtctcaataagctttaaaagcccaaagccttctattaggttctctggacacaatggaattgaatgtagaaataacaatgtacttagaagaaactcctaaatatttggaaatttagaaaacatacttcaaatacccatgggtcaaaaaagaaatttatacattttaagcatgtacagtttattgaatggtaattatacctcaataaagctgctaacctcatagctggtgtattttttggtttcctgaccagattctgacagatataatgctttaggaaaattattgctgtatcattcattgcaattctctggggttgggagataatagaaataagaaaaccaggagaccaatgaaataattcagattgtaaggttaatttaataccaaaacaagtactaagcaactacaaatttaggcattgctttaggtttagaggtataaagatgtgtaagagattcaaacaaatgatgtctgaaccaagctaaaagcatgagaaaaaagtcaagagaagaaggacacaaaaatttccaagtaaagggaacaatttcagcaaagaaatgaaggctgtacacaatgtgctgtgtggtagtggcagggcaggtacaaagcattcagcgttacgagtgcacagtgcacacagagagcagaggagctcaatctagagacatagacagaaccagggctggcagacgtcttgacagacaggattgatgagaaagaatgaaactgaaatcttaagaccatttctttgaaactcattcctcttcagatgcctccaacgaactttgctggctctcctcctatctgtctaggcaatcttctcaacattcttcctggccctgtttcctgtgaaatgtaaacagtctgtccttgactttcctcttctgcctttacaatctcccaggatgatgtcatctattattatacttacactagatctagatggtcacctgtgggcaagtaattcacacatattaatcctgaaccctgacctctgctgatttttagccctaaatatctacctatttctgtgttcagggaggtcttatcatcctccagcctcctcatccttgggtgtttgctttacctctgttaatatgaccatcagcttcccagtcactcaggttattttggaactatggttgttaccacaacttctaagaggtctctccagcttaccccctcagtccactctacacagcccagccagagtgacctttctaaaatgaaagtcagatgttatttctccccaatacttcttcaaattatttaacatggtttacaaggctctgcataaattagtccccatttacctctcttgcctcatcttgtgctactattctaaagctgtatgatccagctatacttctttcagtcttcaaattctatgctccctctcagcactaagccttcacccgtgctgatatttttgtctgaaatgttcctcgtctctttatatcgaactgattttcagcttccagattcacgtcccttaaaaaaacatacatttccatgcctctgtgtttttgctcatgctgttccctcagcctagaatatcctcttcctcacccttcttctccatcaaaaatggtttcattcttcaaggtctcattcaaacacaacctccttagtgaaatattttatccttcacgttaaaatgaatccattttctctgctattacatagtacaatgtgaatactcacatttttcattgatttcattatttcaaatattattcattcatttgacaaatactaagtacaaggatgtcttagacacttttataagctctggaaatacaggggtaaacaaatttattatttataacttcttatatgtttatagaactgtcacctatagggtactgcaaacccctcaggtcacagatcctattcaacttgtttaacccataggcaactagcagagtatacctgtattcacttgataagtgtgtgttcaatgaatcataagctggatgatttggtcattaaaagactcaactgtagagaaaggagaggtctttatttagtccctttgatcccagagatcaagtgacttgctcgggatcacacaatgattaaagagcagaactagaactagaatcccagattcccaaatcccaaatcaatgttatttactaggggaataaaagaaggaacaaaaaaagtatgggagaatcagctgcaccaggtttttctttactaacaattctaacagcttgatgtgtacatgttcataacgtaaagagactcgatttcccctcgggctcactccatttgtccctggtgctactcctggaggtgcaggaccgtgggaatgggaatggagttgagtcagcacacagctggcctctgtatctgtgctgcttgccttctcccaggaagatggctttgggtagatgctttcttgaatatatataatgcagcatttgtggaaacttttctgaagtccacaagaacttgaggagatttgatggagaactgcaatgaatactgtctttttttctttttaaggggttgggggcaggttctcattctgtcacccaggctggactgcagtggtgcgatcatggcttactgcagcctggcctgcccaggctcccacctcagcctcccaagtagctgaggaccataggcacatgccaccacatctggttaattttttttttttaattagttgtagagacgagctcttgctatgttgcccaggtagtctcgaactcctgggttcaagtgatctacctgcctcagccttcaaaagcgctgggattactggcatgagccaccacacccagctaaatactgtctttgtatgtttgaacacaaacatgtaaatgtatactctgtaaacactaaactgattgtttcatgaggactttccaacctttgctgggagagaatttctctgaattccactgaaaaggcagagaggagtacaggtgaattaatgtagttggcttgctttatctgccttctcattttctttccatttgaacctgaatgtcaaagagctttgttctcgaggatctatccagctgactcctagacaggaagcccagtattgaattatgagactatacccagtattctttatcatacagtgcttttatacctgccaatataattgactgatgcaaaatgggactttgacacatgagtctcattaaagctggcttgattattcttgacagttatcttttaggtatcctttagtttgttccctatgtaagacatcaggctgcaaatttaaatacagactatcatgaaaatgactgaagtaggaaaaacaacaaaaacacctccatgctttgagcctaaggacaaaagagaatagctaagctgttaaagtaactaagaatacttttgccagtttgcagatgacgatgaaatctgttgaaagagaacttcagatttgctactgagttaagagattttgcctgcagataggaacattccaccctgctacctctttttcattttgcaataataccattgcattgtttcaggtgttacaatcattgtatattattttgtattcattattgtgaatcttagtagtggggttatattccaacagagttattgctatgatcttgcccttgttctgatacatagtatccaattacagctacaaagcagagagctggcaagcaggacaaaagatggatgccaaaatatgtctttctgtagtttaaaaatgtgtaactgaaggagcttctactttagtaattaagtcaatcagaggaaatagaatctgaaggtaataataagaccattttgctaagaggccacagttataaattaatatagaggggtgacttaaattgcttattaaatgtattggtttaaaagacaagcaaccaagttaaaatgaatattgaatgtgcaacttaaataacatgcttgacatgaaaattttaatatattttttcttacagtacatgcataaaacctaaataatcataacaagttagaatagctataatctccctatgattgtgtgcgtgtgtgtgtgtgtacacagttgtaggtcctgagagttttatcatatatcatgacatataattgtagtgtatattatactcaagtattaaaataagaaaacatagttttaaaacacagtgatgaaatatggcaagcaccatttactaccacttcaatataaacttgaaataatggcttaatttctcatggacaaatacagatctggacacatgtaaaggtgctttttttcatgtaacttgcttcttctataaaggtgctttttaaaaaaataagtgggtcagctaaagactttcctgccattaaaatggattataatgaatggattataaaacaggtagagggtgctcattgttaaattttataccatagttaaggttccaccaattataaaaaccataatttccctcaatagattatagttataaaaatgaaagctgaaaatgtctttgtgaagctggcaatctttatctattgcaacgtttcctgtctttccgctagtgagagtttcaacggagcctggtctctggtatgtggatggtctccctgctttataaagcatgccaggctgaacaagatgagcaggtgcctgagggcacaagagtatgtggccatcaggcaatgacaataaaaccctacaggtgattatagaagactgaaaatgtaagctaaattgggtcagaggtttaattctgacrtgaattaaatatatggaatgcttgaaaaggtgcctggcacacagcaaactctatttagtcatggttattggtatcatgaaacagtctgaagaagtgggattacagggagttcctgccatggccctgactggaagtggatgggaatgtcaacaaaccaggtgctctcccttccccgtagatactcctgtatttatgatctgcaagcatgatgcattctcttgaacctgccaattctaggaaggggggtatttgagatcaagagaactggtatactatgtaaatatgacagtgatatgaagaactataactctcagacatatgccctattagatatacagaccactaatacacttttaaacttcgacacagagtaaaaatcacgtctaagtctgcaacactgaaacaagcctttaaatatcatttcgatcataaattcagataaagtattatttcttgtgaaacataaatgttctattattcaaaataagcaaaaaagacacctattaaaactttaaatattacagtataccagagaacatgcccctttggaaacaccttactgaatacctaagatggcaaataccatttctcttcttccagacagaggcagttgtatggtccttgttcttacagctctttccttatatttttataatatgacttacaggactatactataatttatctactaatgtttctcttgctttttttattcccatgccttacacatattttcattcatgcaacaaatatttttgaggacagaccatgtactacaaacgtgcccaagaatayaaaagccagaatcattaggccagtgaagcctttaaaccttaaaattattaagcacagaagataaaataactacagatatacttaatgtggttagagaaataaagtatttctgaaagatgtgcaaggtataagagattataaaaacaggccaggtgtggtggcttatgcctgtaatcctaacactttgggaggctgaggcaggtggatcatgaggtcaggagttcgagaccagcctggccaacatggtgaaaccccatctctactaaaaacacaaaaattggccgggcatggtggtgagtgcctgtaatcccagctacttgggaggctgaggcaggagaactgcttgaacccgggaggcaaaggttgcagtgaaccaggaggcggaggttgcagtgagccaagatcacgccactgcactctagcctgggcgacagagcaagactctgtctcaaaaataaaccaaaaccaaaaccaaaaacaaaaaacaaaaccaagcagatttaacaaagatccaaatagaacttctaaaaatgaaaaataacaactgaaattttaaaataaattggtgaacaagagctgggagaattcactaccatcagacctgtcttacaagaaatgctaaagggagttatttagtctgaaagaaaaaagacagtaacatgaaagaaaaaaaaaaaagaaatttgaaggtataaaacccactggcaaaattaagtacatggacaagccagaatactctaatactgtaactgtgttgtgaaatccacttctaactctagtatgaatccccaaagacaaatctatcaaagacaataatagctattgccatctgctaagagatgggtaatataaaatatgtaaattgacacatacaaaagtcaaaatgtggaggggataaagtgtagaaagtttttttcattttttctttgtttctattattttctttgtgatctaaaataagttgtcatctctttaaaataacttgttatatctataagatgggttttttttggtaagccttgtggtaaccgcaaggcaaaaacctataatagattcacttaaaatgaaaagcaatgaattaatacatactaccagagaaaatcacttaaccgcaaaagaagatagaagttacaaaagaaccagaaagcaagcaacaaaatagaagtactaactccttacttaacaataataatactgtgggggctgtgtgtggtggctcatgcctgtaactccaggactttgggaggccaaggcaggtggatcacttgaggtcaggagttcgagaccagcctggccaacatagtgaaaccttgtctctgctaaaaatacaaaaaaaattagctgggtgtcatggcatgcgcctgtagtcccagctacccaggaggccgagccaggagaatcacttgaacctaggaggcagaggctgcagtcagccaagatcacaccactgcactccagcctgggtgacagagcaagactagtctcaaaaaaaaaaaaaaaatactgtggactcaattctccaattaaaaggcatagaatagctgaatggataaagaaataaacccaactatatgttgcctataagaaacctacttcacctataaagacacatatagaccaaaagtgaaggggtagaaaaagatactccatgtaactggaaaccaaaaaagagtgggagtagttatacttatatcagataaaacagactacaaaccaaagtctgaaaaagagacaaagacagtcactatataatgatcaaaggggtcaattcagcaagaggatataacaattataacactgaagctcccaagtataaaaacaaatattaggccgggcacggtggcttgcgcctataatcccagcactttgggaggccagggcaggcacatcatgaggtcaggagattgagaccatgctggctaacacagtgaaaccccgtctctactaaaaatacaaaaaaattagccaggcatggtggtgggcacccgtagtcccagctactcaggaggctgaggcaggagaatggtgtgaacccaggagggggagcttgcagtgagccgagattgcgccactgcactccagcctgggcaacagagcgagactccatctcaaaaaaaaaaaagcaaacagtagatctaaaaggatcaacagactgcaacacaaataatattagaggactttaataccctattctcagtaatggacagatcatccagacagaaaatcaacaaagaaacatcagagttaaactacaccctagacctaacaggcctaactgacatttatgaaacattttacccaactgctccagaacataagctcttttcttcagcacaagggccgttgtccagaacaaaccatatcttagtccacaaaatgagtcttaaccaattcaaaaaagtagaactaatataaagtatctttttggaccacaatggactgcaactaggaatcaataacaaaaggaaccttggaaagttcacaaacacatggaaattaaacgacatgctccggaacaaccaatgggtcaatgaaagaaattaagaaggaaatttaaaaatttcttgaaacaaatgaaaatggaaatacaacatatgaaaatctatgggatacagcaaaaacagtgctaagaaggaagtctatagcaataaatgcctacatcaaaaaagtaggaagacttcaaataaacaacctaacaaggcacctcaaggaactagagaagcaggaataaacccaaacccaaaattagtaggaggaaaaaataataaagatcagagagaactaaacaaatgagagactaaaaaagcaatacaaaggatcgataaaacaaaaagttggttttttgaaaagataaaaaaaaattgacaaacttttggttaaactaagaaaagaaaatgagagatgacccaaataacatcagaaacaaacaaaaaatagacataacaacagagactacagaaatacaaagaatcattagagactattatgaacaacaatatgccaacaaattgcaaaacccagaagaaatggataaattcctggacatatacaacctaccaaaattgaaccatgaagaaacagaaaatctcaataagccaataataagtaacaagattggccgggcatggtggatgatgcctgtaatcccagcactttgagaggatgaagtgggaggatcacttgaggccaggagttcaagactagtctggccaacatggcgaaaccccatctcaactaaaaatacaaaaattatctgggcatggtggtgcatgcctgtaaccccagctacccgggaggctgaggcacaagaatcgcttaaacctgggaggtaaaagttgcaatgggctgagattgtgccactgcactccagcctgggcaacagagagagactctgtctcaaaaaaagaaccagtaacaagatcaaagccgcaataaaaattttcccatcaaagaaaagcccaagacctgatggcttcactgctgagttccaccgtaaaaaagaactaatagcaactctactcaaactcttaaaaaaaaaactgaagaggagagaatacttccaaattcattctatgaggccagcagtaccctgataccaaaaccagacaaggacacaacaaaaaagaaaactacaggcaaatatcactaatgaatatagatacaaaaattcttaacaaaatactaataaacccaattcagcaacacattaaaaagatcattcaccatgataagtgaggttcatctcaatgatgtaaggatgattcagtataaacaaatcaataaacatgatgcatcacatcaacagaatgaagaacaaaaaccatatgattatttcaatcaatagatgcagaaaaagtattcaataacatttaacatccctggaacatacctcaacataataaaggccatatataagaaacccacagctaacattgtactgaacagggaaaaattgaaggccttacctctaagatctggaacaagataagaatgcctgctttcaccacttatattcaatatagtattggaagtcctggccagagcagttaggtaacagaagaaataaagggcatccaaattggaaagaaagaagtgaaattagccttgtttgcagatgacatgctcttatacttagaaaaacccaaatattccacaaaaaattgttagaacttattaacaaatttagtaaagctggaggatgtaaaatcaacatacaaaattcagtagcacttatatatgctaacaatgcacaacctgaaaaagaaatcataaaagcaatcccatttacaatagctacaagaaatatagcatacctaggaataaatttaaccaaaaaagtggaagatttatacaagaaaaaccacaaaacactgatgaaagaaattgaagaggacctaaaaaattggaaagattttcaatgctcaatgacgatagtaccaaaagcaatttaggattcaatgcaatccctatcaaaatatcaatgacattcttcagagaagtagaaaaaacaatcctaaaatttatatggaatcacaagagacactgaatagccaaagaagtcctgagaaaaaaagaataaagctgaaggcatcacactacctcactttaaaatttactacaaaactagagtaaccaaatcagcgtgaataaaaaaacagatgcacagaccaatggaacagaatagagaacccagatataaatccacatatttacagccaactcatctttggctgtaaaaggtgccaagacacacaatgaaaaaaagacagtctctccaataagtggtgctgggaaaactggataactataggaaaagaatgaaattagatccctatctctcgctatacacaaaaaccaaatgaaaatggattaaagacttaagcctaagacttgacactatgaaactactgaagaaaacattggggaaacactctaggacatgggcctgggcaaagattttttgtgttaagaccacaaaatctcaggcaaccaaagcaaatttagacaaatggaattacatcaagctaaaaagcttctgcacagcaaaggaaacagtaaacaaagtgaagaggcaacccacagaatgggacaaaatatttgcaaactacccatctgacaagggattaataatcagaatatattaggagctcaaacaactcattagcaaaaaaagatatgattaaaaatgggcaaaagatcttaataaacatttctcaaaagaagacagacacatggccaacaggtatatgaaaaaaaatgctcaacatcactaaacactcgagaaatgtaaatcaaaactacaatgagatatcatctcactccagttaaaatggctgttatccaaagacgggcagtaatgagcgctggtgagaatgtggagaaagggtaactggcgtatactgttggtgggaatgtaaaaacagtactgccactatggagaacagtatggaggttcctcaacaaattaaaaatagatctaccatatgatccagcaattctactactgagtatataaccaaaagaaaggaaatcaatacaacaaaaagatatttgcatgcccatgtttattgcagcactattcacaacagccaacatatagaatcaacctaagtgcccaccaatgatgaagaaaatgcgctctctctctctctgtatacacacacacacacacacacacacacacacacacacactagaatattcagccataaaagagaatgaaatcttgtcatttgcagcaacatggatggaaccgtaggtcatcattttacatcaaataagccaggcacagaaacacaaatatctcatgttctcactcatatgtgggaactaaaaaagtggatctcatgaagatggagagtagagtggaagttaccaggggctgggaagggtggagtggggatgcagggaagttgattaatgggcacaaatatgtacagtttgatagaataaataagacctcatgttagatagatcagtagagtgactatagtttacaataatctattgtatatttcaaaacggctagaagagaagaattcaaatggttctagcataaagacaagtatttgaggtgatggatatcccaagtacactgatttgatttttacaaattatataaatgtatcaacttatcacatgtgccttgaaactgtgtatatttattatatatcaattaaaaaataaaatggtggattaagacaacagattaaccccagttgaagaggaaattgtgaactgaaagatgcaaagaaatgattaaaaaatacagcacagagctcaaagagatagaaaatatggaagctgaattaagagaaatgctgatggagtgaggtctaacatcacatctaatcagagttccagccctcctcaagtctgagtacctgccccattccacatcagccactctgtatttgaaaggttccccgatatatccggtgccatctcacctctgtgatttcaccctggctgctctctcatcttgggcagctcttttatttctttcccttttcttatctggaagtcggctttgatctgctttgatcttcccccacaccctctgagctcagctcctctagggtgttggaacagagggtggagagtaaaagagacaactatctctctttctcatctggccatggttgtagtcacctttgtgttggttgttgctgcctctttggctaatgtggccatccatgccgtctgtatggcgggtccaaatgctggctttctcataggttaaacatgagagttctttagggtaacttggaaaggcccctaacctcccagtccccaaacatgagacatccaagcctggttcaacttgttcaacttattccgaccccctccccaatttttaatcttcgcatctagcaccttgggactgggtgactgaccagtgctggaggaaattcacaatgtcatttcatagtgcctaggtcatctggggtctcaggagtgcccataaatcctttggctcagccttggctctttgatttctctcaaagacaatttcaaaccctctctgctcgtctcaagtacttttgtcaacttgacctttccctcttcacttttggtagatgaccttctttcctattcatcaagaaaagagaggcttttaaactgatccacttcagcttctcatcctactgcttataaaatgaaccacgcccatagtattccttcccttcagacctgaggttcagaaacctcctttctatccaggcctgtcctgccatctgtcacagaaaaaacccactcaagtccattctactccctgtcttcaactttttctcattagctttctccccctagctcacagagatgctcagtctcttccattttatttcttcccatctttaaggtatgtgacacaaattatatatatttacggtgtacaatgtgatgttttgatcgtatatacatcgtgaagtgattaaatcaaactaacgaatatctaccacctcatatacttatcatttttggtgaacatttaagatctaccctcttagcaattttcaagtattacaatacatttttactttcaagtgcagagtggctgacgtggaatggggcaggtattcagacttgaaggagggctgcaactctgattagatatgatgttagacctcactccatcagcatttctcttaatctgacttccatattttctctctctttgatctctgtgctaaatttttgaataatttcttggcacctatctttcagttcagctgtacaatagatctccaggacatgttcatctgaagtgaaactttatacactttaaccaacatctctccaatcccctcaccacccagcccctggcaaccaccacactactctctgcttctgtgagctcgactgttttagattccacacacaagttagatcatgcactatttgtctttctgtgcctggcttatttcacttagcataatgtcttccaggtttattcatgttgtcacaaatgacaggatttttttaaaaagactgaatagtattccattacacacgtgcatgtgcacacacacgcatacctcattttattgtgtttctcagatattacggtttttcaaaaaacaaaattgaaggtctgtggcaaccctgaatctagcaagtctgtcagtgccatttttccaacagcttgtcacttcatgtctctgtcatattttggtaattctcacatttcaaacttttccactattataatatctgttgtggtgatgtgtgatcagtgaccttagattccttagatttttctacagtaatcattttggggtgccatgaatctctcccacataagacagtgaacttaatcgataaatgctgtgtgtgttctgatgtttccaccgaccagccatccctcatctctctctccctcttctccagcctccctattccctgagacacaacagtattgaaattcagccattaataatcctacagtggtctctaagtattcaagtgaaaggaagagtcatgtgtttcttaggttaaattaaaagagaaaaacaattaagcttagtgaggaaggcatattgaaggctgagagaccaaaagctaggcctcttgtaccaacacttagccaagctgtgaatgcaatggaaaagttcccgaaggaattaaaagtgctactctagaaaacacaagaataataagaaagtgaaacagccttattgttgatatggaaaaagtctgagtggtccaaatagatcaaaccagccccaacattcccttaagccaaagcctaatccagagcaaggccctagctctcttcaattctatgaaggttgagagagatgagcaagctgcagaagaaaagtctgaagctagcagaagttggttcatgaggtttaaggaaagaaaccaactccctaacataaaaatacaaggtaaagcagcaagtgctgatacagaaactatagcaaggtatccagaagattagataattgatgatggtggctacactaaacaacagattttcaatgtagatgaaacaggcttttgttggcaaaagatgcaactggtaactttaagtggaagccaattgctcctttcccattccaaaaattctaaggcccttaagattcctttcaaaatattactgctcattgacaatgcacctggtcacccaagagctctgatggagatgtacaaggagattaatgttgttttcatgcctgctaacacaatgtccattctgcagcccatggatcaaaaagtcattttgactttcaagtcttattatttaagaaatatattttgtaaggttatagctgccttagacagtgattcctcttatggatctgggcaaagtaaattaaaaaccttctgaaaaggattcaccattctagatgtcattaagaacatttgtgatttatgggagatcaaattatcaatattaacaggagtttggaagaagtggattccaaccctcatggatgactttgaggggctcaagacttcagtggaggaagaaactgcagatgtggtggaaatagcaagagaactagaattaaaagtggagcctgaagatgtgactggattgctgtaatctcatgatcaaacttgaacgaatgaggaattgcttcttatggatgagcaaagaaagtggtttaggagatggaatctattagtgaagacgctgtgaacattgttgcaatgtcatcaaggaactcagaatattacataaatgtagttgatacagcactgtcagggtttgagaggattgaccccaattttgaaagaagttctactgtatgtaaaatgctaccaaacagcattgcatgctacagagaaatcttttgtgaaaggaagagtcaaatgacctggcaaacttcatcatctcattttttttaattgctgcagcccccacccccaaccttcagtagccaccatcctgatccatcagcagcatcaacatggaggaaagaccctccaccagcaaagagattacaactcactgagggctcagatgattgttagccttttttagcaacaaagtgttttttaattaaggtgtrtacattgtattttacatataatgctactgcacattagtagactgtagtatggtgtaaacataacttctacatgcagtgggagaccagaaaatatgtgtgactctttattgcaatgttggctttattgcggtggtctggaatggaacccataatacatccaaggtatgcttgtgtatgtatgcatcacattttcttatctatccatctactgatggacagctagactggttccatatcttcactactgtgaataatgttgcaatgaacacaagagtgcaggtatctcttcaacatactgatttcaatacctttggatatatacacggtagttctatttttatctcttccattttaaatacataggcccttttcattattgtgtttcatctttctcttgctcccctcaccaaatacactgaaaaaaatttctcaattgaattttttttcttccttaactcctcaaaacaccataatctggcttccattcgtacctttcaactgaagctgccctctgttaggccatcactgatgttttaattggtaactccaatgggaaatgttcagtccttaggcctcaggacatctctgtggcatttaacattgactgattcctctcttccctcttcacccttcattttttacattcattcattcaaaatatatttcttaggcagtttgtcatattcaggtactaaattattctgggtactaattctaggtactattactctaggtactaaaaatacaacagtggacaaaaagacaaagtctttgccctcttaaagcttacattacagtgggggaagaacaaatgtgaacaactgaacaagtatttatataaaagcagttaggcagtgacaagttttatggaggaaaacaaagcagccaaggggtatagggaaagctggggaatgagcaggctggtggggaatgagcaggaaggggtggggcagtgtgactgttttatatagggtgatcggaggcctcactgttaaggtgtcatttgagcagtaaaccaaaggaggtgagagagaaaatcatgtggatcagtggagggcagagtgttctagttggagggaagagtcactgcagagacccacaggcaggagggggctggacacgttccaggaacaccaacaggtctaagatggctgtggctgaatgtgcagaaggagaaggggtgggagaggaagtcagaaagacagttgacagtcagatcaaagatgtccttgtgtgagatgagaagtccctgggaggtgcttaagcaaaggaatggcatggtatgtcttctttttcataaaatcactttggcttttatgtgaagagggctccatggagcacagggagaagcagggtcacaggttaggaggctgctgcaataattcatggaggcaacaatggtggacaggatatcttgatcctgcaactgcagtggaggtgatctgattctggacatgtttcgaaggtagagctggtaggagagaaagaattgagtcagggatgactctgaggtttgggctggatgcacctctattccaggtggctatttttgacaccttcttctcagacctctcatatctttctgctgaggtctttctgccctccaggcagccctactggacaagcctctatgacaaccatgacagttctctcctacataactcacatctgtgcagcccttgctttgaccagcttggggcacaggccagtcccaactcaccaggcttctgtggcttcaccaccaaagagctactggtcagatcgtctgtttcccaggttagaatcagaccctgactacactcccaggcatgagttaggcactagttcttggtgtctccaattccagggaacctatttcaaagcctctctcactagggttgggattagcaagtagcggtcttcccactgcttccccacaagggagttgggtgaagactcacaacatggtaatagctccttcctaagaaatctcatcacctacctcctcacactagattctccctcttccaccacactgtccctttataatattttcaaactgtgtgagtgggtgggtgagaatgtgtgtacgtggcgagggcagggctcaataatcatggggcaggttttcatccatttcctttaaaaatctccacatgtggatttgatatctgatatatattttattagtagtatccacagcaaaagagaaaaagaatcccattttaatatcctaatacatatagatagcctggtagagtctaaagttatatatattatatatatatataattttaaagatataaagtctaatatctttagactatatatttagactatatagttttagagtatatttagactatagtctagactatatatagttttagactatatagttagactacataattttatatataaagatatattaaatatatataaagatatattaaaaatatatgaagatatattaaagattagacttcatatctttaacatcataatttttttgtggggggaacagtctcgctctgtcacctagactggagtgcagtggcatgacctcagctcactgcaacctccacctcctgggttcaagcaattctcatgcctcagcctcctgagtagctgggactacaggtgtgtgccaccaggcctggctgattttttttgtatttttattagagacggggttttgccatgttgcctagactgttcttgaacccctgagctcaggtaatctgcctgcctcagcctcccaaagtgctgggattacaggcatgagccaccatgtctggcctaacattataattaaatcacaattatatatgtaattttattttaacttttatttttggttcagaacacaggtttgttatatagataagcttgtgacttgggtttggtgtacagatcattttgtcgcctgggtactatgctcagtttttttgtttgtttgttttgtttttcctgaacttctcccttctcccaccctcctccctcaagtaggccctagtgtctattcttcctctctttctgtccatgtgttctcattatttacctcccacttataagtgagaatatgcggtatttggttttctgttcctgcattagtttgctaaggataatggtccccagctccaaccatgttcctgcaaaggacatgatctcattcttttttatggctgcacagtattccatggtgtatatgtaccacattttctttatccagtctactgctgatggggatttaggttgattccatgtcttttctattgtgaatagtgctgcaatgaacatacgtgtacatgtgtctttatggcaggatgatttatattcctttgggtatatatccagtagtgggattgctgggccaatggtagttctgttttagttctttgaggaatcgccacactgtcttccacaatgattggactaatttacactcccaccccacctctgagactttagactcctgtgacaaatttactcctccctcctcagttacatgctattgttacctcgcattttagttctttttctaataccacaaattagatgttataatgttattttttaatctgtgatttttgtttttaattatcttaagccttatgatcaaaaaaattgcaaatctgtgctgatggtatatctcctttacctgctaatgagttggcaaaaaaaaagcaccattaccagctgggtgcggtggctcatgcctgtaatcccagcactttgggaggctgaggtgagaggactgcttgagcccaggaggtgcactaaactctttctctattgcaatttccctgtcttgacaaactggctctatctgggcagcaggcaagaagaacccattgggtagttacatcgtttttctttgaatgtccgagtatcccaytgtgtatatataccacgttttctttatctagtcatctgtgatggacaattaggttgattccaaagctttgctattgtgaataatgcttcagtaaacacgggggtgcaggtatcattttgatataaygattttcttgcttttggataaatacccagaagagggtttgctggatcatatagtaggcctatttttagttttctgagaaatctccctataattttccataatggctgtactaatttacatttccaccaatagtatatgaggattcccctttctctgcatcctcgccagcattcattattccctatctttttgataaaagctatttaaactagggtgagatgatttctcattgtagtttttatttgcatttccctgatgacaatgatattgactatttttttcatataccttttggccatttatatgtcttttatactttttaatgtttttacaagggtgccaattactctatatgtatgtcttcttttgagaaatgtctaatcatgtcccttgctcactttttaatgggattattagttgttttttttttttttgctgttgtttgagttccttgaatattccagatcctagtcccttgttagattaataatttgcaaatattttctcctattcaacaggttgtctcttcaccttgttcattgtttcctttgctgtgtagaagcttttcagtttaacataatcccatttgtctatttttgtttttgttacctgtgcttttgaggtcttagccataaaaattttgcctagacaaatgtcttgaagtgtttcccctatgttttcttcaagtagttttataattttgggtcttacatttagctctttaatccggggtctagtttcatccttccgcatatggatatccagttttcccagcaccatttattgaagaaggtgttcattctccagtgtatattcttggcatctttgttgaaaatcagttggctgtaaatacatggatttatttctgtgttctctctcctgttccattggtctatgtgtctgtttttataccaataccatgctgtttggttactacagccttgtaatatattttgaagtcaggtagtgaaatgtctctcctggtttgttytctttgctcaggatcacttcggctatttggactcttgtttggtttcatgtgattttaggattgtcttttccatttctgtaaaaaatgacactgatattttgagagagattgcattgaatctgtaaattgctatgggtggtatgatcattttaacaatttttatttttccaatctataagcgttggatgtctttccatttgtttgtgtcctcttcaacttctttcatcagtgttttgtagttttccttgtagaggtttttcaccgccttgrttaaaatactcctaggtattttattttatttgtagctacggtaaacgggattgtcttcatgatttctttttaagctatttcattattggtgtatagaaatgctactgatttttgtatgttgatttttgtatcctgcagctttatagaatttatcagatctaagagtttttttggtagagtctttaggtttttctaaatataagatcatgtcatctgcaaagacaaacaattttacttcttttccaatttggatgccttttctttctttcttttggttgactgctttggcttggacttccagtactatgttgaataggagtggtaaaagtggcatccttggccgggcgcagtggctcacgcctgtaatccccgcactttgggaggctgaggcagatggatcacgaggtcaggaaatcgagaccatcctggctaacatggtgaaaccccgtctctactaaaaatacaaaaaaaaatagccaggtgtggtggcacatgcctgtagtcccagctactcaggaggctgaggcaggagaatggcgtgaacctgggaggcagagcttgcagtgagccaagatcgtgccactgcactccagcctgggcaacagagcaagactccatctcaaaaaaaaaaaaaaaaagtggcatccttttcttgttccagttcttagaggaaaggcttttatcttttccccattcagtatgatgttggttgtgggtttgtcatatatggcctttcttatgttggggtatattccttctgtgcctagtttgttcagagttttttatcatgaagcgtcattggattttatcaaacgcttttttgacatctattaagataataatatggcatttgtccttcattccactgatgtggtatatatttattgatttgcgtatattgaatcacacttgcatccctgggataaattctacttgatcatggtatattatctttttgatgtgctgttggattcagtttgctagtattttgttgaggatttttacaactatgttcatcaggtatattagcctgtagttttctttttgtcgtgtcattctctggctttagaatcatggtaatgcttgtctcctagaatgagttagggagaatttcctcctcttgagttttttggaatagtgagaggagaactggcgttagttcttcataagtttggtagaatttggcagcgaagccatctggtcctgggcttttctttattagaaggcttttttttttcttttttctttttttgttctttttgggacaaggtctcactttgtcacccaggctggagtacagtggtgtgatcatggctcactatatagccttgaccttctgggctcaagcaatcctcccatttcagcctcccaagtagttgggaccacaggcacatgccaccatgcctggctaattttttttttttttttaagagacaagatcttgttatcttgcccaggctggtctcaaactcctgggctcaagtgatcctccaactcagcctcccaggtgctgggattacaggcatgagacactgtgcctggctggaagactttttattactgattcaatattgttactcactatcagtttgttcatatttttggcttcttcctgattcagtcttagtaaatcaggaatttatccatttcctctaggttttccaatttatcagcatatagttgttcgtaatagtctctggtgatcttttatggttctgtggtctcagttgttatgtctcctttttcatttctgatgttatttggatcttcttttttattttcttatttagtctagctagcagtttattggttttgtttatcttttcaaacaaccaacttctcattttgttgacgttctgtattttttagtctctatttcatttagttctgccctgatctttattatttctttccttctatttttgggtttgttcttccctttctagttccttgaggtatgttgttagattgtttgaagtctttttactttattgatataggtgtttactgctataatcttccccctcttactactgcttttgctgtgtcccactaattttggtatgctctgtttctttctttttcttttcttttctttttccttttttgagacagggtcttgctctgtggcccaggctggagtgcaatggtgtgaacgtggctcactgcagcctcaacctcctgggcttaaacaaccctcctgcctcagcctcccgtgtagttgggaccaccatgcccagctaatttttaaatttttttgtagagatggtggagrtggggtctcactttgttgcccagactgatmtcaagctcctgggctcaagcaatcctcctactttggcttcccaaagtgctgaattacaggtgagccaccatgcctggctggtatattgtatttctattttcatttgtgtcaggaaagttttaaacttccttcctaatatcttcattcatttagtgatcattcaggagcatgttattaaagttccatgtatttgtctagtttccaaagtttgttactgatttttagttttattccattgtggtctgaaaagacatttcatacaattttgatttttaaaaatatgttgagatatgtctgtggcctattatctgttctaaagaatgttccacatgctgatgagaagactgtgttctgcagctgttggataaaatgttctatagatggctgttaggtccatttagtctaaagtgtagttaaaatacaacgtttctttttgattttctgtctagatgatctgtctaatcctgagagcaggaggtgttaaagtctccaactattattggagcctatctcaccttttagatttaataatatttgctttatatatctgggtactctagtgttggtacatatatatttagaattgttatatcctcttgctcaattaatccctttatcgttacataatgaccttgtctctttttactgtttttgacttaaagtctgtttcatctgatattagtataggtattcctgctcaattttggtttccatcagcatgaaatatctttttccaaccccttaaatctgtatgtctttacaggtaaagtgagtttatcgtaggcagcatatagttggttctggggtttttaaacatccattcattcagtcagtctatatcatttaagcagaaattttaattcttttaccttcaaggttattattgataatgtgaggacttatttgtctttttgttaattgttttctggttgctttgtatattctttgttcctttctctcattgtttatcactgtagttgggtggttttctgtagtggtagcatttgagtcctttctcttcctcatttgggtgacttttctaccagtgggttttatactttcatggttttcatgatggtagaaatcaacattttgcttccaggtgtaggactcccttaagtatttcttgtagggttggtctagtggtgatgaattccctcagtttctgcttgtttgggaaagactacttcttcatttatgaaggataactttgctgggtatagtattcttggctggaaagtttttttcttttatttcaggactgaatatatcaactcaatctctgcttgtctgtaaagtttctgctgataaatcagctgttggtctgacaggagtaccctcatatgtgactagatgctttgctcttgtttttagaattctctgtttttgatgtttgacagtttggttatagtgtgtcatgaagaagaccttttggggttgtatctatttgtgaatttctaagcatcctgtatctggatgtctaaatctcttaatagacttagaaagttttcagctattattttgttaaataggttttctatgcctttggtctcttcaccttcttgaacatcccagatgtgtatatttgtttgctttatagtgttccatatgacacataggttttgtttgttctttttaaaaattctttattataggttttttttgagtgtgtctgatggggttatttcaaaagacatcttcatgcttccaaattctttcttctgcttgttctagtctattgttgaagctctttaataacttttttattttattcattggatttttcacttctaggattttggttttgttctttataatatctatctctggtaaatttctcatttatatcctgaattgtttttctgatttctttgtattgttaagtattggattggcttttgtaggtgaagacttctttctgaggatgtatctatggtgttggttgggtaggacatgttagctttgattctgggtgcatgcagtagtgtagtcttccatattatttctttggctataaacagcatcagtggtgtctgtgatttcctcagtggcttaggctgtggttgttagtagggggctgtggcaagctttttctcgggacaggagtgtcaagtcagccagtccttgggccccagtggtggcaacaacaagctgagggtgcctgtccttgggcccctgggcagtagaaacagacactaacggaagcaggtccaaacaggcctattcttgggcttccacgtggcttgttctggagccagcagtggcagtggtgagctggatgggtgggcaagtcctccgtcccctgggcagtgtgtgatggcagtagcagtggtgggacaaccgttggtctccaaagtggtatgtattgatgttagcagtagctgtgatggagtgtgcagtccactcccaaggactctaggtggcatgtgctggctgtggtgatagtggcaggctgggtgggctcatcctcaggcccccagagggaatgcacagatgccagctatgatggacagggcaagataatmcccaggcccctaggtggtgtgtctgggccctggaggtcactggtgctaggccacgcaggcttgttctcaggccctctggttttatactcaggcactggctgtagtggggtgatctccaggctccctgcagtggagtgctcaggtggctacagcagtggtggcagtggatggtgggagcctgtccctagtatgtgcacaagtatacctcggccctaccgcaattgcggggaggggagggtgtgctcacagtggtttcagccataggcaggtagttctcaggctctaaggagcatgcactatggcttgttttgtgccatgggcagcctccctagtgcacctccattcccctgggctgcaggacactgtgtgttagagcggtggtgatgcaggattttttgctccttagttcagctaaaatccaggttcttgtctcatgaccaggaaaaagtaggtacacagacacattgaaaggtgaggagggcggaatttattaagtgaaaagaaaggtctcaacaaaaaaagacgggtcctgcacgcaggttttccacctcaaaaaaattgaataccaggccaccacacacgagctgaagaggctagactcccctgcagcgtaaggtgtgaattcctggtggctccagcccattcgtccagtgcgcatgcaagctcttagtctgagccactccacgctgatttacttcccttactgcgcatgtgttaagagacagaatttttcactgtgggcatgtttaggcaagcctcctgtccacaatgacctgggcagcattcggttgtctcctgtctctatcactggggaccctgtcacttctgctgggtccaacagtggcacactgctgcaaccttctgggtagttgggggttggaggactcccaggatgtggagatgcaggggctgttaggtcccaggtcaggatgtagtctggtgggggctgggctctgaaaatggcactgtgctacagctgcttaggacttagggaatatgtgggagccagcacaagctccctctctggagcaatctattgcagtctctaggcagctccctatgctagtcttggggaccacaaggttgaggagttctcctgtagctaaggttataggagtccatactaggaatgttggccatgaggatttctcacttacttccacactggggagcctctccaagctcccagccaatcctggccaagctggctgccttgcttccctctgctcctatgccttaggtgtttcctgtcatttctctgttaaattccagtgttttcattttgatgttctatgtgaagtgtgattatctacttactattttggttctttgtggaagagatgattgccaagatgcctttaggcagccattttgaagcccctctctattctcttattcttttggcaacttccaatcatgtcaggatgagattaatctgcaagaatcctgcgtgtctaacctacacatgctttcttccagaaaggatctttgtttttctcaggagcctgggacctagagtcagtttagcctccttgaatgctctaacttcatgcaaaagtctgaggcccaccttcctctcttgctactggcttgaggcttagttttctgatttgttactgatatagcatttgccttcaggcaaacctgcctttggattcatttacattcatagctccctgctccaatcaggtttcagctttgggtttatttggtttgtgcaatttttgttctgtttcrcccttagagatttcctttagctcccatggatgcagcaatgcattaaaagatatctttcatccagaatctaggtttgctttttaatggcatgagaaccttgaggttgtctagtccaccacactgctgaaaatgtaaggagtcagtagtatagtttttaccctggcgacaatgaaatgccattaaaggctgtttgaagrggaagtgacatgatcagatagataggagtgaggctcagatgaggaggtcactaacaaaggtattctaacagcccgggcaggggatgataagggtccaaagtagggagagagatgacagttaagatatgattatcatagacttatcacaattgagtgattatttctgaataattaagctgttccaagtttataggtagcaaagcaatggtaattatcattactaagcactaagcactcctaagttaaatgagtcaaattcttacaaggaagcaaaacaccttttaaatctgtatttattctaaacatttgaccttggcaagagccatggctgagctctgtaattgctgtagtaattgctgtaaccctttgcttatcaagatttgtaattgctgtagtcctttgcttatcttaaggccacattgcatgtggatccaacaatacaaaagaaacatctgctgcaaaactctctaaggcacttctagagtggctgtgttgtacaatagtgctatcatattacacacttacagacacatacactcatacaaagagatactacaaaatatttagaaaggaaaaaagaacatttgcatgagcgtaatcaacccatcagaaacaagcttattcactgtctactttgcctagtcctctaaagcatcatattctgttgtatgggaggtagtaatgtaaagaggaagatgcctacattttgttaaaactgctaacttcaggaagaatgaagctgtaacttaaacatgttgagctgtaatcagaaacatgagcaaagactactagatttctcccagaattttagtaagggactgggcatgtttgttaatgacctacattcaaggtttgttgtggttttttttttaatagtaatgaaaggttcagatttctaaattgcacagcagacatacaaccatcatccagaaagcacagttaacatttttttttaatttgttttttcaaggaaggagagccatattaaagaaatagggaaaacaatcatctaagttctgatttaattattttagtgcattgatgtttaatattcccagaagagtaaatataggattttaaatgggtgtctcatagccaactcaaatgtaacaagacatctaaaatgtagctcttcatatatccccaaacctattctctcctccaccctccctttctcagtaaatagaactatagggtgaaaaaggtgtgatacccttcttccccatcatgagggtcatggccagcactcctgtaacaaaaacatgttaacaagaggaaagtataacagatttatttaatcacaattttatatgacatgggagtctccagagataaagactcaagactcagagaaaaccgtctgtttttaagcttaggttggatgaagaattaacagccatgtagaaatgtgattggacaaaagggaatggtcagatgctaatagtctgggtggggaaacccagcaaggcctgtgtgttcagattctttttggtctctttgtgtgacattctttcctccccagtacagggcaggacccctctggaatgagggtcttataacctattatcacacaaggtaggtcagagaatttctttatagctggctcctacgcagaaaggcaggggaaggttcaagtagtatttctagtttctatgacccaccttggggaagaggaattctagttgctatggcctgccttgagagagaaagggaaacaggagaaagaagggcaagagaagagcaaggagagcctttgcttctgaagctcttccgatgtccctcagttcaaagtacttggcacacccaagtgccatgctttggggtattgttctctgatccccaacagagtgccatcacacactcacttctcagaggcagaacactaagagccatctttctttccatcactctgacaatcagtcatgaggaaatcctcagggccaaactccaaagtctatctcaaatctgcccactttcttccattgccagtgcctttgtcctcggtcacggtcacttggatagtcaatatagcttcttccttatctttctgcttctgctcgcacttcctcccctatctccaatttatcctccccaatttgtgtttaaataaatacaaatcagattctatccctcctctgcttcttatgttcctgctgtcttcggaactcagtctaaatctccccacaagacttccgctgcccacatgccattgcccctgcctgtctttctctgatctctcacaccaccatcccctcgtttgctacgttctagccacaacggcctccttgcaattctagaagcaaactaaccttttctccataactgaatctctcgatttgcgcttccctctgcttggaatgttcctttccaggtttcttcatccttctcgtctcacctcataacatctctgcataaaggctttctctgactaccctaactaaagttgttgctcccatcattgcttcatgaagctccttgtttatttccttcatagcacatgttacaatctataattgttttgtttattatctatcttcaccagaacagaagctccytgaaggcagagtctgccatgtttactgccataaatccatgctgattacagtgcctgagagaaactcattaagtatctactgaattaaaatctaatttctcaatctttccttccagaattttactattttacaattaacacctagatgctgataaccatgcttcacttgatgcttatagcaagttgaacaatgtctgggttttgactctaatttagggtgttaatttactaagttggggtctagagatcacctactatattgccaatcaataaatataatagcaatacttctcatcagtatcaaaattaacagaaggctttattaacaaattatatggctttattgaatggaagtgtttcaacaaagaatcaatgatctggtcaggkgcggtggctcatgcttgtaatcctagcactttgggaggctgaagcaggagggtcacttgagcccaagagtatgagaccagtgtaaacaacatagtgagaccctgtctctataaaaaatagaaaaaaatcagctgggcatagtaggatgtatctgttgtcccagctactcagaagatggaggcaagaagatcccttgagcctgagaggttgaggcagcagtgacccatgatcacaccactgcactctagcctgagtgacaaagcaaaactctgtctcaaaaaaaagaaaagaaaaagaaaaacaaaacaaaagaaaaggctgagtgcagtggctcatgcctgtcatcccagcactttgggaggttgaagtgggaggactgtctgagtccaggagttcaagaccagcctgggcaacatagcgagaccctgtctctacaaaaaagtaaaaaattagctaggcgaggtggcacatgcctctagtcccagttacttgagaggctaaggtgggaggatcacttgaccctaggagttactgcactcagcctgggtgacaaagactctgtctcaaaaaaaaaaaaaaaaaaaaaattgataatcctgagcacttctcaatatyccatttccctctttaacctcaggacatccccaaccttttgctcttttctcttcaatacattaccaatttctgattcatccaatattcagttcaacaaaaattaattcaaagtctactatgtgctgggtaccgtgttaggaactgggtgtacaaaggtgaaaggataacaagtggaggattaacagacatggtctccctccccacaactccacatgtcactgaatccccaaggcccttccccaagcacaggctcctaaagatgaagccactattgcccaaggggaaggcacatgatgtgtctaggagatgaaagacttaaacaaacaaaaactagactcgtatgtaacagataaagatttgggaagtatactggctgagcttccccctcccctcatgcccacccctccatataagcttctagcccagactgagaatcctgaggatagagatctgcagcaagagtcagatcctggcaagggcaccaaggatgtccctggcgagggaggccttgcatctcgagtctgtcaagggctaagtcttgggagctggggagaccagggaggggctggtcatccatctatccaacaagtatttcttgagcacctactattagctagccactgttctaggtactgagtgttctgtgaatgaaatagagaaaaattccccctcattcttctttcattctgagggcgaagaagatttctatttgtttcccaggtggagcctgaaaaagtgagcaacactgcagaattccctcaaccctcttcacctcacagctgaaggatggaagaaatagaacggaagtaggagttgggagggtgtgggaagggaatatctgcatcagtcactcaaagtcccttactatgtgagatgtgtgagakactagcagtttttgcgcattagagaattagctgagcgagggtggcagaagtgaaagggcctcaggttggggacatggaagatgcagagtgcatggcttaactgtgctaagcagggcagtgctgctaacgtatcaattaatgtgggcagaaacacagctgcacaattaaaaacaatgggatcagtttccccttagcagaagtcagtgtgaagagatgcccaacaacccacggaccagatatttyccccatccccaaagttatgatgccaagcaggtccccagaactttgaggtcgttctcaagagcaagagggagaaaacaggaaatcctgaattgactgagtttaagatggaagtaactaagaaaacagaataaccaaggttgtattttctgccacaggaaatttaagattttggtttgtttgtttttttttgaattacagacatatagctactcctttgggcacacttgaggtcatggcttgaaaatattgtgtccacaactaagcatgaataagatgccatcttgcctttggggggctcttccagctgccagacggccctctgtcctttctccaaccacctcttctaagttactactaagacagctcctcagtctgctctctgccctctagcctttcctcattcacttgtagccctctacaacctactaatttcagtgaataccccaacatctagaaactcgggggaaatcaatgctacatctctgggttcctgccacactacagacagatcctggcttcagatcagacttgaagtggtatgaaaggaaaacctaaataaataatatcggggccagtgccaatgcccacatgcattccctcactatttccttaaacattatttaaaattctatgtgttttgagcacttcctccttttcaatagactctctttagctaatgttaacaatcaagtgtcaactagggatgaggaaagttctacaaaatttcaaaagacagccctgctggtggggaacctcgctggtgagcttagaggactcccagtgtgctggccatgctgctcttcttttaaaaagccatgatgaatcttctttgaagacacttctaaagtatatgcaaaaaatacaaaaagcactgagaggatggctgtattcaattgaggggcatttccaatgatacttattcagctaacagacatttactggggcatttactatgtactaagctctggattagaggcagaaactagaatgatgaacaagacacagcccttgctctcaaaaaactacagtggctttggtttgatggtgagggaaataacaggcaaggacaacccagcagaatcggcaccagatctgaggcaggcacagggtgtcttcagagcccagaggaggagaacaatagcccctgccttccaaatgccagtgaaggctttctgggaaaagtgacatcttagctaaatcccaagaatgagcaagattcagacaaatgaataggaatggaggacggaggcaaggggagggttttccctgctgagaagtatgcaaagcatgagagaatatggtgtttgggggaagcagttcagtgtaccaagctggaacatcagaggctgggggaagaaaggaggttaaaggtgaggctgcaggggtgagcacaggccaatgtgggaaggagcttacctgccacactaagttgttagaactttatcctaagggagcttctcagaattgtgactgatcagagcttcattttaggaatgtcctaagtctctaattctgttttgacccctgattgcttccctaacttgctcacctccagtcctttctttacaatgcattcacagtcatcttcctacagcaaggatctggctgtatcatgtccttgcttaaaacacatcaaaggctccccattgtttttcagacgcaataaaaactcctcaacatggcttatcctacgtgccactttgccagggaagctccaggtttacatctgttaccctggcataatttttcactttcactctctaaagtggcctgactgaacaataaacatatggccacctcttctacacctgatcttagcccaaaggccgggaagcaatatggtcacctttacatataagaccttgctcacctcttcaaggcctctcctgccatccacctcatcctgaggctctgctaaacttccttccattctcccaactggccaagtctctcttgcccactcctcctgttcctcccaccccagcctctcacattgttcatgctgcctgagattctcttctctcctcacttggtttggctcattctgcgtagtaggcaaaatagtgcagtgaactgtttttcaaaatgtgggttgtgaccaattagtgggtagtgaaataaattttgtgggtcacatctaaatttttttaaaaagtaaaatgactaagatagatcagagtacactgtcaataaacattgttttgtgaaactgtgaaactcttgttttaggggtgtgtgtgtgtatatatatatacgtacgtgtgtgtgtgtgtgtgtgtgtgtgtatatatatactgggtcatgacataaaaggcatttctgactgtgggtcacagtcaaaaggtttgaaacacatcagcgtaggctctggggttacaccagcagcttggtctaaatgctgactttgccacttcctagttctgtgactgagggcaaatttttaaaaatctctttgtggactttcttcatctgtctcataagattgttatgaagattaaatgagctcgaccatttaaaagtacacccagcacacacaacatgagtgttggctactgctactatcatcacccatccctctcattccagcttggacatcactttctccagaaagcgccccctgctgtcctaaggcagggttaggtgccctcctgtacatgttcgtgtcctctccctatcctgatacctcatttgtttgattaggtctgttaagccactagactggaagctgcataaaggcaggaacttgttcaccattgactacctagcagttagcacagtgcttagtacacagtaggcatttagtaaatttctgtgggatgaataacttaccctttgaaagaaacatacagctgtttcattctaataaaaagtcaacttggaacttccacacttgagaggtcatggtcattttaatcaagaatctctcagtttagattagtcttcgttctcctaatttgaactgtcaaaggggttgtatgacattgttataatacatacactcattagtaatgggaaaaagtttaggttggatggcttcttgacctaaaattcataaatagttcaaaagtcagtgtctcttaatattcttttaattatcacaataatgaaaaaagttggccactgcagataaagaatggcatgtttaaatgtacttaccacccttctggtcttttaattgacttctactgcaagtgtggctttgttttatttattcattcttatcaatgaaagcctttagtagtctcatttatctgtttttcatgcatgaatcatgctttcccatatttttaaagtaaaaaagaggggggaattaagtttaaaaaggttttaattggatgtcttaatgtcaaccacataatacacagttactatgttgataccctctcgaatttctacagtcagttctataatttgaggcacactttgcaatgctctgatgattgatataaagacacttttaaggaaatgtgaaggcaggcagcaactttccccaaaatggaggacattgtaaatgcatccaatttatgaacaacacacaaaaactgtatgcaatggcttgaaaagcagcctatatacctagaagcagccaaagaacacaggccaaagtcagtgctgtgctagtggcagattcactaggatatcagagagtggtctggggactcctgggtcacactactccttcctaaatcagacaaacacatagttacacagtaagtcagatgctgataagtgctatagagtgaatgagcagagaagagggaggagcaccactggcagtgggaaggtgttgattttgaataaaatgtccaggaaagcctccctgagactgtaacatctcaacaggatgtgaaaagaatgagagcgtgagaatgtgccatgtgtgtaggactcagaaaaagggcacttctctggcacactggagagggagcttaaaagctccatgagatgggactgtcgggatggatctattacatacaatttgctcagccaccttttaattgccttggaggacactctgttcactaaggcatttaaaaagcatactttgatggggcaccagcatctctgaagagctctgtagtggttgtcatctgtaggctgagatgaccagggataacagggatggtgcaatggaattgggtttcctgatctcactgggaatactggggtcctggagcagtaaaagcaaatagcagtgcttaactcttggagacaagctaggcatgataatcatagtaagccacagggatgccgtggtatccattttctgttttttgttttttgttttcttactttcaggatgtgtggtggtggttaatgaatcacaggacctgtggaaaatacataggcagcctactaagtgagcttaatataaatagacagaaaacctaactactgtcattataggggattcatggcctcttatccagctcctaagcctaggccagttcacagagcaagaacttcttgaggggaaggtctgagccctttgagaatgaatcctgcaatgtagccacaggtgtgtacagtaaatcttcccctaagcctcccctagaggtacctgaagctattcacaacaatgactgtacttagataagtacttatccgatattggctctgaactgacactaatttctggagatctaacaatgccaccatagtctactggccagaggagggacttaagaaaccaggtgacacatgaagtcttggcctaggagctacctcacaccgaatccagctaaaccacagacctacctctagttatttccatggtctcagaatgtatggtgagaacagacctgcttagtaacctgcaaaattctcccctctgcttccaccacccatggagttcaggttattagggtattagagagatcaggcagaaccgctataattataccacttcccctctaaaaatctttctggggaaattacagaaattaatgccaccatcaaagatttcaaagttgtaggggtagtgattcttaccacattccagtataacttgcctgtttttctgaaaagccatgtggactgtcaaggatgacggtagattattgcaaatataatcaggtgatggtaccatgcatagctatagttccagttgtgggctctttactagggcaaatcaacacagccccagacatctatagtatataggtgtcaacctagacactttcctaaaatccctattaataaagataatgagaatcagttaactttcatgtgacagggacaacagtatactgtctttactgtcttgccttatggctgtgtcaactctgctatgtccttcaatagaggcaagagggaccttaaatctcttgatgtctgtcccacagagcaacacactggctatcacattgatgatacagtgctaagtggacttatgcaagaagtggcaagcactcttgatgctacatgtatgtagaaggtggccaataagtcctgggaaagttcaagggaatgccacatctgtgacgtttttagagtatccactggtctggagcatgtcaggatatcccctctaaagtcagagacatgttattgcatcttgaaatgcccaacataaggaaagaaacatgataatcatgggcctctctaaactttggaggccatgggtatgctgctgtctctatttactgccagttttgagtgaggaccaaagcaaacaaaaggccctgcagcaggtccaggccactggataagctgccccgacacctggatcatataacttagcagaaccaagggtaagggaagtgcctgaggcagacaggtgatcaatggagcctctgacaggcagcagtaggaaaatcacagagcagacccctgggagtggaccactagggctttggagtaaggtcatgcgttcttctgcctacaactattagccacctaaaaaacaacacttggcttgctactacaccctgataaagactgaatgcttgaccacaggacaccaagtgactctgtcagctcacattatgggtgttacctgatccatagagatgaaactggatgtacgcagtagcattccactgtcaaatcaaaatgacatagatgagggctgggtgtgatggctcacgcctgtaatcccagcactttgggaggctgaggcaggtagatcacaaggtcaggagatccagaccatcctggctaacacagtgcaaccccgtctctactaaaaatacaaaaaattagccgggtgtggtggtgggcgcctgtagtcccagctactcgggaggctgaggcaggaggatsctgtgaacccgggaggcgcagcttgcagtgagccgagatcaagtcactgcactccagcctgggcgacacagtgagaccccatctcataaaaaacaaaaacaaaaacaaacaaacaaacaaacaaaaaaaaaaccgacatagatgaaaccagtcctgaagcccatgtaaacaatgcaagcaggtggctcatactccatggagcatgatcccactctttcactgcctcttcctcaacctacacctagagctagagcttcatggataattctctattgtcaatcaaaaggagtatgtataggattggtttaaacatgaaattagccaggattgctaatacgtcaagtatgccagcgctacccagaagtgggtaactgcaacactacagcccactcagaagtgctcctgaaagaccgcaggagaatcctcctagttgacagcattggaaacagtatatcttcacacaggacatcctggaagacaagatacctaatgggtattggccggggacttagaaagagtaacaaggaggcatgtggatggacttttcaggatgtgcrcacaatgtgaagatatttatttcactataaatgcttgctaggggacgttcactgtggaagaggtctcaaaaatcaggtgggaaaaatgctcgacttagtggctgtcaataatcttctttcctagtcattccagtggttcttcagtgggccatgtagcaaggatgacctcaacaggcaggggctcaacaacatgactgctcctcaccaaggtgacctggctgccacagatgcggagcatccagaatgcccggagtggtagctaatgctacatcactagcagggaaaacagccagttaccaggtggcaggttgattacattggatccctttgtctttttttttgttttgtttgagatgggagtcttgctctgtcgcccaggctgcagtgcagtggcacaatctcggctcactgcaacctctgcctcccaggctcaagcaatcctcccacctcagtctcccgagtacctgggattacaggtgtgcaccactatgcctggctaatttttgtatttttagtaaaggtggggtttcaccgtgttggccaggctggtcttgaactcctgacctcaagtgagccgccaacctcagcctcccaaagtgctgggattataggtgtgagacactgtgcccggcccagtgctttgtcttcacagggagagacacaytgtgggtgcagcttcgccttcccttcctgcagccctctgccagcaccaccgtttgtacacttagagaacaccttatttattttcacagcaccttacaaacaaccctatgcaaactagtccagagtataaaaaagagcaaatatattccaactcttttgtgagtgtagcatgacctcagaatcagaatatgacaaagagaattttagaaaaaacagccctagctaatttactcatagacatagatgcaaaactcctaaacaaaatattagcaaatcaaatccagtaatacatatcaaagataatatatcacagccaaattcagcttattccaggaattcaaggttattttaatatctggaaatcaactaatttatgaaattaacagcctaaaggagaaaaacctgtaactatccatataaatgctaaaaatggagaaactcaacatatagtcaagataaaactgttaaggaacggagagctgcaaaaacacacattaagcctctatcttaatgacaaaatgtttaaatcattctcattaagtctaggaagtccacgatcacactttcattcagcactgtgtaagtcattccacctagcatggtatggtaagaaaacaaaatacacagtgtatggcttgaaaattaagaaataagttcattattatttatagattaaatgattttcaacctaagaaacccagaagaatctacagataaactgggaaaactggtaagaattaagcaggtctgctggatacaaaatcaatatacaaaacttaattctattcattttcatcaacaaacagaaaatgcaatttataaaatgacacattttagagtagcaatgaaaatacataagtacctaggactaaacctaacgaaagatatacagaacctatatgaaaaactattaaaaaaacacattaaggaagaattaaatgaatagaatgattggatatcataaaaatgtcacttctccgaattgacttaaagattcaatgtagagccaatcaaaactccaataggttttattcaagaaacttgacaaactttcatgtgtgaaagcaaagggtcaaaaatagcccaaactaatcccaccactttgggaggctgagacaggcagatcctttgagtccaggagttcgagaccagcctaggcaacatggcaaaaccccatctctacaaaaaaaaaaaaaaaataaccaggtgtggtggtgtgagcctgtagtcccagctacttgggaggctgaggtgggagaatcacctgagcccaggaagttgaggctgcagtgaaccgcaattgtgccactgcattscagcatgggcgacagagtgagaccttgtctcagggaaaaaaaaagaaagccaaaacattcctgatgaaagaaaagtcatcaagaattattacaaaggtggcgtgattaaaactatttatcaatgcagggttggtcatatcactgacggagcagaatagagaggctataaacagttccatgcatatgtgtaaatctgctttaggttacagatggcattgcagttcacttgggaaaggacagacttttcaataaatgattctgggacagctggctatccatttagaagtaaaattggacttctacctcaatcttacaccaaaattaattccagctgcattaaatatttaattgtgggaagcaaactataagaaaatgttagtctatatagaattatctttatagtcttgaataagaatttcttaaaataacacaagatacatatgaaaagtacaaaccatagagaaaaaaaaatctacctcattaaaattcagaacttctgttattcaaaaactccatacaaagtgtaaagacaagtcacaaactggaaaaacgtttaagagatgtgatacttaggctccagaataaagaactcctataaatcaattaagaaaaagacaaacaaccaactgaaaaatgaccaacagacatggacacgtcagatgaggaaacatgaatgagtcacacctatgaaatgtgtcgacatatgaaaatatgctgaatttcattataagaaatacattttaaggcctggtgcaggggctcatgcctgtaatcccagctgaggtgggtggatcacctgaggtcaggagtttgagaccagcctggccagcatggtgaaacctcgtttctattaaaaacacaaaaattagcagggcgtggtggtgcgcgcctataatcccagctacttgggaggctgaggcaggagaatcgcttgaatctgggaggtagaggttgcagtgagccaagatcgtgccattggactccagcctgggcaacaagagtgaaactccgtctcaaaaaaaaaaaaacaaaggtaaacattttagaacaaatgatacccacccaatagactggatttttctaggggaaaaattggtgaggacatgcagcaactgcaactagaactttggaaaacaatctggcattacctagcaaatttgaagatgttcatatctaaccgtacggcaatttcgcttccaaatatatgccctagagaaactcctgtccctgagaaccaggaatcttgtacaaatatacaaatgcaaaaacagcattgtttacaatacaataacttgatacataatgaggatagtattccacagaagaataaacaaatgcattataatatatacatacaatgaaatactgtacagcggtgaaaataaataggtgaatcttaagcaatgatattgaatgataaaagtcacagaaaaataaattcataatgactctacttatataaagttcaagagcctgtgaaacgaaatatatattgtgtagagtataaacatgtagtaaaactataaagaaaagcaaggaataatgagtaaagagaggttcctctggaggtgaggataggggcaagtcagtgagacaagtccctagtgctagtgggggtgtgagggagtaagacctctctactgcaggccagagtgtgaacagcagatcgtcacgtgcctatggagggcaaaggcaagggagaaaaggagaactgaggattctgtaccacaataactctcctactttatttttgtcttgagctgaagttgccaaaatcataacatggaaattagaaccatctgttgacaggataagttagtgaactggacagaatttaccaagagaaattcagaataatgtattttagaatctgtgtcaaatcagggaaaaatataaagtctattttatttgggaggggaaaataacgccatttcatcattgtttataaaagcaaaaatacagaaataacctaaatgaccattatgacaatactagttaaataaaatagtatacattaacactatggtacgctgttatagttgttgcaaaaaattaaacagaccagaacaagaaaagtgaaccaatggaatagaatagagttgttaaacagatactatttagtgcaggttaaagagtcatttcaaagcagtcgagaaaaatggcctagtcaataaatgttgagacaactggctgcccattgcccttatctaaaaccattcgcaaatactttaaatgcacatggattacagaataattaaaataaaatatgggcaaatatgttctattaacttggtataagaaaagccaccttaaaaacacaaaaactaaaagccatgaagaaaaagaggaataaatatgactaaataaaacataaaacttctacaaagacaccattaagaaagttgaaagacaattcacaagctgaaagatatttgcaacataaatagcagagaaagaatcagatatctatgtatatatctatagatatatagaaatatatctgatatatatctctatatatatagctataaaatcaatttaaatgaaaaaaataaaaaataggttaaaaaacaggtaatccatagaagaggaaatagaaatatctactcaatatgtagctatatgcaaattatacctactatgtaatgcaactttttacccaagtgataaaaacataaggcttgaaaacatcaagtgttggtgagaatgtgagtgaataggctgcaaaccaggctgtgaattgatactgatattctgaagggctgtttggctgtatgaattacgatgaaaatgggcacaaattatgaccaagagaatccatttctaggagcacatcctaaagaaacactcacatatgtgcacaaggttattcactgaagcattctttgtaacagtgaaaaacatcaaaatgtcatcagcaagggaataaactatgatagccaggattgcaggagtttttaaaaatatggcaaatctctacacattgacatacaccgaaggatagtcaagtgatattcttaagttaaaaaaagcttcaggaaaatgcagaataaggttttaaaacaaagtgaattctatatatttctaaaggtacacgtatgtatgtaatacacacagaaaggtatgggaggtaatcaccaaactggtaatagttcactctgcggaggggactgtgttggggtaagggacagtcaagggagcttttgactttctctgtatttgaatttttttaaattaagagtatattcacttatataattttaaaataaatatttattaaataattatgatacaaaattataaactgtataatggggaaatgggcaaagtcttctgggaacatagtgaaaggagaaactagtttagcatgcagaaagattttatagcagttgtgacattttcattggacctggctattcaaataggattttgtcaaggatttataatttgatggaagattgttgcagattatattttccaaagatgactataccaacatatgtctcatccaatatgcctttctttcaatatgacactgacactccttcctccatggagaggttgtaggggggtctatgtccccacccccttaaacttgggcaggactttgtgattgccttgttgaacagaatgaggtggaagtattacagcatgacttctgagatgattcaacttctgtctggtcctttctttcacaaaatactcatccttgaaacacagccacgatgctgtcaggaaacccaaactagcctacatggaaagaccacatgaagaggctcatatggagaggaactgaggcctccagccgatagccagcatcaactgctagacacgtgagtcagcaagccttcagatgattcctgccccagcctttgtgttccctggctaaggctagatatgcatcatggaacagagacaagccatcgccactgtgctctatcctaattcctgacccagagaatccttgagcagaaaaaatgattatgccacgaagtttcagggcaatgtgttacacagtcaaagtaactggaacaaagacattctaaagagaagaaagtacacaagcaatggaatgtcacagggcattgtgagtactggcagttttaggtgatgaagcccatagtctggctgggaccagactatgaaaagtacttgtctggtactattttaaaaattagacttatcctattgccagtggagaactgttgaaagcttttaagctgggaagtgaaatgctaagatctgcattttagcaagatatctctgagactactgtaaaggaaagattgcagaaatgaatgacttaaaaatagaaaaagcccctctgattaagatgggtccaagccaagtaaaatggtgggatcccccctccggctacattttttacttttttcctccttaggattgcttcttatgctcatttatactcaatttcacttgtattaaaatgttaggagggaaaacttttctccacacaaaaacctgccacagatgtttaaagcagcttattcataactgccaaaactgcaaccaagatatccttcagtaggtgaatggataaataaactgtggtacattctattcagcattacagtaggcgaatggataaataaactgtggtacattctattcagcactaaaaagaaaagagctatcggctaggcatggtggctcatgcctgtgatccccgcactttgggaggctgaggtgggtggatcacaaggtcaggagatcaagaccatcctggctaacacggtgaaaccccgactctactaaaaatacaaaaattagccaggcatggtggygggtgcctgtagtcccagctacttgggagactgaggcaggagaatcgcttgaacccgggaggtggaaggtgcggtgagccgagatcgcgccactgtactccaacctgggtgacagagcgagactctgtctcaaaacaaaaacaaaaacaaaaaaagaaaagaaacaaagaaaaaaaaaagacagaaaagagctatcaagccgtgaaaagatatggaggaacccagagtgttaattaccaagtaaaaaaaaaaaatctaaaaatcatacataccatctgattccaactatatgatgttctggaaaaggaaaaactatggagacagtaaaaagatcactggttgttaggggttagtgggagggagggatgaatagagcacagaggatttttagggtagtgaaactactatgtctgatactataatggtggatacacatcattatacatttgtccaaacccacagaatatataacaccaaaagggaagcccaatataaaccatggacttcagatgattatatggcaatggaagttcattgattgtaacaaatgtaccactctggtgtggaacaggggtacgtgggaactctttactttctgctcaaatttgctgtgaacctaaaactgctctaaaacaaagtctatttttaaaattttaggagaaaaaactgtcagggggtgcagaatacaaaacattttccttaatgctcttctttcaagcttctggatctaaatctgtttaagaatacaaagcaagctttctaaaaattataaccacttataactaattatccatgtgactaatgccatccttatacaaacatcactataacccccaatttcttgtttttgtgtttattaaaatatcctcatcattctcacaactggctttgtaagaaaactctataaatatgaacttgaacaagaaaataaacccatactaataaactatagcacttatacactggatattatagatctatataaggagaaaatgtgagatgcatggtccaagaagagtgggaagatataactcaaaacataaaaagccacctctgtggtaagggaaaagatgcctgtatgaatataaaagcaaagatttataaggtgatgaaagatactaatgagaacgtttcgttctcatggtggcagaagatcttccattctactttctgagaaaatcaagaggaagaatgcattgaaaattgagagttcatggagaatagagacaggatgcagtgactcaacagtgagtcagtcagatcctcaaggatccagagtagtcgcagagcccagttggaactcaatcgtgtaatttattggaggctagttttgtataattttatactgtgcctttctctaatgttaattactcaagagatgattaaccaatttgtggctactgtgcatcttagctcttcacattttcacttgatgcctgcttttgaaagagttcataatttaaattctttatgaaaaaaaacaggaactaaaattaattttctgctattaaaactacttgtaaaagagttaaagcttgtagtcaatttttgaaacaaacaatgaaaaaggaaaaagtaaaacaggaagagagaaaacactgaaacaaatggtaaaacaagattataggaccatgttgtgggttgaatttatccatgctagttctgtccctcattaacaaagttaaatagaagccaacggttgctgtacttcacaaaataaaatctgataagtaaacttcctattccttaaccaatttacctgcacccgaaagattacaaacttcttctgcttctgacaagcaagtgattggagagacaatggaaggaggtgttgctagtaaaggcagctctggatcatcatccaaaaatgtcatcaggtcctgacagaaaacacaagaacatgagaattgaagaaaaaaattaatatccctggatggacaatttattgagctacaaagtatctaaatgtgctaacatcatcataaacacattctaatttaattaactcaaacatacatctatcacttggctgtctactgggtgtagggaggttttgtgccctcgggaatccccagaccttgctgaagacaccgtcggtagatagcaaggattttgcttagggcactacctttacctaccacccttcagcatccttacagcatactatctcagaggccaattatcttgtctcactggcaatcataaagtcacctgtatatatcttttattcatatttaaaacttttaactttttatcaccaagtaaaaagtagacacaaaagataatcaatccaatcatgcaggttaaacaataatcaactgatggctaatcttgtttcatttatatccctaccatgcctcatttgtgatctgtgacaacctgtttcactttgaagcaaatcctagaataatcccttatttcattatgtatctctgccttagtccattccggtcactataacaaaataccatcaactgagtggcttataaacaacagaaatttattccttacagtttgggaggttagcaagtcaaggtgctggcagatctgatgtctggcaaggccccacctcctagacagtcatttcttcactataacctctcatggcagaaggtgaccaaggagttctcttggcttcttttataagggcactaatcatattcatgagggctatgcccttatgacctagtcacctcccgaagatcccgcctcctaataccatcactttgggtgttaggatttcaactaagaatttgggaggaaaacaagtattcagacgacagcaatctctaactgataataactgcatcaaactgataaacttcatagctcctaatgtcatcaattaccataaactgttcatatttccaacttctcctaaatgtcataaacaggtttttctacagcttgtttgaaaaggatccaaatcaagtctatagagtgggtttagctggtatgtctttttttttttctgtgaactagggataatttttctccattgtaattaacatacagtaaaatacacagaccttacatgtagagctcgataacttttatcatatgagtattcaattatatagtaaccacatttcctgcacccagaaagtttcctcaagctcctttccagctgataccatcccaccagcctgcatcatgaccactattctatcatatcaccattattgaattttgtctgttcttgagtttcatatgaatgtaatcatacactatgtatacttttgtgtctggttcctattgctcaacataatgtacatgagattcatccatgttttactgtgtagttcctccctcctttcctacctataagaaaggagggagagattgcacaaaaaacagatgtgaatgtatcacaattgtttatccattctcctgcatacggattatttccaaagttcatctattatgaataaagctactatgaacattcttgtataaatctttttgtggacaaatgcattcattattcctggatactacatagtagtagtatagcatttctagcttataggacaggtctattttcaacttcattagaaactgccaaaccattttccaaagtgatttgccccttttaaaaactcaactttgagctcattttagatccacatgtaagaaataatagagcctatgtaacctttactgtgtttcctccaaaggtaacatcttgcaaaattatagtacaatatcatactcaggatattgacattgaaatagtcaagatacagaacatttctatcacaatcacaagaatcctttctgatgccctttcatagacatacactccctcaacagaactaatctgttcctaatctctccttcatttctatagttgtgacatttgaagaatgctatataaatggaatcatacagtatgtaaccttttgggactggcttttttagccttgcataattcctagagattcatccaaattatttcatttcaagtttcttccttttcattgcgagtagtacccttgatatagatgtaacatagtttaacctgttaaaggacctctggattgtttctagattttggctattacaaataaagctgctgtgaacatttgtgtacaggtttttgtatgatatacattttctttttctttttgagacagagtctcagtctgtygcccaggctggagtgcagtggcgccatcttggctcacagcagcctcaacttcccaggctcaagtgatcctcccacttcagcctcccaagtagctgggactacaggtacgcatcaccatgcccgactaaattttttttaattttttttttttagaaatgatgtttagccatgttgcccaggctggtctcaaactgctgagctcaaacgatccacccaaacttggcattccaaagtgctaggattacaggcatgtgccactgtaccagcctagatgttcatatctctggtataaattcctaggagagcaattgctgttcatatagtagccacgtttagatttattaaaaactaccaaactgttttccagagtagctgtaccattttgcattcctaccagtaatatattcgtgttttaatttctccatattctcactagcatttagtgttgtcactattttttaattttagccattttaatattcattgcatgtttaagttacattttcctgaaggctaataacgttgaacaacttttcgtgcgcttacttaccatctgtatttgttaaaatgactgttcataacatgtgcccattttctaattggactgtttggttttaaactggtgagttttaacagttctttaaatgctccagatattagtcctttgccagatacggggtttacaaatattttttcccagtctgtaaattatctttccatcctcttaacagggtcttttgcagagcaaacattttcagttttgatgaggtttaatgtatcatatttttccttttagggatcatgcttttgtccagttcttttttttttttttttttttttttttgagacagagtctcgccttgtcacccaggctggagtgcaacggcacgatctcggctcactgcaacctccgcctccagggttcaaacgattttcctgcctcagcctcccaagtagctgggattacaggcgcatgccaccacgaccaggtaattttttgtatctttagtagagacggggttttaccgtgttggccaggctggtctcaaactcctgacctagtgatccgcccgtctcagcctcccaaagtgcggggattacaggggtgagccaccgcacccggccccagttctaaatctcaaagatttttctcctgtattttctaaaagttttatagtttacatttaagtctgtgattaacttggagtgaatttctatacaaggtttaggttgagattcatggttgtctgaatgtccaatgctgtagcactattttttgaaaaggctaatcctcctacattgaatttcctttgcacctttgtcaaaaatcagttggccatgtttgtgtgtgtctatttctgggttctctattctgttccaccgatccaagtgtttgtctctccaccaataccgcactctcttgattactgtagctatacacaggcattaatatcaggcagaaggattactcccattttgttcttccttttcaaaattgttttagctattctagggcctgtgcctttccatatcaattttagaacaaggttattatctacccctatagaaaacctttctgggattttaataggaattacattaaacctatagaataattagggtcatctgtactatgacctttactatgttgagtcttccaatccatgtaacatgataggtctctatttgggtcctctttaatttccttcatcagtattttataattctcaacatatggactctgtacatgttttgttaaatttatacctaagtatttcaatttggatttatacataagtattttaatttatacttcagtattttaatgcctaagtatttaaatttatacctaagtatttcaaatggtattgtcttaatttaagtttccacatgttcattgttagtatgtagacattcagttgatttctgtatgcttttatatattgctggattcaactggctaatattttgttgagaatttttgcatctagtttcatgagagatattagtctgtagttttctttttctgtaccttctttgtttaaacttgggatcagggtaatacttgcctcataaaatgaattgggaagtcttccctcctgttccattttctggaagacattgtgtaaaactgctgttaattcttctttatttttttattttttgagacagggtctcactctgtcacccaggctggagtacagtggtgcaatcaagactctcatttttaaaatgattgtagaactattgagtttgggtagtttacattttctgagaaagtattctatttcttttgatttgtcaaagttataaagtttttgtggtttttttttttgttttctttttgagagagtctcactctgcctgcctattttgattatctatttggtttgtttggtttatatcagacatagtagtttcactaccctaaaaatcctctgtgctttattcattcctccctcccactaaccaaacaaaccaaatagatgttcttggttttgtttttgagacagagtctcactcactctgtagcccaggctggagtgcagtggcatgacttgggcccactgcaagctctgcctcccaggttcgagtgattctcatgcctcagcctcttgagtagctgggactataggcgcacaccaccacgcctggctaatttttgtattttgcattttttatagacacatggtttcaccatgttggccaggctggtctcaaactcctggcctcaagtgatccrcctgcctcggcctcccaaagtgctgggattatgagcatgcctggcccgtaagtataaagttgttgatagtaatcccttactatccttttagagctgaagcaattgtagtggttatctcttgtctcatcctgatactggtgatttgtgtcttctctctttgtctttgccagtcttgttagaggtttatcaacttttattgttttttaaattttttaattatttttacttatttatcttttttttcaaagaactggctttttgtatcattcctttttctctgttgttttcctgttttcaatttcattaatttgttctttatgatttcctttcttctattccttgtgcatttatttcacttttctgagtttcctgargaaagaacttagattattgatttcaaacctttcctcttttctactgtaagcgtttaaaaaaatgtttacattataaatgtaagtgctgaaaagttcccgctcaccaccgctttagctgtatttcacatattgctaatattgagtgaaccttaatgtaaactggactttgggtgattacaatatgttaatgtagattgattgattgtaaaaatttgacactctgatgtaggatgttggtaggggtgggaagggtatacttgtaggaggggtagaggacataaggagaaatctccgtagcttccactcaattttgctgtgaacctaagatggctctaaaaaatagtctgttaaaaaaaaaaaaaaagatcagagtgactttttttaaattttgagggagagtcgtgctctgttgcccagactggaatgcagtggtataatcttggctcaagctgtcctgccacttcagcctccctggcggctgggactataagcgcatgccaccatgcccaactaatttttttttttttttttttgagacagagtctctctctgtcacccaggctggagtgcagtggcgcgatctcggctcactgcaagctctggctcccaggttcacgccattctcctgcctcagcctcccaagtagctgggactacaggcgcctgccaccacgcctggctaattttttgtatttttaatagagacggggtttcaccgtattagccaggatggtctcgatcttctgacctcgtgatccacccgcctcagcctctcaaagagctgggattacaggcatgaaccagtatggtcagcccagggtaacattttgtaaagattttttaaacatttaataaagattttataaacattttataaagatttctataaagcaaaaaaagtcataaataaaaattttaaatcaaatggaaaatagataaagaaccaggaagtgggctaattctctaatacacaaattgctcttaggaattgctaagacaaagatgagaaaccaaaaaggaaaataagcaaaggacatgaatagagttaacagtaaaaagaaacaaacatgcccaataaacacataaaaagttacagtaaaaaattaaaataaaaattttcttcctctcagattgacaaaaatgaaaacttttgataacagtatttgcaaagatgaggggaatcaagatgatagactatataaactgtataccagtactgtgtaccaataaactggtacaacttttaggaggataatttggcagcatttttcaaaattaaaaataagcataaccttttggcaattccccttctgagacagcataataaaaatatatgtacaaggattattattgcaactttgctttaacaggcaaaaacatgaaagagccaagtgattaccaataggaaatggctaagattatatatatatatgtatgtgtatacgtatatagataaagaatacagcacagcaatatgtactgatatagaaaaatgtctataagatgtagtttactaaaaaagcatatcttgaaatatacattgaatgattacatttattatacagaaagatgtccatgatatattgttcagttcaaagtgtgttgcagagcaatacatattgaatgagaccagtcaggtaaaagaaatgtgtagacacaaaaatttccccccaaaatcactggaaactgctggagttgcctctggggaaaggaacttgagaagcatggaggagtaaggagccaccctgctctgtactctttaccctgtgatgttgtctgaacacttttcaataagtgctttctaatttaaaaagaagtaacaagagtacaagcatgaaaataaaaaaaaccttttaagcataaaacaatgatgtagcaaaaagatacaagaaaaatgaattaacataattagaataagtagaatttccatttctctaacaactttggtgagatcaaattttaggaaatataataaatggcatcccaataaaccaaaagataaaaatgtatactcttcatttagcaaaataacaaatgaaggcagtaggaaacaaatatttatcgtgtatcactatcaatttagtaaatcacaactagactgaaggtttcggtcagctttaattttgtgtgaaccaattcatagtatctctatctgtttctatggaaacaactgagaccaaaaacatcacaacctcattgttgaatctcctcaaacaggaaaagagtaaggtcttttgaggtgawgaaaagctgcaaatagccttattcattagcaaatctaataataaaaatcctgggcagtatatatagagaaaacagatcatgtcagtcataaatttaaagtctttccttagtttcaaaagtaacatttaggcaagccctgttctgcttttaaaagctctattctgttatgaattttgtttactgcatttaagataatttttctttcatttataaaatgagaatagttaaagaggtttctacttacatttttaagagatattttaagcgcccctcattctgcctaagcaatcatttatttctcattctgtagatgtagtacatttgacaacaacaattagatttactgttcaacttactaggttttgtcttctgctacaagagcagactactgaagaggacatattggaatgtaacaaatgctcctaatagtaataagaaaagatgcttgtcaagaggataatgggatattgttataatacagtgatgctttgaaaaaggaaaatccaacttctaaacttcttttgagagaaatgcaacattttttctcactgaaataagatgtaatgtagatcaataacactgagtttctctgaagtaagaaaaaaacaatagtaatcaggatttaaagacagatacaaaaaaaaaaaaaataggtgactatttctttcattccaaagcacataggattattcaagtctattttctacctcaaaagccatcagcagaaaataggctgatctcaaattttaaaatcattttggctgggcacggtagctcacgcctgttatctcagcactttggtaggccaaggcgggtggattgcctgaggtcaggggttcaagatcagcctggccaagatcagcctggtgaaaccctgtctctactaaaaatacaaaaattagccgggcatggtggcaggcgcctatagtaccagctacttggagggctgaggcaggacaatcacttgaacatgggaggcagaggctgaagtgagccgagatcatgccagtgcacttcagcctgggtggcatagagagactctgtctcaataaataaataaataaataaataaataaataaataaataaaataatttttgacttaatgtcttatctttaaattttatttatttatttattttacagatgggggtctcactacgttgcctaggttggaatgcagtggctattcacaggtgtaatcatagcatactatctacagttacaaactccttgggctcaagtgatcctcctgccttaggctcccaagtagctggaactacagacacacatcactatgccctgttgtcttatcttttaaaacaatctatgtgtgtacacacaaacacacacctgagatggagtctcactctgtcacccaggctggagtgcagtggtgtaatcttagctcactgcaacctctgcctcccaggttcaaacaattctcctgcctcagcctcccaagtagctgggattacaggtacacaccaccacgcccggtaattttcgtatttttagtagagatggggtttcaccatgttggccaggctggtcttgaactcctgacctcaagtgatccgtccacctcggcctcccaaaatgctggaattacaggtgcgagccactgtgcccggcccctaaaataatctgtcttttcagtcagtgagctattacgaaattaaagaacagcgaaattttaattttatgtacctttctaagctgttagaaaaacaattgaatccgatacctaattgggttggggaaaggcatcaggaacagaaagtaaaaaataataataataattccaaccttccttataggaattccagcagggaacactaagaaaagcactctgagcacaagactaaacaagcatctttcacaggaaaaaaagagaagctaacgttcatttactgtctattattcattcatttcttcagttgacaaaaatttgtcaattgaagattcagcaatgaataaagactaaacaggtctctactcaagaagatttccttctagtgggagaaacagacaacaaacagaaaaacgaattaatgagataatttcacagtcatgagtgaaacggatttctagccaagatggttctgtatgttcatactttggggatgtctcccttctccaaatatagagcaatgagagagaaaatgcaaatgtgaaaattaaaaagatacagtcatgctcaaaaccaagattaacatcttcatggaacagaaacaaataatggtaaggagaggctgaagctgtggacctttggggctctgggtacagaaaatgtcagagaaaatcaggagctcaactgctgaaggctacagtgtcaattcaagataggagtgctgaatatggatccctgcttgagattatgctcaggtattaggatccccacttacaaaggaagctgaaataacctgtcatcagtcacagcctggggttgtggcttctaaaagtattagactcggataggtgagagaacacaaacctctctagcaattaaaatacagcatcctttggtctagggaccagatctgcaatatctctgataccagcaaaagaaagcaatcccaagctgccagtaagtcctgaatgtggatgaatagttctgggtgtcaggaggaggcaaaatgaaagactgttaagcaggaaggagaaaggacacagagagaaagattaagaaacaaaaacaaaaacttgagctactcaagatgagcttataatccaatactctaaaacacagaaagaaaaccaaattcactcctgaaaaagtcaatataataaagaaatataggggccaggtacggtggctcatgactgtaatcccaacactttgggaagccaaggcgggcggatcacctgaggtcaggagttcaagaccagcctggccaacatggtgaaaccccatctctactaaaaatgtaaaaaattagccaggtgtagtggcgggcgtctgtatacccagctacttgggaggctgaggcaggagaatcgcttgaaccccagaggcggaggttgcagtgagccgagatcatgccactacactccagcctgggtgacaagagcaaaattctgtctcaaaaaacaaaacaaacaaacaaaatatatagaaagtatttaaaactgagtacacgtagtcttaaaagataatgaaaaggataacatttaatttaccggaataaatcaagaaataaaaacaggcagatatgaaataagtacaaatggatatacttaagaagcaatgagaggttctctaaatgaaaaatagagttattgaaataaaaacctggcagaatgtggtggctcatgcctgtaatcccagtgctttgggaggccaaggcgggaggatcacttgaggccaggagttcgagactagcctcggcaatatagtaagacctcgtctctacaaaatatttttaaaattagccaggcatagtgatgcactcccagctgcttgggaggctgaggtgggaagatcgcttgcacccatgagtttgaggttacagtgagctatgatcattccactgcattccagcatgggcaacagagggaaactctgtttctaaaataaataaataaataaatacctcactagacagaaaaattctaagtgggcacctacgaaaggagaataaatgaactgaaagatgatctaatcacaatgcagcatggagatatgaaacaaaaaaaagttttaaaaagctgctgaaagccattaaaaatgacagagtaatccaatgtatatttaacggaaattaagcagaaaaagtgttcaaggagatggaggaaaagtaatgttttaagagctatatgctaaaattaaagatgtgagttgtcatgtgaaagtgcaaacaggagttaagtagatactatgtctgagaaggtcgcagaacactgcagaaagaacagcaagtcctgcttctggttctggtggctccctctcacaagatcaacccaggaggtactataaaggaacgacatcaaaatgagaagaaaactgaaaggcccccggggagacacagagctcttttgaactggtaaatgtgtgtgagagtgagtaggggtgtcggtgctggctttatcctgggacggaaggaagggagtctgcagtgacaagataacataggaagaaaagtatcataatgacactccatttgctgccctgcaactggcctccacagctactgggactcaggcagctgtactcaggagtaccttccagtctgtgcagaagccgagtgggcaaggagctgagaaaatctgggggcgactggggtaggcttgggaagatgcttcttcacccttcctcttcctgtcccccaggtgggcatgtggtttgcaatttaagaagtgtctccccctaaggctacttcttcttggggtattaagaattaattcataacttgaggcattgatccttagggtgagaaatgatcagcttaggtcttatggggrtgaaggggaagaaatactcttcactctmgagtccatttccttcacctcccacttaagctgatagggagcagacagattaagctctagcctttagcaatacttaaaaaaagcagccattacctctaaagataaccagccattggaggagcataactatttcaaaagaaaaattaaaaactgaatcactgatttcatcagaagcccagatattagaaaacatagaccaagaatttaaaataaatttactaaacataccaagataaataaaaagggatataagtaatatgaaacaggaagacatgatataaagaagaaacataaatactgaatattacatataaaaatagaatagttgaaatagagaatatagatgatatttaaaattgaatggatatagctgagaataaattactaagctggaagatcaaattgaggaactcacagaaaaaagaaaacaaatagaaactataaagaaaagtgaagagatataaagatagagaattactaatatccagataataagagtccaagaaagataaaaaagtgaaaatcaacagtagaaaatgattgaagaaaaatcgagataactttcacaggactaaatagagatgaaaaatcctccaactgaaaagtcccatgggtgagaaagaggaaagaaaagaaaaccacacttacgcatactgtagtaaaattaagtcttttcaacaaatagtgttgaaacaactggatatacttgggcaaaaaaaaaaaaaaaaaaaaaaattaaaagccctttatctatacacttcacaccttacacaaaaattaattcaaaatagatcacagacctaaacgtaaaacatgacacttttaggagaaaacctgtgtgacattgtttaggcaaagagttcttagatatgacaccaaatgcatgattttcaaaaactgaaaaatttgacttcattgaaatcttaaaattttgctctgtgaaagatattgttaaaaagaaaacacaagccacaaacggagagaaaatatacacagatcacatatctgacaaagaacttatatccagaatatgtgaagaactcaaaactcaatggtaaaaagaaaaccaattcaattagaaaatggataaaagatgtgaacatatgaataaggtcaaagataagttataatgccacaaataagcacatgaaaagatattcaacatcattagccatttggaaaatgcaaattaaaatcacaatgagatatcattacagacctattagaagagctaaaattaaaatagcagtaataccaaaagttggttaggatgcagagctactggatcttttatgcattgctcatgggaatataaaatggtatagccactctggaaaatagtttgactatttttgcaaaacttggcacacacttaccgtacaaccctacaactctctgacatttatccccgagatatgaaaacttcacacaaaaatatgtacacaaatattcacagcaactttattcatcatagctaaagaaggaaacatccgaatattcttcaatgaatgaatggttgaacaaaatctggtatatcctgacagtggaacatactcagcaacaaaaagggatgcattactgattcatgtgacaacctgtcggccccccaggagcattacactgagcgaaaaaattccatctcaaaaggctgcatactgtctcattccatttatataacgttatagacatgacaaacactgcagagatggagaaaatattattgccagaggatgagttgggagtggggtgggtagcacgaggcacttcttttgtggtgatggaacagttctatctcttcattgtggctctgtttacacgtatctatacatgggatataattacatagaaccacacacacaaaaacacaaatacaagtttaaaaatctgaacagtgaattgaaaagttgaacaatgaataagggctgcaatccagttggtactaattaatataccaatatccgttttctggttttgatgttgtgctgcaaccatacaacatgccaacagtggcacaagctgagagaagggcatacgggactctgtactatttttgcaacttcctgtgagtatacaattatttcatagtaagaattctttttaatgggtagaaaaagactattcaacaaattaaatattgcctatccacaagggtacaaagaaggactctatcttctactatacagaaaaattctagaggacataaggacctcaacacttagaagaaaaaataagagattttattatattagggtaagaaataatttctcaagatttttttaatagcacagaccataaaactttgataatttgaccttattaatatttaaagccttgaataacaaaagacaccaaaagcaaagttaaaagacaagcacaatttctcttggaacacatgaagctgcaaaagacaaatttaaaaaaaacccaaaacataaaaacacatcatccgctagggcctccagaaagaacacagccctacggacaccttgattttagcccagtgagccctgggtcaggcttctaacctacagaagataataaatttgtttgttttaaggcacaaaacttgcagtgatttattacagcagctataggaaactatagacttacctctgttgatttccaaccatgaatcttgagtggaagtgtttcctgggacaacatagtttctgtaggcaaatgaacatcttggcaatgctcttgtttcaatcctgccttgcacacatttcctgtcaacaatataaagcttaagattttactttggcaaaacacagttatgtttttatattagttcccaatttgtaagttaatcacttctgaagatacctttttttcctgctaaatataaaccatctgccagtggtaacctatgagtgttaatcactttaatatgtctctttgtaataagtgagaagttcagactgattttaaaaatacaacttaaattcttaagaaaataaaattattttctttatatttgacaaatattcatacaaatttataatgcacttatgtggttttgattgactgcatactaacaataattatgataagtcaatctagaataaatattaaaatctttggtcagagaaaatttagaaaaataatttaaattctagccctttcctacatcaacaactctgttataacattacttagtcatcttttctaaaaaataaggtttaatgtagtatagaaaatagagtttgaaaaagtgaaaagtattcaaataaaattttagcaaagcaggaatgagaactgtaattattttaattaatattttaaagaactttattactgcagtgtgaatttgatgtgttctaagagaaactaatcagaaatgtatagattattagataaaagaactcaacacaatttttaaattttgatttgaacataaaagaatacacctgtgatatggtttggatttgtgtccccacccaagtctcatgtcatattgtaatcaccaatgttagaggaggggcttggtgggaggtgattggttcatggggcagatttcccccttgttcttgtgatagtggattctcatgagagctggttgtttaaaagtgtgtagcacctcccgcttcgctctcttcctccttctccagccatgtaggacattcttgcttcccctttgccttccgctatgattgtaagtttcctgaggcttcctcagccatgcttcctgtacagcctgcagaaccataaaccaattaaacctcttttctttatcaattacccagtctcaggtagtcctttatagcaatttgagaatgtactaatacaaccagtgaaaataaactgatatttctgtttatatctttttgctaaacaatatttttatagtcctaatctttcccttgctatgttaattactatatattagtaccaactctaaaaagtctaatctgaaagtattagtaccaactctatctcagcatatcattgggcacaataaaaagtataagaaaaactaccttcaaattggtatatacacactactggagatatgtaaagatttcccaagggctaggtgggcatagatagttttaaaggaagcaatttccagatccgcaacttccacctatgttcttaccaaaaactgatctgcctgagaatgcaactatgcagaggtatcaggctagttctttcccctttccctctaataatcaattttctcccattttacaaaagaaaggcatatcttcacccatcttattatgatatcttcccaagcataagaacctctaaggcaccaaataatagttaaaaatacgaacatagaggaagcctcctttaatcaaagcagaaaaaaactaatggtctgtctgtccagacatttcttttaatgggaaagcatggcataaataacaaggtattttggtccacaccagcatgtttggtattctgatatattacagtacgaggcagcaggacagatgacaagttttgtttaatgtccttgtgtttttcattcctcacctattatcaaagaatgcattattcctaaggaagagtcccctgagagtaaagccaggcaagcatgagaggcaggggtgccatatgtcaccaatgcaacaaactcctgatgaggctgcatgcctttgccatccatcttaggaaaggattcaggagtgtgaagacaatcaggacaacatctgtttatacatttatttgaataaagtaagacattttctgaaggaaactttaaatctgatttggctagttgtcttaacaatgagagttggctttaccaacctagattatatggtaaatattttccaaaaattgaatgaaccaaatctgaggttctgtagagttgatgaaagtatatttacagcatatgatacaataaaattattttctcaaaaaattgtattgacagatatactgcaattaatattttaatttttctcacactttctgagtatattcggttaaattaaagtataacaggtttaattaatagttatttaataaattttagtatgaatttttttggtattcttcccagaaattgagaaagtaaattactccttatgactgtttaacaagtctttttctaagtagggtgtttctaattctttgcttttagcaacactgaaaaatgacttcatcaagttaacagtcaacaagagataaaaatatattttataataaatcactatataatttccagcatattacttggaagaaattcatagaattgactgacactattataataaagcaccttcttgtcccatctatgatttaggtgaacaagttttctcagcatttatctttatacaaatataaataaaatagaggcaggatttctgctgagccctgcttgtagctagcaatcagtcacactcctatgtgggcaaacgagcagttccaattatctcataaaaccatatatttctaataaaattatatttaacaaatattcatacaaatttataatgcatttatgtggttttgattgactgcatactaacaataattgtaataagtcaatctagaagaaatattaaaacctttggtcagagaaaatttagaaaaataatttcaattttatatctatttgatgtagagaagatttccaagcataaaaatattttatattagaataaaattctgcaagaaatgtagaataaacatatgacttcagagagaaaagggaataatgtaaaatttctaacagttaaggacttcatgtatttttttttaaatgaatgactacagttatcaatcacaatggtatttagattcccttagatacatttaaaagatggatataacttaacagtttgcttgttttttcttttcttttgtccttaatgtcaatatttacaacgtgccagaattatatcctttgcagttatttatacttataaaacttcatatatcaactcaaaaatgtgtgaggaggtacatagtgtttcaaaatcattttaggggttatgcaaaacaaaaaaaaatactgaaaagcggtaatataaggcacagtctttaccttctagaagtttatagcctgactaggtatataagtctaacatacagacttacaggaaacagagaacaattatatgctaaacgttcttgaattaattaattttaggaacagatactctaaggaggaaaacaacaatgtgcaccagagtaatcaaaaacaaccacaaagaggaagtaaaatttgaacaaggctttgaaggacggctaggattccaataagggtagaggcaaagataaattactccgagcagaaggacctacgtgggcaaagggagaaagtatggtagatgccagagatactgaagaaataagaatctttcatttatggttgtaacttttcattttgttttaacttcacataaaagtgaataattaaaatgagcttatttggggcttggagattttgtagctaatattggcaaagagtggtgacttggggcttagatcatctatctactttcactggatttaatcaactacattatcacttgctcggcattcagcaactaaattatcttggaaatcatatggtcttaggttttagacattacagaagtagattagtaaaaatgtcagatggtcaattttgaagtaaattttgagagaaactgaagaatagcaagaaatgtgaaagaaaaaatatcttgcatgttggagatgcattttggcctagaatagcctaaatgtagtaaacctatcttatgaggcaagaaagaaagcaattagaatatagtgggtctatggaaactcattaaatttttctttcagtatcagatagcataacactggaagtgaggtgtgcttaattagatttggtaattacacaacatttatttctggattttcacaagcaagtaggagagaacatacatttagttccttatagttccttagtggaaatgagatccctttggtcttgtaagctacttatcaattgacactgtgaagtcacaagccagtgaagactagtatgtgaatgagaaacctcagaggaaaaagtaatgatgctgcaggaaatgaagccattgagtcattcaaagatgagtgcttcgataccaaggttgtaagtactttgtggaaactatctagaaagaagctgtacatcccactgagcccgcaccactcagataataccacaaagcagaacttgtgaaccctccgatatttcttagatgagatatcaaactgacgttcaaattatcaggcattagcaatgcaccatacattttggaaatgcaacgctccataagttgaacagatttccaaattgttccatttattatttagcatataataaccatgtccttttaggtgtaatgtaagtgaattaaataatttgcttaaaaaattaatttttagtaacagacagatatattgcattatagaaaatattcagtgggctaaggaagagctagtaagatctaaaagtcaagtctcatggtgcttaaatttatatctaacttttacagaattgtgaatttggaaccttgactccaatttcgttgttttggcacatagttaagcatctttttttttttttgagacggagtctcgctctgtcgcccaggctggagtgcagtggcgtgatctcagctcactgcaagctccgcctcccaggttcaccattctcctgcctcagcctcccgagtagctgggactacaggcacccaccactgcccctggctaattttttgtatttttagtagagacagggtttcaccgtggtctcgatctgctgtcctcgtgatccacccacctcggcctcccaaagtgctgggattacaggtgtgagccaccgcgcctggctaacttaagcatcttaaagtagttggtatttgtcatattttttttaactttgattttgtaataattttaagcttacagaaaagtaacaagaatagtacaaagaatgcccatatggtcttcatcccagattcaccaattgttaacattttgccccatttgctttattctctattctcattatctatttatgtacacatattattactgtcctatattttaaatctagaggaaaagccattgtaggttgggttccctaggaaacagactctcagactcagatttgcatgtgggagagccattagggagcgctcttagaaactaccagtgagtctaagtctctttgtaggtcactcaggacttgctttatgaatctgggtgctcctgtattgggtgcatatatatttaggatagttagctcttcttgttgaattgatccctttaccattatgtaatggccttctttgtctcttttgatctttgttggtttaaagtctgttttatcagagactaggattgcaacccctgcctttttttgttttccatttgcttggtagctcttcctccatccttttattttgagcctatgtgtgtctctgcacgtgagatgggtttcctgaatacagcacactgatgggtcttgactctttatccaatttgccagtctgtgtcttttaattggagcatttagtccatttacatttaaagttaatattgttatgtgtgaatttgatcctgtcatgatgctgttagctggttattttgctcgttagttgatgcagtttcttcctagtctcgatgatctttacattttggcatgattttgcagcggctggtactggttgttcctttccatgtttagtgcttccttcaggagctcttttagggcaggcctggtggtgacaaaatctctcagcatttgcttgtctgtaaagtattttatttctccttcacttatgaagcttagtttggctggatatgaatttctgggttgaaaattcttttctttaagaatgttgaatattggcccccactctcttctggcttgtagggtttctgccgagagatctgctgttagtctgatgggcttccctttgagggtaacccaacctttctctctggctgcccttaacattttttccttcatttcaactttggtgaatctgacaattatgtgtcttggagttgctcttctcgaggagtatctttgtggtgttctctgtatttcctgaatctgaacgtcggcctgccttgctagattggggaagttctcctggataatatcctgcagagtgttttccaacttggttccattctccccgtcactttcaggtacaccaatcagacgtagatttggtcttttcacatagtcccatatttcttggaggctttgctcatttctttttattcttttttctctagacttcccttctcgcttcatttcattcatttcatcttccattgctgataccctttcttccagttgatcgcaccattcaggacataggcatgggcaaggacttcatgtctaaaacaccaaaagcaatggcaacaaaagacaaaattgacaaatgggatctaattaaactaaagagcttctgtacagcaaaagaaacgaccatcagagtgaacaggcaacctacaaaatgggagaaaatttttgcaacctactcatctgacaaagggctaatatccagaatctacaatgaactcaaacaaatttacaagaaaaaaacaaacaaccccatcaaaaagtgggcaaaggacatgaacagacacttctcaaaagaagacatttatgcagccaaaaaacacatgaaaaaatgctcatcatcactggccatcagagaaatgcaaatcaaaaccacaatgagataccatctcacaccagttagaatggcaatcattaaaaagtcaggaaacaacaggtgctggagaggatgtggagaaataggaacacttttacactgttggtgggactgtaaactagttcaaccatggtggaagtcagtgtggcaattcctcagggatctagaactagaaataccatttgacccagccatcccattactgggtatatacccaaaggactataaatcatgctgctataaagacacatgcacatgtatgtttactgcggcactattcacaatagtaaagacttggaaccaacccaaatgtccaacaatgatagactggattaagaaaatgtggcacatatacaccatggaatactatgcagccataaaaaatgatgagttcatgtcctttgtagggacatggatgaaactggaaataatcattctcagtaaactatcgcaagaacaaaaaaccaaacaccacatattctcactcataggtgggaattgaacaatgagatcacatggacacaggaaggggaacatcacactctggggactgttgtggggtggggggagggggtagggatagcattgggagatatacttaatgctagatgacgagttagtgggtgcagcgcaccagcgtggcacatgtatacatatgtaactaacctgcacaatgtgcacatgtaccctaaaacttaaagtataataataaaagaaaaaaaaaaactaccagtgaggagggaggcaggcaggaaggatcgggtcaagcaagcacagttgcaataactgtagcacacttgcaataaaggactcagctgatccttataggagctttgaggctggaatggctcttcacagttgtcctgccttgatgtaggattccttagctagggggcatgaccttgaacgaagaggctgtcttcagctgttgggaattcccagaggaggattcagttgagagcccacagccaacaccctcccacaactcaagagtgccttgatcttgaagcaaggatctgggagacacaccacagtatccactacagacacaatctctatgtttctgctttattgctctgcttccatttacctgagaaatgcttcaaaacacaggagatggagtgtacaattactgtacatctttcttggtagatgaattttgagattaaagatgtacaattactgtacatctttcttggtagatgaattttgagattaaagatgtacaattactgtacatctttcttggtagatgaattttgagattactaggggaaaggcatttttaaggtgaaaagagaagaataagaaagcagagatgtttaagtagatttttaaaattaaatttgaaataggtagataagaaaagtgaaaaagaaccaactttactgctggagatcttaaaaatggagttgagacaattttatttcagtattttgctaacaatagcatataaaatttgagacactgccagtagttctcacttaagaataatgagaaacagggaaattcacaaaccaagttagaagctcagctccagggacaaggaaaaataaacagtcactacaaaagcaagttttaatattcagtagctgactcctgggttaagatagcaaaatgaaactgcaacacagaattcccatcacccagtacgcaatgaggtttttttaaaaaagtcaatagtaatctaacatagaaacagatataactaaaatttctaaaagaaaaagaatcaaaataactggtggccaagcaaagaaacaagatctaggacatcccttctcccccaaaagcaatactggtaagatgacaaaaatcttagagttctcatcaatatccacatgtctggaaaaaaagagaactgaatggagaatgctttcttcccacttatgacggaggagaggtgaaaatagctagagaaaaaaatgggtgtaacagagtaaataaaggtgcttacacttcaatgggcatgaaagctacagtttgacactgaattgggcgaaggatstaaagcttgaaggcatctctcccccacaggaataggatacatacctcaactaggtagaatgagcaggacctcgtataagagactcaaaaacagaacagagttcaggtattctaaagaagaccatacatggcctcagctgagatctgctacagaaaaatggattaaaaaaaaaaaaaaagcccacagactgcagcctggtggagaaaacaaactgatctcagatatggcgggaagagtcaagaaatcactaagtgtttctgaacaaacaacagccaaagtttattgtgctgactctgtattagcccatttacttcttataacaactccatcacagggcccatgttaaccccattttacagaaggtgaaattacagcacaagggcttaagtagccagtccaaggtcatacaaccagtcaggattcaaatgcagacagtatggctccaggacctgagcccttaaccgttatactctaccaccttcaagagacagtgcctagtgagagctgcctaagcatcagcaagatgtgaagaaatggcctggcaactaaacaaacacattccggtagaaaaacgagcagagaaggagggaaggagaagcatgaaagggaaagaaagggagatggcatgcataaaagaaagatcccaaatgcagaagaaaatgtagctcaagaaacagaaggaaaattcctcacaatatggcattcatttttgaagttattgtaaattatatctttcataaaattcrtaattgtttcttgtcactacataatacaaagctaagcatttaaaaaatgtttcttggccttacatgtttcctgtttttctagaaatgattttcatatttgcttcctctttttctgttgagctactcttttctcattgatctgcaagaattttttatatattctggatactaatcctttgtcagttatatgcgttggaaaattttcccattttgcggctttttttttcacttttacatggtgtttttttttcccctcaaaatctactacaaaactatagtaatcaaaatagggtggttctgacacaaaaccagacatataatctgttccaatggaacagaacagagagcccagaaataaatccatgcatttatggccaactgatcaacaaaggtaccaagaatacacaatgggaaaggacagtttctttgataagtggtgctgggaacactggataatccaccacacatataaaaatcaactaaaaatggataaaagatttaaaatgccagacctgaatctgtaaaactactagaagaaaacatagggaaaagtttctttttgagacagggtcttggtctgtcacccagattagagtgcagtggcgtgatcacagctcactgcagcctctaccgctcaggctcaagcgatcttcccatttctgcctcctgaatagctgggactgcaggcacatgccaccatgtccagctaatttgttttttttcttaagagacagggtcagatgagtaggttgcgaaaattttctcccattttgtagattgcctgttcactctgatggtagtttcttttgctgtgcagaagctctttagtttaattagatcccatttgtcgattttgacttttgttgccattgcttttggtgttttagatgtgaagtccttgcccatgcctatgtcctgaatggtaatgcctaggttttcttctaggttttttatggttttaggtctaacgtttaagtcctactcatctgacaaagggctaatatccagaacctacaatgaactcaaacaaatttacaagaaaaaaacaaacaaccccatcaaaaaaatgggcaaaggatatgaacagacacttctcaaaagaagacatttatgcagccaaaagacacatgaaaaaatgctcatcatcactggccatcagagaaatgcaaatcaaaaccacaatgagataccatctcacaccagttagaatggcagtcattaaaaagtcaggaaacaacaggtgctggagaggatgtggagaaataggaacacttttacactgttggtgggactgtaaactagttcaaccatggtggaagtcagtgtggcgattcctcagggatctagaactagaaataccatttgacccagccatcccattactgggtatatacccaaaggacacatgcacacgtatgtttattgcgtcactattcacaatagcaaagacttggaaccaacccaaatgtccaacaatgatagactggattaagaaaatgtggcacatatacaccatggaatactatgcagccataaaaatgatgagttcatgtcctttgttagggacatggatgaaattggaaataatcattctcagtaaactatcgcaaggacaaaaaaccaaacaccgcatgttctcactcatagatgggaattgaacaatgagaacacatggacacaggaaggggaacatcacactctggggactgttgtggggtggggggaggggggagggatagcattaggagatacacctaatgctaaatgatgagttaatgggtgcagcacaccagcatggcacatgtatacatatgtaacctgcacattgtgcacgtgtaccctaaaacttaaagtataataataataataaataaaaataaaaaaataaagtcagctgattagcaaacttaaaaaaaaaaagacagggtcttgctgtgttgctcaggatggtctcaaattcctgggctcaagaaatccttccgccttgatctcccaaagtgctgagaggcatgagtcacctgtaaaggcatgagctaccacacccaacggggaaaaacttcttgatattgatctgggcaaagaacttttgtatatgaccccaaaagcacagaaaataaaaggtaatacagttttattagttttctaatggtgctataagatcatttgttctaatgatgctataacaaattaccacaaacttagtggcctaaaacaacaaccatttattatctcgcagttctgtagtcagaagtgcaggcaggttaaatgggttctctgtttctggtttcacaaagccaaagtcaaggcrttggccaagctgaactgtcatctggaaaccctagggaagaatccacttccaagttcaatccagctgttggcagaattctgctccttgcaactgtgggactaaagtccccatttccttgctggctggcaaccaggggccactctcaccttcgaggccacttgcatcccttattactccatcttcaagccaacaatagtgcttcaaatccttatcacacttggaatctttctgactccctcttcggccaccagctagagaaaactctctgcttttatttttttttaattaattaattttttttttttttgagacggagtctcactctgtcaccaggctggagtgcagtggcacaatcttggctcactgcaacctccgcctcctgggttcaagtgattctcctgcctcagcctccagagtagctgggattacaggcatgcaccaccatgcccagctaatttttgtatttttagtagagacagggtttcaccatgttggccaggatggtctcaatctcctgacctcatgatccacctaccttggcctcccaaagtgctgggattacaggcatgagccacagcgcccggccaactctctgcttttaaaggactcatctgattagatagggcctaccagcataataccttttttgccttagaatataacaatcatgggggtggtaattcatcatattcacaggttctgtccacgctcaaaggggagaggactgtatataggcaagggtcatggggcttatcctcaaaactctgcctaccacaaatgtcaaattcataaacacttttaaaaaataatgtgcactttttctgtttatgaaatatttccctatttcaatgtaaaaaatatattctaaattttcttctaaacgtttcaaagttttgcctttttacctttaaatccttaattcatccaggttagagacctcatttcatttttacaatatggataaaaaattatccgagtattatttattgagcagttcagtttttctccactattcaaaaatgccacttctgtcatttactgattccatagtggcccaggtctgttttctagggttatggtttgttccattggtccatgcacctatcctgcatccataccacagtgtcatgatcagtaaaattttagtcttgttatttagaaaggcaaaccctccaccttactctattttaggaatgttttggatactcttgaacttttgattcttccaggtaaattctggaatcagtacatcaaattcaactcttaaaaccctttttggatttcgattgtaactgcactgaatcagcggttctctactgggaacaatttggcccccaggggacatttggcaatgtctgcagacttttttgattcaatacaacagaaagggatgtttgctaatagcatccagtgggtacaggccaggtatgatgctaactaccctacaatgcayagctcccacaacaaagaatgatctgtttcaaaatatcaatagtaccaaggctgagaaaccctccactaaatctagacaatttggagagaactgacatgtttacattattattttgataaacatggaatatctttccatttatataggtctttaatgtatttcaattaaacattataacctacagtgtacagattttgtacttcttttgtaagacttattcctaaatcaagatttttggctattataaatggtatcttaaaaattatgtttaatatttgttactgatatatagaatataacttgattttatgttttgatgttatagccagccatctttctaaaactcactatttttagtatgtctgtagatctttcgaagttttctatatgaaaatcctatcgtttacaaatgatgctcgtttcttccattttgatactgacatttttaatttctcttgcttgttttactgtgatggctaggacctccactacaaagctgacgtagcaaggagaactgatgtccttttcttccaccttattctaaaagaaatagtcccacattcaaatgtatggaaattttttatttatattttttgttaacttcaaatttaatggtattttggtaagaaaacgtgtcctctatgaaacagatttttggaaatgtaaagacttcctttataacacatatcatcaattataaaatccatattaaaaaaagtttcatgtccttcacctatcaataaagatgttttgaaattatctactatgatggtagatatttcaatttattcctgtagttctaccaacttttgctttatatactttgaagttattttactgggtatattcacatttagaaatactacatcttcctgggaaattgagcatcttattattatccttaatgctcttggctttaaagtctcctttgcctgttattaagtagctacaccagccttcttttagtttgtatatgcctgacttacctttttccatacattgctttcaatctttatgtgaatttatgcttgcagcatatatctggatttctctttccccaatctgatagtctctgccttttaataggtgagtttaatctattactatttactgtgattattaatctatctgggcttatttctattatttattttactttttaatttccatttgttccactttatgctttttgccctttataaaattttatttttttctcattctacttcttcttgctacttgtctggaatttatgcactctatttctcttcttttaaagtttattcttgaaagtttatcatgcacgtttacctttaaaagtttacagtcaaagaatattcattaccttctcttaaaaacacaaggacctttagaacacaactctggacctgcccacccccacttacataccgtggctacccactattctagttgtctttttcttaactcaaaaattagatttatatatcaaatgtttattatacatacgtatctatatttatgtgtgtgtttaccatttattcattattctctcttgaattttcaactatctttctggaataattttcctctttttgaagtataccctttaatgcaggtctcatggttgtaaactctcttcgtttttttattcatctataaataactatttcaccctcacccttaaatcatagtcttgctggtacacaattayaggctgttattttccttcagcatttctaagatactatgtcactgtcgtcaggcttctactgtagaagatgagaagctttctggtacagtaattaattgtcattcctttgtagcagtatcctccatatggcttaattaatattactttcatattttccattttctttaggcatatcttctagctcactaaatacatttttttagttcagtagtatttctcatttctgcaagttcccttttttcaaattcatccattcagtcctaataatctcttgataactggtgatgcatgcgattatatcctttatttatgtaaatacacagctgttctgtatctgacctttccaatatctacactctttgggggattaagtatgttctttgctgcttacctcctcctgttttggtgatattggattttgagctcattgcttgtcttaaactggtgaaaatcctattggacttaacttatgaaatgagtacactttctcaattcagtccccttgagggtctgggttcagcatagtgacccaaggctttccttcccaatgctcaagacagcccccaaactcattctctgatctactaacaactgctcttaagcaactcaacccctacagttacctgcagcttcccacaggcagaatgccaagtcactctgacttcagctcacatgtactgttcttattttattttacatttttcaaaaagagaaacttagagacttcccatacttcttgtgaggccagtagtgtcgcaaatagtgtgtcacttccagtctttggttattgtgcagtaaatggagttcctagtctcattgcctgaaggagacctttaatattttttactaaaaaacagcatataattccatttttataaaaataatttctctctagctatccatctctctatatgcatgtatagattttttaaaaatgctgtccaggcatgatggctcactcctgtaatcctagcactgtgggaggctgaggcgagcagattgcttaagccaaggagcttgagaccttcctgggcaacatggtgaaactttgtttctaccaaaaaaaaaaaacccaaaaacccaaatttagccggtgtggtggcgcatgcctgcagtcccagctacttgggaggctgaggtaggagaatcacctgagcccagggaggtcaaggtggcagtgaactgtgatggtgccactgtacttcagcctggacaacagagtgagagcctgtctcacaaaaaagatgcctagaattgcaatcatctgatattaatgatggttatttctgagtaattatataacaagcctatattgtttttacaagagtataatggttttccgaaacaaaaataaaaaagaaacagttatgcataccctaacaacagggatgctttctgagaaatgcattgctaggcaatttcattgttgtacaaacatcatagagtgtacttacacacattgagatggtagagcttactatacacctgggctatatggtatagcctattgctcctaagcaatgaacttgtatagcatattactgtactgaatgtggtaggcaattgtaacacaaggacaattgtaacacaatggtaagaatttgtgtgtctaaacatatctaaacatagaaaaggtacagtaaaaatataatcttatgggaccagtatcatacacgcagtccaccattgactgaaacatcattatatgacacatgactattctgagatgttaacagtggtcggtttagggtggtacagatacaaattatttttatatatttatttttaaatttaaaagatcagctgtttgacatttatcaatgcaaatgttttagttacaaccacagtttgtaccattagccctgccatctcatctacatgtggcaaggcaaccaagcatgactccacatcaactctgttagtacaaagctctttgtaggaagtaacaacatcaacgttgctgttttttattataaaagcatgacaactactttgcagtacagcaagtcctcatttaatgatgtccatagtctcttggaaattgctactttaagggaaacaatgtataatgaaaccaattttaccataggctaattaatataaacaagaactaagttcctacagtgtatttctagtcacaaaaatttcaccaaacttaaaaataaagaccaaaacatttgggaggccgaggcaggcagatcacaaggtcaggagttcgagaccagcctggccaatatggtgaaaccctgtctctactaaaaaaaaatacaaaagtgagtcgggtgtagtggcaggcacctgtggtcccagctacttaggaggctgaggcaggagaatcacttgaacctgaggggcattgcagtgagctgcaatcgtgccactgcactctagcctgggcgacagagtgagactctgtctcaaaacaaacaacaacaaaaaaaaccaaaacacttttattcttcttcttattattattttttgagatagagtcttgctgtgtcacccagtctggagtacagtggcgtgatctcagctcactgcaacgtctgcctcccaggttcaagcaattctcctgccttagcctcctgagtagctaggactataggcaactgccatcatgcctggctaatttttgtatttttactagagataggggtttcaccatgttggccgggctggtcttgaactcctggcctcaggttatctgcctgccttggcctcccaaagtgctgggattgcaggcatgagccactgtgcctggcccacttttattattaaatgttgaaataaatgtgagctatacatacatttaaggaagattagtaaaaataagtaagatgattcatgtgctcccttcagggtcacaggtggctggagcccatcctggaagctcagggcacaaggtgggaaccatccctggacagggatgctgcttcattgtggggtgcactcacacccactccacactcacttggattgggaccattcagacatgctgattcacccaccgtgcacatccttgggaagtgggagaaaagcagagaacatggagaaagcccaggcagacagggggagagtgtgcaaactccacacagacagggacctcagccgggaattgatgtttttctcatcagttataacaacattgaacaaaaggatgttattcaaggacctactgtataattttggttcaacagcaatgatagttttcagggaaatttttccatgatatggaatgctattacatttgacacagaccagagtaatccttaatacaggtaaagttctgttgcaaagaatgatgctagtgaagagctctttatggaagatcagatgaccaacacaggtaaagttttgctggtctggctgtaagtagtgcctctggagatcatttttgtaataactgttgcctctacaaaaatggcctgatgcttagagctgagttataattgtcctttttgtattgttctgtcttgccatcaagcagcaatgatccttcagtccatctcttccttcaaacttcaaaagcatcgaaacaaaaaccacccaggctatctactagaattaaaacttgggaaaacatccaagaaaagaaaaaaaaaaagaagtagaagtggtgatgtgtatataacaccttctttaaagtgcctcttttcccttgctgattcaccataaagaagggaagcacagctgtttcagctctaggtcctaaaggctggaaatcacatttcctgcattcaattttacatttcactgtaactaaataacttagagacatctttagactccttctaatgaaaatttacctgtatgatatcatcacttgcctccattttctctaatgcaaatgttagtcaatttcaatttctctcttctccagtacatcatccacttacccccattgcctctctacagtctatctttaaacactactgtttcctcatttctataaccctaggagcaggtcctggatgcctggattgaaacaactgtctcttacaagcttcgttcaatttgtatctccttcatttctacacaaagcaataagaattatcttccacaaatagctgttttcagtaataaggaagctcagttctgtgactaagctaaacattccttctgttctccaaggcctacaatggttcctagttgctactcatatcaaactgagtttattagctcatttatgaattgctctgagtactctcagctatctacccctactgttttacatattcaaatttatatttttattccatttagtcagacaactctgtattaccatgcttaatctgtgtcttgcttgtattctttaccattattgtagaaatgatttgtggtcccgagcatttattctctccatcttccttaataacagaatctcttaactttcatctgggcacatgatatttctcaacctcctttgtagctaggagtgtcagtgggactaagtactaaacaataatatgtgacttgttaaaaaaaaaaaaaagaagaaagaaaaaaaagggaagagacattcatattttcaatctcccttcctttctcctggctagaaggcagatgtgatggctggagctcaagcagcaatgaatcaaaaagtggaagtggatcatgaagtggaacttaaacgctgagtttggtggagcaatgagactcaaaaatagccctgaagccaacagtgtagagagccatatcagtcatagaacacctacaagagagtatttcagaagagagaaataaatttgtatgtttaagctgctagcatttttgtggcctctactatcataacttgtggatgcacctccttctaactaatctacctatctttgagttttaatttgctacttctcctgtcccattaagaatgtccccctcgtggccgggcgcggtggctcaacgcctgtaatcccagcactttgggaggctgaggcgggcagatcacctgaggtcgggagttcaagactagtctgaccaacatggagaaaccccgtctctactaaaaatacaaaattagccgggtatggtggcatgtgcctgtaatcccagatactggggaggctgaggcaggagaaccacttgaacctgggaggcagaggttgcggtgagccaagattgcaccattgcactccagcctgggcaacaagagtgaaacttcatctcaaaaaaaaaaaaaaaaaaaaaagaatgtcccctcaatttcttattttttcccaccccaactccaaactgtcagttttctttcttcctttaaaatacagcttcagattcaaatgcctacatggaattggttagtattgccaagtttacttaatccaattactcttttttgaacacaaacacagacatctgtatatctaggatgtactcatatagaaagcagataaatgaaataaaaataacagatttaaaacaaatttactatagattttacatccaaacattcactgttcgctttaaatggtactcttactatagatatacaataatgatgccatcattgactaaagcttttttagaacatcttttttgtgaaacatacttaaaagcacatggtagcaagatcttgtctcgaaaaaatattttttcaagtcagctgggtgtggcggtgtgtgcctgtagtcccagctagttggtaggctaagccaggaggattacttgagtccagtagttcaaggctgcagtgagtcattatcacaccactgcgctcctgccggggtgacagagcaagaccctgtctcaaaaaaaaaaaaaaaaraaagaaagaaaaggaaaagaaaaagcacacagtacatcacaagctatagcctccaatagagcagaaatacagtcaatttacttaacaggcttagaacaatgtctggcattatagtgaggagacactcaatatgtgtttgtcgtattaaaaaataataaattgtagcaaaacttcatttgaaagtggattcacttttttaaaatagtcaagtcattcatagctcagtgtagtgaatgagacatgtcataaagatggagaatatcattttaggtttaaaaacgcaatctgtggggctgggcgcagtggctcatgactgtaatcccagcactttgggaggctgaggcaggcagatcatctgaggtcaggagttcgagaccaccctgaccaacatgaaggaaccccgtctctacttaaaatacaaaattagccaggcgtgatggcgtatgcctgtaatcccagctactctggaaggctgaggcaggagaatcgcctgaaccctggaggcagaggttgcagtgagccgagatggtgccattgctctccagcctggacagcaagagtgaaactccgtctcaaaaaaaaaaaaaaaaaaaaaaaaaaaagcaatctgtgactacaaaacaataaactagaatttcttgcatgaatcataaaatcagagttgggttacttctgtatcaatttagggattcatttcttaagcttacgattcaccaggccaagtttgctccagtttcagagcatctaccctgctgttccctctgcctgatatacaggcacaccttgaagatactgcggtgggctgggttccagattactgcaataaagcaaatattccaataaagccactcacacaaacatttttgtttcccagtgcatataaaagttatgtttacattagactgcagtctacttagtagactaagtatgcaataccatgctgcctaaaaaatatatatacataattaaataatactttattgctaatttaaaaaggctaacaatcatctgagccttcagcgagtcttcatctttttgctggtggagggtcttgtctccatgttgagggctgctgatagatcagggtggttgctgctgaaggttgggaaagctgtggcaattttttaaagtaagacaacaataaagcctgcaacatcaactgactcttcctttcacaaaagatttatctgtagcatgtgatgctgtttgatagcattttacccacagtagaacttctttcaaaattggagtcaatcctctctaatcctgccactggtttatttactaagtttatgtaatattctgaattctttgttggcattgcaacaatgttcacagcttcttcacaggagtagatttcaactcaagaaaccattttctttgctcatccataagaagtatctcctcatctgttcaagtttgatcatgagattgcagcaatccagtcacatcttcaggctccacttctaattctagttctcttgctatttccgccacatctgcagttccttcctccactgaagtcttgaacccctcaaagtcatccataagggttggaatccacttctttcaaactcctgttaatgttgaaattttggcttcctcccatgaatcacaaatgttcttaatggcatctagagtggtgaatcttttccagaaggtttttaatttactttgctcagatccatcagaggaatcactatctatggaagatatagctttatgaaatgtatttcttcagtaataagacttgaaagttgaaatcactccttgatccatgggctgaagaataaacactgtgttttagcaggcacgaaaacaatattaatctccttgtacatctccatcagagctcttgggtgaccaggtgcactgtcaatgagcagtaatatttttaaagaaatcttaagggcactaggattttgggaatggtaaaggagcagttggcttcaacttaaagtcaccagttgcattagtccctaacaagagagtcagcctgtcctttgaagctttgaagccaggcattgacttctcctctctagctatgagagtcctagatggcatctttttccaacaaaaggctatttcacccacattgaaaatctatttagtgtagcccccttcatcaattaccttagctagatcttctggataacttgctacagcttctccatcagtacttgctgcttcactttgtacttgtgtgttatggtgacagttgctttccttgaacctcatgaacccacctctgctagcttcaagattttcttctgcagtttcctcttctctctcagtctttgcagaattaaagacagttagaaccttgctctggattaggctttggcttaagtgataatggggctagttggatcttctatccagaccatgcaacctttctctataacagcaataaagctgtttcccattcttatcattcccgtattcattggagcagcacttctaatttccttccagaacttttcctttacattcataacttagctaactgtttggcacaagaggcctacctttcagcctgtttcggctttcaacatgcctttctcactaagtttaaccatttctagcttttgaattaaagtgagaaacctgcgactcttccttacacttgaacacttagaggccattgtagggttattaattggcttaatttcaatattgttgaccctcagggactagggagacccaaggagagagagagagatcgggatcagtgaagcagtcagaacacacatgacatctatcagtaagttcactggtcttctacagccatggtttgtggtaccccaaaacaattacaacagtaacatctaagatcactgatcatagatcaccatgacacatataataataaggaaaaagttaaaaatattgcaagaactaccaaaatgtgacacagacacaaagtatgcacatgctatcagaaaaatggtgccaataaacttcttgggtacaggattgccacaaaccttcaatttgtaaaatatacgttatctgtgaagtgtaattaagcaaagtgcaatcgatcgaggtatgcctgtatgtgggttgctccctcacttcattcaggtctgtttgaagattcacttcctccaaaaggccctctctcattacgtgacctaaaataaacccacccctgtcactctgttccctgaccctgctttccttttctttacaggacttgttattatctgacatattttatgcttgtgacagagacatcccagtctctaccactagaatgttagttccatgataaaagaaaacttattttactcactcctatagttccaaatttctgctgaatatccaaattttaaataaattcaataattatgtgtttacaatgaaagaagaaagaactgacaaaagaaaggaagaaggaagagtaagaaaggtaacatcgaagaagcaaaagtggggaagaaactctggatgagtcataattggttattcttctctgttactctgtttttagcatcagtttgatttaaaggctcccatgagaaaatttcagaatgagtggctgtctctttcggagatttatttcaaaagaatcagatcccctaaagatcccaccacttttagaagccggtaggtagtatttgctactataattacaatggctaccctcttataatgtctctctccaatcccaagtgtggatgttcactctatgtctcactgggtgaacgtttgaaactcttgattaagacagaaaagtacctgaatgatttttagcaagcttaacttgtgttggtattactagtaacattgttacatttttgcacttaactgacagttggaattatctatttgtactgaatacaaagggacagttctctaagtcacatttcactaatgtttttgcttcctcaagctgtccatttctcatacacaacttatcaacagggtttctactggagaagttagagcaaaatgacattttttaaagttttagcaaatttggtagaaaagatgatagcatttttctactcatgtctattataacattataaataaatccctctgttataaaagttcagtagtccatatttaaagttttaagcaaaggaaagggtaaaaggtattgtcctagaataattttagagcacttttaggattctgaagcatactttagaaaatttcaattacttgatttatgttacaggatcaaagagacctcatacgcacataactagacacctagtcttagaaaactgtactccttcactttccagttaaggataaaaaacttaaaattgaatcacgatgccaaatagggtagtcactagtttaataccttaaaagctcaaaaacattttatttgaatcaaagataactgcattcagaaaacagtcataaaactgggctgggcacagtggctcacgcctataatcccagcactttcggaggccaaggcaggaggatcacttgaggtcatgagttcgagaccagcctgggcaacatgctgaaaccctgtctctactaaaaatacaaaaattagctgggcatggtgatgggtgcctgtaatcccagctactcaggaggctgagtcaggagaattgcttgaacccaggagacagaggttgcagtgagctgagatagtgccactacactccagcctaggagacagagcaagattccgtctcaaaaataaataaataaataaataaagcaaacaaataaactttaaaaaggtcataaaatcttctattgaatattcttcgttgttgttttctatagtatgaagcctaatatggtaatagtaatactaaataatattaataatttagtactaaaacataatattttatatttttaaatcatttttaatgatacctgttgcattttaggccaatgttcattatacgtacttttattatgtaaccttccaaacttaggaagcttatacttcttctctgaagcagaaatatccggtgtgggggcagaagtgcacgctgtcagtgagttacttgaaccaagttgtcttttagaaaacaatatagagtgggaggtacgctgtctagtccgacatgccacttccctctctttacacagcaatggttcatccatcagcaatgtgatgacttgcttagatttttcccggatataataacctgaaaaatacattgactctgcttagaaaaggaaatactagttaaggctataattaattttttttctacagaaatttttttaaaaataaaaatctcagcagtgaaaaaacctgcagcaaataaagaactactgataagtatattccttttcttatactttaaaaggtaaataagtcattaatatatgataaaattatatactggcattacatttttcactttaaatacattattggattttccttttaaaagcaatatatggctgggtgcggtggctcatggctgtaatctcagcactttgggaggctgaagtgggcagatcacgaggtcaggaaatcaagaccatcctggccaatatggtgaaaccttgtctctactaaaatacaaaaaactagctgggcatggtggcatgtgcctgtagtcccagctactcaggaagctgagacaggggaatcacttgaactcaagaggtagaggttgcagtgagctgagattgcaccactgcactccagcttggcaagagagcgagactctgtctcaaaaaaaaaaaaaaaaagaaagaaaaagcaataatactttgcaataatcaaacaatataggcatacaaagaaggggtatgaattagatctagatatactgacctagatgtatgaccaggacacatggttaaagatttagagtaacatacacaataggatttgaagctgtaacatatagaggaaaagaaatcaccatatatgtacacggaagagagaagcagataaagaaatacatacaactgtggtttgaatgtatcccctccaaaattcaagtactgccaatgtgatagcattaagaggtggagcctttaagaggtgattatgccatgaggtcacctcctttgtgaacagactaaaggtccttataaaagaggcttcccacagcatttgtctcttgcttgccttccaccatcgcctttcggaccttctgtcacatgaggacacagcattcctcccttccagaggatgcagcatcaaggcgccatcttggaagcagacagcagccctcactagacaactgaacctgccagtgccctgaacctggactctccagcctccagaaccatgagaaaataaatttctcttctttctaaattacccagtctgtgatactctgttatagcagcacaagcagactaagacagatagacagacaggcaagaatataggaaggcaggcaggcaggcaaacagatggcatactcagaatattgttaacatctgttaccttacaggggtacagttggggtgggacaagaaaagggagagcaattggcttttctctgacgtaacatcctatcaaaacaatttgctgctttttaacagagtgacagagcacagtcaaagacaagaattctagtgagagtgatagctctgtccttaaccatctgtgtgactttcagtcagtcaggtggtctatctgggcctgagtcttctatctgaaaagcagcacaagcagtatctgtatggttgaattcccagatacaaaggtacactgtaacctataactcactcgaatataaggtattactattttttcaaccttcttcctagaaaaacgataaaggaaatcacttacctttctccatcttgggatgaactcacaaacatggcttcccaagccacctttcaaaaataaactgaaaagtccctaatgatccacttgtatgttcattttgggctctaggtgtgatgaattaaagtattaatgttttctaactataatttactagcagtggaagtgatgagaaatggtcaaatttggggtatatttagatgacagtggccaacgatgttctctcactgcgggtcacttcattaaggactggtgtggacagtgtcagcaacctttgctcaagttgccatcttttccaagattattttatctaatctcacttcttagttatttcttccttccaaatctactttataactgcttcaaatcatatcattctaaacactcttagcttcctatgatcagtttgcattccataacccgaatttccacaatgttttgggtaaccattcagtgtcgtgtgataaacagaagtcggctgtgaattttagcctttgggaacaatatgtcagacacttatctttcccctgaaaaatggacaaagattggttttggaggcacaaagaacatgttttcccatttttaacatcaggaactcatctccttccaccttccccctcattccttctactctagctaccctggtgctttattctgcaatcccaccaagctcttcatctacttagagccatgttttggctgttgcttctgccaggaactctttgtgtggctctatccctgattcattcaggtctcaagtgtcacctcctcagagaatctcccttctgcctaccctttctaaaatagccccaccctcatcactctctattcctttatcctgctttatttttcacattcgcatttatcattacctaatattatatatttattggtttacttatttattgtttgtttcctcaccaaaaatataagctccatgaggggcagagaagtctcattttagacactgatatcttcagtgtctgcaagagtgactggcacacagtagatgctcagtaaatatttactgagtgaccaaggtggatagatcacttgaggccaggagtttgagaccagcctgggcaacatggtgaaaccctgtctctactacaaacacaaaagttagctgggcacggtggtgcacacctgtaatcccaactactcaggtggctgagggatgataatcgcttgaacccaggaggcagaggttgcagtgagctgagattgggccacagcactccagcctgggtgacagcgtgagactcagtttcaaaaacaaaacaaaaaatttaccgagtgaattaatcataaaggaataaattaccaaaaagctgctaattttcttcttgacatagtgtaactggaaccagattgatgaaaaatactaagtcaatttacaacttagctgcctaagacagttgcttggcctgaaataatttcttgtaacactgctctcattaagttagaactagaaattatagaatagatatgaaatattctccttggagtctgtgtggattggtgggatttgaggacagctgcaatagttctaagagacaagcaattacaccaagcaaagagccagttgcaatagtggaggacttctccccagatcatcagagcccctccctgaggtaggactcagcagcaccaggaagatcaggccacagcagttcaccaaacatagggaataaatcacccagaagtgagcttctgcccactaccctagcttgctatcatcctagagaaggtactagagatactagatactagcctggctgttcaaaagcatcaaagttgaaagtgagaaaatctaagaagaacgtaataaacctgcttcaaggatgagttaaataacaacaacagtaataattagcaccttcttactactaaacaatatgtttctgaaaagaaagggaggacagcataccaacaaagaatagtactggaagtagaaaacttaggcagcaaaattaagaaatggagttggaagtagaaaacatggattctctgaaatcagaaattaaactagtccaacagatcaatacccaaggatattacataaaacacatcaagataaaaaggttgttagatgaggtgcaggttaaagtgaaaataaagctatatacagttttaattgggaatcttttggctctaagtgacagaaactccatttgaactgggtaatgcaaaagctagggaaaaccaggggttgcaactgagcctcaggtacaaaggaagccaagactggaaaactaccaggacatctctcccctgccatctctgcttctctaggaaatgcttgcattttctcttcttgcaagttggcttcttttatctggatggttatggccaccaacagctctagattcacactgccacctgagaagtctccctcttcaaatttggagtatcaggagaaggactccaagtgacccagcttgaaacagtcacatgcccatcaccatggccatagggtgtgatgccacgattggcaacctcagttagagcacaacgggggcgtgagggtagggtccaggtgacagaaaaatgaacaagtagacagccaacttgaggagtcctcccaaacaaacaaaaaaaggacaaggaaatcaaattagtagagcaactatgcaagagatcaaggcccaaggacattcatttatgcagtccattaataatttctggaatacttatgtttcaggaagtattctaagcaatgggggtgcaagtcagaaaaagacaaggtccctgcacttgtgacacttacattgtagttggttgaaacagccaataatcataaacaagataatttcagataaatgctctaaaggaaataaagaagggtgatgtgccrgactttaattttgggtgtggtcacggaaagtcttgcagaagaggtaacatggctgagtcttgaatagtaagaagcagccagctctgcacagacattagggcagagtgcgccagacagggaacagctccaatttcttcaggaaagccttccacggacagtgaacaccctctcccgctgtgccctatgcagacatgggcctctgacttggccaggccctgctttcaaacactgtcacagtaccttacccttgtccttcacagcacttccacagttagtcattgcccatttggtaactgtcttttccctccaattaactgtgacatccacgaagtccagactatgcttgtttaagagacacttaagaaaagtttatgaaatgaatgaatatgctgaggaaaagttttccaaatgctgaggagaaatctacatacttttttttttttgagacggagtctcgctctgttgcccaggctggaatgcagtggcacgatctcggcccaccgccagctctgcctcctgggttcaagcgattctcctgcctcagcctccggagtagctgggactacaggcgcccgccaccaggcccggctaatttttttgcatttttagtagagacggggtttcaccgtgttagccaggatggtcttgatctcctgacctcacgatccacccacctcagcctcccaaagtgctgggattacaggcgtgagccaccgcgcccggcccgagaaatctatatacatttacagctgaccatcgtgtaaagagattgcaaatatggtaaattcaaagatctttggcattgagatgcaccactaggaaaaatatgtatcagaagatctttatactaaaacacgtgctaggcttcaaacaatcgtaaaaatcttaatactcctgtctctattcctgacctactgccctaccaaaatctactcttcttcccatattcctttctcggtgacttttatctctactctaagttagaaatatgaacatatacctcccaaattcagttatccacgtctattgactatacccactaattatcttccaaatccattctctcctcttcatcttgattcagaccttgatcatttgttgcctgtggtgtcctaaattacttacttagctttagtctcccttccaatctaccctccacaatgccttcaggtaacgcggtgggggtagaaagggaggggagaagtatctaaaatatctgatcaagtttccaggatagaaaaccttcagttggttgcagtgagccgagatcgcgccattgcactccagcctgggcgatgagagcacaactccgtctcaaaaaaaaaatccctccagtcaagttgacacagtaagttcatgcttcaaagtatccccctgttctattccaaatacacagcaataatagacactgccagtctcaaaaacaagataaaaacccccacgaagcagaaatataacagaaatgaaaaagcagtgagcgaggctgaagccaagggctgctgggctcttgatctgtcagcccagagttcagctcctcaggtgttaggaaaccacagctggtctcactctttaatgttatgggggcagtgtttgtgagagaagcctgggaagaaaaggagaagaaaaaaaaaaaatagccatcaactgcttcccgggatacaacttatttgtggctgtggatctaaaagcaggaggatacacatgcagtcttaatacttggaactaaatgaagccacctgcttgctcagcccctgggtctaggacattctagtattatcacagggcatgtgccccaagccaactttataaggcctgtacaggagggagtctagaagacctgggtagagggaactggagaaacctttattttattaaaaaaaaaaaaaaaaaggaaggaaatgaacatgagtggttgtgggaaaaaatctcccactcaaaatagcctaaacactaaaattctaaaatacacatttttaaaatctaacgctaagaaagtcagccaatgaaatcagcaatctatgtaagacctcaaactataagaatcccagaagaaaagctagaaaacaccaygctggacattgaacttgggaaataatttatgagtaagtcctcaaaagcaactgcaataaaacccaaaaattgaccagtggcacctaattcagctaacgagcttctgcacaacaaaagaaactatcagtgtaaagagacagcctatagaatgggagaaaatattcataaactatgcatctgacaaaggtctgatattcagaatctataaggaacttaaacaattaaacaagcaaaaaacaaataacccaactaaaaaatgggcaaaacatgcacagatacttctcaaaagacatacaattggccaaaaaacacacagaaaaaatgctccacatcactaaccatcagagaaatgcaaagcaaaaccacaatgagataccatctcacaccagtcagaatggctattatcaaaaagccaaaaaacaacagatgctggtaaggctgtggagaaaaggggacacttgtatactactggtgggaatgtaaattcgttcaaccatggtagaaaacagtctggagatttctcaaataactgagaactggattcaacccagcaatcccattactaggtatatatccaaaaggaaatacataattctgccaaaaatacacatgcacttgtatgttcactgcagcactgttcacaatagcaaagacgtggaatcaatytaggtgcccatcaatggtggattgaatgaagagagtgtggtacatataccacgaaatactatgcagccataaaaaagaatgaaatcatgtcctttgcagcaacatgggtgcagctggaggccattatcctaagcaaattcatgcaggaacagaaaaccaaatactggatgttctcacttataaatgggagaatgggagctaaacattgggtacccatagacataaagatggcaacaccagaaacaggactactggaagtgggaggagagaagggaggcaagggctgaaaaatgcactattgagtactatgattagtacacgggtgatgggatcaatcataccccaaacctcagcatcacacagtgtatccaggtaacaaacctgcacatgtaccccttgaatctaaaataaaagttaaaattgtaaaaaaaaaaaaaaaaccagcaatcacaatataaatccacaccaaatgaaatcaatgtttctataggatcttctatggaatctatattctatgatttgaaaaccctctaacaaagatttttaaataaagagattaatacatgactcatattgacaacaaggaatataaaagtataaaacaaaacaaaggcagatatgaaacaggaacagatggatatgaaaaaaatcaattaaaatcctagaaatgaaaactacagtcattgagatttttttaaaaaaattcaacatccaaggtaaaaaccagactagaacagctgaagatagatttggtaattggagaacagtactttatttatttatttatttatttatttatttatttatttatttttgagacagtctcaatgtctcaacctgccacctaggctggagtgtagtggcacaatctcagctcactgcaaactccgcctcctgggttcaagcaattctcatgcctcagcctcccgagtggctgggattacaggcagacaccaccaggcctggctaatttttgtatgtttaatatctttgccatgtcggccaggctggtcttcaactcctggcctcaagtgatccacctgccttgacctcccaaagtgatgggattacaggtatgagccaccgtgtccagccaacaggagaacagtactaaggaattctcccaaaatacagcacagagaggcaacaagattaaaaagattaattaaaagtcataaagaacagattataggccctaatattcstctagaggaagtttcaaaagaaaattaaggtaatagaaaaaaagcaatattcagagacaagagttgagaattttacagaaaagacataaattttcatgtcaaaaatgatctccaaagacgaagtaagataaataaaaataaatctataccagaaacacttcagaaaaatagaagaatatttaggataaagagaaaatattaaacctacaaattccttctttgggtttataatagcatacttgccattcagtcggcccatcagccattgtcagcaaatgctgatttcccacttccaccacagaaagagaagaaactgagatacaaataaagtatcctcagccctccaaacctagtaagggaggccaatgtgtgaatcaataattatggcagtgtgacagggctacaatgtatacgtggacaaggtgctagggacaagtagagggtgaccactttacagaacagtagaaaagacctccttttctactggctcatatctgtaattctaacattttgggaggccgaggtgggaggatcacttgaggccaggagtttgagaccagcctgggcaacatacagagatcccttctctacattaaaaagaaagaaagaaagaaaattagctagtcatggtggcaaacacttgtagtccccactactcaggagacaacttgagcccaggagttggaagctgcagtgagctgtgatcacaccattacactccaaccggggcaatggagtgagagcccatcttctaaaataaataaataaataaataaataaataaataaataaataaataaatacggaccttcctagtgagtatctgaatggagctttatttgaacatgaatatctgttctaggaaatgaaaataataaaagttaaaatctatcaagagctgatagtagtaactaatatcgacaggtaacttactatgtgactaactctcagacatatctctaatcctcacaaccatcctcagagttaagtccattttaccaaagagaaaagtaaggtttagggtgatgaagtaactttcctgaagtcataaagctaataaactagaaagtggaggttggctttaatttctttgactgaccttagcatatacttaccagtgatttcatttgatgagaaccttaagagagaatagttctgttgacacagcactgaaagggctaaactggttgctttcccttttttgtttactgtgctttgtcgtccatctgagtacaataaataaagagctccgtgggaagactagccagctgggtaaaagtcacatttaagcttaaaagaattcatgctttgcttcttgctatcatgattaccaacaggattacatttgttgaaaaggaacacaaggctaaatattcaactattttaaataaaagtttttggtttaaattcacaatgatacaacttctaacaacaaggcttatgatgacctaaagcctgtaacatatgtttgttaaaggaaactatttgttcatcaaaaatatttgttacaggaaattacatttgctcacttaagctataaatgaactcagaagcctgtgttaattaacccaccaaccatgagtgcattgaaattgcactaatttattaatctaatccaccatcatatattaggtgggttcaccgattagagaattctgactctcgatgtctgacactagtctgaaaattaaatctgatccacttttaagctagaatgtttcctataatgcttggcccctgtatcatactactaggaactgcctcatataccccaaatccatcccttctgtgagtgtattaatgcccccaaattttagttatttggctttatagccttgacatggctaatcaacatctagagcaatttaaaaaatatttcctattttatttttcttgaatgtattttttccagatatcttggctttattcaattcattataattgccttgaaaaggaagacctcagacattgctttttccttctattcctagggttcccgctttgtctaaacctttttcaagggccaaatacttgatgttttctctctttctatgagaatctaaactcaaaaaacaacctccccccactgcccaacaaaacctagtgtaaatataaataaatgtattatgtcttccacagtatttgcctttcatattttaatttatatctcatctatagcttaaaggcttagttcttagtctaagatattcaaaatctggtgagcaaataggtaggcaactggtatgagcacatccctgagtgttggaggatacaatgggagaggatacaatggggagtattatactaatacagaaatcggtcattagtataaatgtgaagcacctcattcctaaattaggtgactgaaaatgaaaatgaaaagctacaatggcaagaatatcaccaatgaatgctacttctagtaaaatcacttttttttttttttttagagacagggtagagtgcagtggcacaatcatagctcactgcaacctcaaactcttgggctcaagctatctttccacctcagccccccatcagccatgcctagctaattttcttttctttctttttctttttttttaatgtagagacagggtctcactatgttgcccaggctggtcttgaactcctgacctcaggaaatcctcccacagtgctgggattacaggagtgagccaccacactcagcctaacataacttttaataacaacattgaaatctgtctctttaaaatgtggccctgtttttaaaattatacctttaattgaaatgtatgtgtgtatgtgtatatgaaatagtttatttaaataaaattaattgcagtttcatgacttagctaattgagaattaaaaaaacacacaaatctataatccatacaattcctagaatctgaattggttttaaaagaatactgtaatttgtgtaaataatttgatgatattttaaaactttcatatttgattagatatttttcagataattttaattaagttcacactagtatttcagtgaaaccccatttggatatttttaagactcaactaggagaggctgtttagtatactaatagcatatgactaaatatcaggatatattatttagatgagttctaattgtgttcagccataaattggatatgtaaccttacctaaataacttaatatctctgagctttgcctccaagtctctgtaagagagaaaatacctgctcttcatttttcataagatgctttaaggagatcaaacaagatcatgcatatggaaatactctattattaaaatctaatacttctcaagcaattggataccatacagataagaatgaactctatctcacaatatacacaaaagctaattctagatggatcacagacctagttaaaactataaatatctggaagaaaacatagaacatattccttgggataggcaagtttctctgacaaggtaaaaaaggcattaaccatatgtattagtccactttcacactgctgataaagacatatcaaagactcggcaatttacaaaagaaagaggtttaatggacttacagttccacatggctagggaggcctcacaatcatggcagaaggcaaggaagagcaagtcacatcttatgtggatggtggcaggcaaagaaagagagcttgtgcagggaaactcccccttataaaaccaccagatcttatgagacttattcactatcatgagaacagcacacaaaagacctgcccccatgattcaattcctcccacagagtccctcccacaagacatggaattcacgatgagatatgggtggggacacagctaaactatatcaccataaaagaaaaacagattgaacttcatgaaaattaccaacttaaaactatttttaccccatgttctcctacaaatagatcttgagagcttgtttggaggtcctaaaaagggagtgcagctactcctatacccttgaccaaagaaaaatcctcttctatcagcaaaggtcatcctctttgaccaagaatccaactttaggagagacacacatacagcggtgaggaaggaaaaggactcctgcctagccagccagattgccctcacatccaaaatgacaaacttctactcatcataagacaacattagaaatggaaaagacaagctacagaatttttgtagcttgtaggatggcagaaaatatctataatatgtctatctgacaaagaactcatatccaaaatatgtaaaaattcctagaaatcaataataaaaagataaaatgttaaaaataggcaaaatatttgagcaggcaatacttgaacaggcaaaagatgtccttgtgggcaaaaatcatatgaaaaggcacttaacaacttttcagggaaatgcaaattaaaaccaaattgaaacaacattatactcccaacaaaatggctaaattgaaaataataacattcctaagtgttgataaggatgtgaacaacaaattctcatatattggtagtgaaatcacttaagaaaactttagtttctagtcatatttaatggtttctacaacccagaaatttcactcttcaggatataccaaagagaaccgaatgcatatcgcacaggaatgttcataagagttttattcacaataactcaaagctataagcatcccaaatattatccatcagcaaaagatggataaactgtggtatgcacatacaattgaatacaactcagcaataaaaacaaatgatattctgatatacataacaatatggatgactctcagaaacattatgttgagagaagccagaaactgaagaacacatacggtatgcttccatttatataaattttaagaacaaatgcaacaaatctatacagttaaagaaattcggtcggtcgcagcccgctcgggcccgttcgcgcccgtcctgtcggccacgtcccgcggggtggcgggcgcgctgcggcccttggtgcaggccacggtgcccgccaccccggagcagcctgtgttggacctgaagcggcccttcctcagccgggagtcgctgagcggccaggccgtgcgccggcctttggtcgcctccgtgggcctcaatgtmcctgcttctgtttgttattcccacacagacgtcaaggtgcctgacttctctgaataccgccgccttgaagttttagatagtacgaagtcttcaagagaaagcascgaggctaggaaaggtttctcctatttggtaactggagtaactactgtgggtgtcgcatatgctgccaagaatgccgtcacccagttcgtttccagcatgagtgcttctgctgatgtgttggccctggcgaaaatcgaaatcaagttatccgatattccagaaggcaagaacatggctttcaaatggagaggcaaacccctgtttgtacgtcatagaacccagaaggaaattaagcaggaagctgcagttgaattatcacagttgagggacccacagcatgatctagatcgagtaaagaaacctgaatgggttatcctgataggtgtttgcactcatcttggttgtgtacccattgcaaatgcaggagattttggtggttattactgcccttgccatgggtcacactatgatgcatctggcaggatcagattgggtcctgctactctcaaccttgaagtccccacgtatgagttcaccagtgacgatatggtgattgttggttagagacttggactcaagtcataggcttctttcagtctttatgtcacctcaggagacttatttgagaggaagccttctgtacttgaagttgatttgaaatatgtaagaattgatgatgtatttgcaaacattaatgtgaaataaattgaatttaatgttgaatactttcaggcattcacttaataaagccactgttaagcactgttatgctcagtcatacacgcgaaaggtacaacgtcttttagctaattctaattaaaaattacagactggtgtacaagatacttgtgaaatctgtaactgactttattttcttgcccaaatatttgcttcctgctttgcgtcagggacgcagattctgcaaggtcattgttgggatgaagtaaaattaacgggtcatctaaaaaaaaaaaaaaaraaaagaaattcaaaaagtagttgcctctggagaggagggaaagcaagcagggatgaaggaactggatgaggtgattaaaatgttctttattgtgctatgggtgatggttccactcatccaaattcatccaactgtatacttaagatttaagtatgtcataatatgtaaattatatttcaataaagtggttagcataaaactattttaaaaagtaatttgtagtgaagaaagggaaatttttgtattagtcaactctgacatttctattttttatctttctaaaaaaagtcaattgctttaaatttgctaaaggtataaaaatatcaaggtattaatcattcattcatcaaatatatattgagtgatcctaccccaaggcaaggtactaagtgctaggaacactgttcttgcccttgaaaaattcagagttttgcaagggataaagatgtgtacataaatggactgtgacagaggcatacagacattgtaggcataaaagagagaatgtcagactacctgcgaatgttaacgagattcaggacgatcacttgggaaccttgaatcacctgtggtaactatggtgcccactcctgtgaggttgagcctaaattgtaatgggtcttaacctaagataaaagagactgacccagccttgccaactgtttctagctgtccacccaagaccttcaaattagtgaaggatttttaaagcctcaagagccacaataaagagcacatggtgcatgcttcttgccatccttgacctaaacaacttagaaacggataaaaaaaaggataaacctgacttctgatccaaaatgtaaaaagttggagtcgccactccatcctaacaagtaaaaagctgaacatacagaaaaatcaactcttcttggatccgtcagagaggtgtagtcacagggcaaaccacttagccccacactgagactgacaggcaaatacagtacagagaatcatggcttgctggagcagaaacctccaaggaaacaagtgctgaggtcgggaagcctgaactataactgagagataaaaactccaggggaagtcttcagggcctccctcacttttgttttacctcaaggatctcgaccaagttctcgcagtaaatactggagaaaaatcccctggtgcttctagcaggggaaggaaaaaaaggaaccattcagaattttccagagcactctgttcttaacaagttctgcccttaggagaagctagttaaccaaagcctaacctgatggggtcttaacagagcctaactgatctggaagatcagtaagcctaacttactgccacatcactaaaggcttatttacctgagatcctcttactgtatctcatgcccagctatcaagaaaaaatcataagacatactaaaaggaaaaaatcacagtttgaggagacagaacaagtaacaaaacccggtgcagatagggccgagatattagaattattagactaggaatttaaaataactatgattaatatgtaagggctctaacagataatgtggacagcatgcagcatagatgggtgatgtaagcatgagacagaaattctaagaaggaatcaaaaagaaatgctagcgatcaaaaatattgtaacagaaatgaagaatgcctttggcaggctttctgggagactggacacagctgaggaaagaatctttgagctggaggacatctcaatagaaaccactaaaactgaaaagcaaagagaaaaaccgaatgacaacaacaataacaagaacagaatatccaagaactatgggacaactataaaaggtgtaacatatgtgtaatggaaattaacaaagaagagagacacagtaacaggagaaatatgtgaaacagtcactgataatttccccaaattagtgttatacactaaccacacatcaaggaagctcagagaacattaagcaggataaatggaaatttttttttcaaaaaaaaaaaaatactcctgaaagaaaccagaggcaaaaaacaccttacgtatagaggaacaaagataagaattacattcaacttctcagaaaccaaaactaagaaagtgaaggagaaataaagactttttagccaaacaaaaattgagggaatttgtggccagtaacctaccttgcaaaaaatattcaaagaaattctttagagaaacagaaaatgataaagttcagaaactcagatctgcataaagaaatgaactgcatcagaaaaggaataagtgaaaataaaaactttcttattatttattaataaaataatagcaacaatgtatttgattatacatgcttacacatatgcttatgtataagcaaaataagtaacagcaatgatacaagggacaggaagaagaaatcagaattattttattattataaggtactagcactacccatgaggcaatatagtgttattcattaaaattaaaatttctgatctgcaaaagacacggtcaagaaaatgaaaatatgagccacagactgggagaaaatatttgcaaaaaaaaatgagacgaaggagtgttatctgaaatatacacagaattcttaaaactcaacagtaaaaacaaacaacctgacttaagaaagggcctaaaaccttaacagacacctcattaaagaagatatacaggccgggcacggtggctcactcctgtaatcccagcactttgggaggctgaggcgggcggatcacgaggtcaggagatcgagaccatcctggctaacatggtgaaaccccatctctactaaaaaataaaaaaaattagctcggtgtggtggtgggtacctgtagtcccagctacttgggaggctgaggcaggagaatggtgggaacccaggaggcagagcttgcggtgagccaagattgcaccactgcactccagcctgggtgacagagtgagactctgtctcaaaaaaaaaaaaaaaaaaaaaaaaaaagatatacagatggcaagtaagcatatgaaagatcctccacatcatacatcatcagagacatgcacactaaaataacaataagagatgctacatacatacctattaggatgaccaaaatccagaacactgacaacaccaaatgctggtaaagatgcagagcatcaggaactctcattattgctggtgggaatgcaaaatggggctgccactttaaaagacagtttggcagtttcttataaaactaaacactcttgccatacaattgagtacatcatgctccttggtatttactccaaggagttgaaaattattgtccacataaaaaacttcatacagttgtttatttgtaattgtcaaaacttggaagcaatcaaggtaacgttcagtaggtgaatggataaatttactgtgattcatcccaacaatgggctactattaagtgctaaaaggaaatgaggctgggcgcaatggctcatgcctataattccaacaatttgggaagccaagacaggaggattgcttgaggccacaaattcaagaccagcctgggcaatgtagtgagactctgtctccacaaaaaattttaaaatgagctgggcatggtggtgtgcacctacagtcccagctactctggaagctgattctcctctgagaggattgcttaagccaaggagttcaaggcttcagtgacttctgataatgccactgcactccagcccagtgacagaaacctacttaaaaagggtacatgttaaatgattccaactaaatgacattttggaaaaggaaaaattatggagacagtgaaaagatcaatgcttgcaggggctgaaggagggaggaaaaaataagcacagcacagaaaaattttagggcagtgaaaccactctgtgtgatattataatgatgaatacatgtcattgtacatttgtccaaacctataaaatgtacaacaccaagagtgcaccttaaagtaagctatggactttgggtaaaaatgatacataactgtacgttcatcgattgtaacaaatgtaccactttggttggggatgtttataatgggggaggctacgcatgtacaggggaagagggtatttgggaacactcagtattttcctctcagttttgctgtgaatctgaaactgctctaaaaaacgaagtttatttttaaaaaactttttaataaaaaggatacatttctgaattcttgtcccaggatagtgatcagtattagttcagtctcagtcccttccatcctgctatatgtaactggttaaatgtttggtcaaagctggaaacatgacacatgctgacaggatggagtaaaggagtgaacagaatgatcaggatgaggatcacatccttaattccttcattcaacaatatactgtagttgttgagaacatgtattctggagccaaaatgcttagattgcaatcttgactctgctaactagctgtgtggagagttattcaacctctgtgcaccttggtttccccatcagcaaaaaggagccaacaacatttcccatctcaaagggttgttgtgaagattaaatgaattcatacatgccaagtgttgagaatgccacttgttacaaagtgcagtaaacatgcttgctaataaaagagcccaaaagttagcaaatatagaacaaatttatttttaaacgctacgttagttacattttcaaacaatatgctcaatatgtccttctatagcctagacactgtttcctgtgaagtacctctaactttaaagcaatgtatccaactggtgactcttttaaaactacaataagtacaatatagaatatcaccaaagtctggaaacacagggaaaatcatgaatttattttttcagattaacaattagactcactgcttaaattcagagatatatcacctgaaaagctgtctagagattaaggaaaaatgcgttgagaaattatttgaaaaagtaacttattattctccgatgtttcccaatttttctgatttgttttcccaatgtttttcctactagtataactattattaattactgagcatgtgccatgtgacaggcactgctgaggatactggagatggggcatagacaaagcggatataaaaggcaaaatgtccctgctgtcgtgaaatttacactttagtagggatagacaataaacacatcctaaaatagaatatacactatgtcagatgagaagcgctatggggaaaaacgaaacagaaggtggccagggcatatcagtacaacaaggaggccaggctgcttttttataactagggtagacctagaaggcctctaataagactttctgagaagagatccaaaggaggtggaagagccatgcaggtttctggaaaacagcattccaggcaaaggcaacgcaagtgtaaagaccaaataagagagccaagaaagcctttttttctatagtatcttcttttgtcttcatctctcttgataacctgtaactagggcagactccagatatagattactcggaccaaataatttctctttcattcatttctcagtacagacttgacactgccttctttcttctctgagacaacaaaatcatttttatctagcagtttttctttcttgtttttttctatgacttccatttgataaaaatttactgtctactctgtgcaggcctgatggtgaaaggatgattaacatatggtacatgccctcacaatctagttaaaatgagacatataaaatcaataaaatataccataaaaagcactgctttgatattatgaataaagtactacagcaattaattctgcccattgagggaaasagtagttggggatagagggaaaaaggattctgagctaggatttggagactaagtaggagttcaaaacatggacagygataaaaaaatattccaaggggaaagacaaatcttaagcataagcacagaaatgtctaagcatacaatatattaggaatgattgttaatgcaatgtgctacattgaagattagggaaataagagcagaaaagtagattggaaacatgttaaggggcctgactttatcctgagagccagtggtttgcaaactattttgactgtacacctcagcagtaacaaattgttgtgcatgcatatatcctcaataaatgcacatttatttaagtatgagtgaaattatgccaagagctactcttctagtatatcacattcattagaaaatacacaaagagggctgggcacggtggctcacacctgtaatcccagcactttgggaggctgaggtgggtgaatcactaggtcaggagttcaagaccagcctgcccaagatggtgaaaccctgtctctactaaaaatacgaaaattagcagggcatggtggcaggtgcctgtagtcccagctacttgggaggctgaggcaggagaatcacttgaacctggtggggcagaggttgcagtgagcctagatagcgccactgcactccagcctgggtgacagagtaagacttcatctcaaaaaaaaaaaaaaaaaaaagaaagaaagaaaagaaaatacacaaagagaaatatgtaaaagataatattttcccctaatggamtctttttcattaatttttattagtgaataatgtgtacaatgttatcaatcaattgctaatgtaccttccataatcaacaaatgaatgcactatgcttctgttgacatttcagttctaacttgtatttttcttgctctcttggtggtcataaatcatcaagagtactcataaagtctagcatagtgtacttgtacttacttttttggtgctaagatcaattgttagggaatctgaaagatctttatgatagtcaatttaaacacattcatgtataccttatcttatacatataaaaggtacaaatgcataaaaagacaacttctttcatgataaaaacactcgacaactaggaatagaagagaacttccccaccctgataaaggacatctatgaaaaaacccatagctaacatcatacttgatgacgggaagctttccyccaaagagcaggaacaagacaggatgtctgctctcaacacttctttctagccaaggaatctagattggagaggaagaagtgaaactatttgtatatgacaggatctagtatatagatcaatatacaaaaatcatttaatcaggtttatttctatacaccagccatgaacaatctgaaaatgaaattaagaagacaattccagcctgtagtcccagctactcgggaggctgaggcaggagaatggcgtgaacctgggaggcggagcttgcagtggctgagatcatgccactgcactccagcctggatgacagagcaaggctctgtcccmcaaaaaaaaaaaaaaaaaaaagacaattccatttactagagcttcaaaaagaataaaatgcttagaaataactttcagaaatgcaagaacttctgaaattaattggaaaataatctttaaaatgaaaaaaacttaagacatgaaagacttgtaccctgaaaactacacagcactrttgaaagaaatggaaaaaagatctaaataaaaagaaagacatcctgtgtacaaagattggagaaattagtattgttaaaatgacaatataccccaaattgatctacagattcaatgtaagcccatcaaaattctagccaaattctagccatcttcttttttttttctgagacagagtctcactctgttgcccaggctggagtgcagtggtgtgatcttggctcactgcaaccttcacctcctaggttcaagcaattctcgtgcctcagcctcccgggtagctgggattacaagtgcacgccaccatacctggctaatttttggcatttttagtaaagatggggtttcaccatgttggccaggctggtcttgacctcctggcctcaagtgatctgcctgcctccacctcccaaagggctgggattataggcgtgagtcaccgcgcctggccctagccatctttttaacaaaattcgtaagctggtaytaaacttcaaatgaaaatgcaagagactcagaatagaaaaaaaaaaaagcttatgaaagaacaatgttggagactcacactccttaattttaaaacttactacaaagctactgtaatcaaaacagtacagtactagcataaggcctgacatacagatcaatgaaacaactgggagtacagaaataagcccatacatcttatttggttgattgatttttgcaaggatgccaatataactcaacagggaaaaaatggtcttttcgataaatggtagcagggcatcttcatgaaaaagaatgaagttaaacttcacagcacatacacaaattaattcaaaaaggacccaggatctgaatctacaagctaaaactataaatgtcttagaaaagataggtataaatcttcatgttcttgtattggacaatggagcccatagtttcttatatatgacacctaaagcacaagtaaccaaggggaaaaatagatacattgcacttcaaaatttaaaaatttagtgcatcaaaagacacctccaacaaaattaaaggaatctacagaatcggagaagatacttgcatatcacctttctgataagggtcttgtatccagaatatataaagaacttttaatactcaaacagttgttttaaaaagttaataatgggcaaaggattggaatagatgttacaccaaagaagacatacaaattgccaacaacgacatgaaaagatgttcagcatcattagtctttagggaaatgtaaatcaaaaccacaatgagataccarttcacaaccagtaggatagctataatcaacaacaacaaaaaaggataataacaagtgttggcaggaatacagaaaaactgggacatttttaaactgccagtggagatgtaaaatggtacagccactatggaaaaacttagcagctcctcaaaaagctaaacactgacttatcatatgatccaacaattccactcctaagtatacacccaaataaaccgaaagccagaacttgatacttacactcccatgttcagtgcaatagctaaaagaaacaacccaagagtccatcaacagatgagtaaattttttaaaatgtgtaatgtacatacaatagaatattattcagacataaaaggaataaagttctgayacatcctacaacatgacaaygctgaggacattatggtaagtgaaataagcgacacaaaataacaaatactgtatgattccacttataagagatacctagaacaggaaaatttagagacagatagggccttggtggaacgggaatggggagctattgcttaatgcttacggggtttctgtttggggtgatgaaagaattttacaaatagtggtgatggccgcacaacactgtgaatgtaattaatgcaactgaattgcacacttacaaaggcaaattttatgttatagttacaattctaaaaaattatactgtaatacaccaaaatccatataactgtacaccttaaatgggtgaattgtgtggtatgtgaattatatctcaataaagtttttttttttaaaaaaagggaagaaaaaaataaactctcaagctatgaaagaacatggaggaatcttaagtacatattgccaagtgaaagaaaccagtctgaaaaagctacatactttaagattccaactatacgacatctgaaaagacaaaactatagagatgataaaaagaccagtggtagccagggattcaagaggagaggaaaaggatgaataggtggaacacaggacatatctactctgtatgatagtggaatggtggacacatgacaccatgcatttttcaaaacccacagaactgtagaacacaaagagtgactcctaatgtaagatatgaactttcattaacaataatgtatcagcatttgttgataaactgtaacaaatggaccacactaatgcaagatgttattaagagaaattgtgtctgagtggggaagggtatgtgggaactctgcgtaactttctgcataattttcctgtaaacctaaaactgcccttaaaaaaaggtctatttttaaaatgcatgcttcccagagagaatgctctgaattttatcctcttctcatgattcataagactattcattttgaacacaaattataattctacagtagctagagaggaagcactgagccttttgtcactgtagaatatcaggcactactgaatcatctcaggatcctatcctttccctactgcacctcctcttccgcccccgaaagaattattttatgatctaaatttttgtattcatataactgcttccatctagatagtctttgaagattccagcctgtggaaatatttccttaatttatgactaaattccagtttaattataattataaattacagtgacattattacaccaaattgccatgcctcctattttattcacttttttcattttctatgaggtatcattttatcagaaacctaagtgtgttcactttttttttccttttgaaaaaagtattgttctctaaggcactgaagactcaatacagaggattaaattggaaactataaccgtcccagaggaaagacagctagtacatttaagtacaactcttccccacctcctggtataaaatgatcccccaaaactcctaatctttattggcacatgctataaactttttaaaaaaactttagagatcggggtctctctatgttgcccaggccggagtacagtggctattcacaggtgcaatctttcctcactacagcatcaaatgcctgggctcatgcagtcctcccacctcagcctcccatgcaccaggattaccggtgtacaccaccacacccagcttatataaacttctttaaccattaccttggtcttttccagcttcatctatgtgctgaaaatcttttagtgtttgaaggttacagaacccctctctgcaatgctgaataactttctttgatccattcttgatgagataatccattagggtaagggatttatacacgtggcgccagttcttcccatggtcattgagtctgtgccacagcatattcataatctctgagagagaaattgtgttgaaagtcaagtcactgatatctaacatcagagaactagagggaccccaagggtcgttagaagttgcttccctgacttttatttcagcatctgagtaatttttcacaaagtttttcacttgtctcctgaacgccataagtaatacaagttccaaggtgagatggaggatgaaagcaatggaataacagtttatgtcacgggtttataaaactcttgacaggtaattggtccccagttctgctgctcccaaatacaaataattaatctctatgttgataaagtatcaatttcctgcaaggaaagcacaaaaaaatttacattaaacttttttttaagtctatagaagaccaaatcaatctgaaaatctaggttttgtttctaaatcagcccctcacttacagcagccagaattgagggtaccatataactgttcctaggataggcatgggaaaatccctcatgagaaattggcctatattatttaaagaaatataggttgtctttctagtcataaaagttcctggagaaaatatcattcaacctctttggccagaaatataatggctataaagcattacatggacagcagacaagcaacattttaaaaaacagaacttgcactctgacatctctttctttctttctttcttttttttttttttttttttttccaaagacagggtattgccctgcttcccaggctgaagtacagtggtgcaatcatagctcactgcagccttgaactcctaggttcatgcaattctcctgcctccgcctcccaagcagctggaactataggtgtgcgccaccatgcctggctatttttttttttggagatagagtctccctctgttgcccaggctggagtgcagtggtgcgatcttggctcactgcaacctctgccacccgggttcaagcgattatcctgcctcagcctcctgagtagctgggattacagatgcacgccaccacacctggctaatttttgtatttttagtagagacggggtttcaccatgttggcgaggctggtctcaaactcctgaccttgtgatccttccacctcagcctcccaaagtgctgggattatagccgtgagccaccgcttccggcctgcctggctaatttttaaatattgtgtagagatgggggtctcaatatgttgcacaggctgttcaaaaattcctggcctcaagtgatcctcccacttcagccttctgaagtgctaggatttcaggcatctctttatattgtcacatataaaaatattatattctgagagtaattaaaatgggggtaaaattgagtcttagaatcacccactgaccctatgactgtattctttttagaactacaagtcccgagaatcagatctaaatatagtctgctttcttgctaaacctaaaagaaaggaggatcaactatgaagacaaacagctgtatatcagtggactccacagctaattcatggtaccctaaaacctctattttagtccagataagcctggtaaattagagggaaaggttaaattactttatttgttcacctttggaaaaagaagaatgagtttaggattaaacagtgtcaacagtaagactcaaataatgcaaggatttctctaaatcctgcagtgatcagcctgtgtctatcagatctcaaaacaaggacacacagagaggcccatatactaaaacttaaaagggaaatgcagcccccaaactttacataatgcttgtgaatgatcaattcagtttataggaaaccattccctttctctttttcattattttgtattaaggagggtcagtcagtttgcaatttctctagtgattcaccactgctggctgccaagacagtgtaccaaattgatttcaagccctgacgaacatccagacccaacgaaacctagaagatctataatcagattttactagagaaactgcacacatacaaaagaaaaaatgttaaaatccataacaaatgtgttcactgcttttagttttgcttccctttcttgaccttctcaggtaactagctcagccttgattaatttctgtatgtgtattaaaggaagacataaatttttagaagcatcccaaataaactatcacttcttttttttaaaaaaatgagataacctctttttggtaaaaatacaacacactcttaactaagcaagacagaaaatgtacctgtataagtggttgggcgtggtggctcacacctgtaatcctagcactttgggaggctgccgcgggcagatcacctgagctcaggagttcaacaccagcctggacaacatggtgaaaccctatctctactaaaaacacaaaaaattagccaggcttggtggcacacacctgtaatcccagctacttgggagactgaggcataagaatcactrgaacctgggaggcagaggttgcactgagccgagattaggccactgcgctatagcctgggagatagagtgagactctgtctcaaaaataaataaataaataaataaataaataaataaataaataaataaataaaaaagaaaatgtattaaatatctgtttaattaagatttctcagaaagacactatcattaaccctaggaagaaaaagagaagttgtgtttctacaactttctgattttctctttttcgtacttcaaacacagtcatttttatttggcaccttcctgcagtgaaaaactgatttataatatttcagcaaagctattaaaattgtcaagcaggagggtttttttttctattgtcctttttttccttctaccaaactcactcaatgcagagatgcactatgacattggcttagagcaacaaatatcgatctgtttcttcacgattctattttcttttaaagccctgttagaatcataacttgctggaattgaacaacaaatgttaatttttttttcttttttggatagctatctatctatattttggaagaacaatcgtaatttttaggtttttctacattctctaacctatattttaaacttttaaaaactgttttcttaaatgaattttctaacccagaaaaatatcaaaataatagccttctaatccaatagagtagtttaaaatgaatttacatgacaccatatcagaattaaatacaaccycaaccattagaaaaatcgcaaggaaaaaggtctagagaagtgaattcttatcacttactaatgtacaatgacttgaactttaccttgtgatatgaacgtagaatatgtaaaacaccattctactactgctgtcttttcaaattgacaaggagctcaattaattggtgttagttgtaaattatatgttggtttattatgtgttttagacacctgactacatgaaaatgctgtttacatacagcatcaaataactgtgagattgtaactacagtgatgtgacaaaaattgacatgagacaaaattagtgcccaagagggtaaatttccacatttgaatcttggttgtctggctacccaactcactataatatttagaaatagagggaagaagttaggtatttcatgtcacaaatctgagaggtcttcaccgacctcactaactacttaggtctccccagaacctggttaatttccttcattgcacttgtaacaatctgtacttacctatttgtcatttgctcagtgcctttcttcaccaccaaactggaagctccttgggggcagggaccttgacggtcttatttaccactgtaatcctatccctaacagctaattagcaacagtagatactcaagaaacatgtgttgtgcaaataacacaatgattgaatgattctgccttgggataaacctgcactgattctatagctttataattataatcactttttttttttttttgagataaagcctcactatgtagcccaggctgcttgcaaactcctgggctcaagcaatccccctgcctcagcctcccaagtagctgggactacaggtgcataccaccaagcctaactaattaaaaaaaaaattttatttttttttttgagatagggtcttgctctgtcacccaggctggagtgaagtggcacgatcttggctcattgcaacctccacctcccaggttcaagcaattctcctgcctcagcctcccaagtagctgggactgcagccatgagccaccaagcccagctaattttttgtatttttagtagagacggggtttcaccatattgaccagggtggtcttgaactcctgacctcaagtgatccgcctgcctcggcctcccagagtgctgggattacaggtgtgagccaccgtgcttggcctcaaaaaaaattttttttttagacacgagttcttattggttgcccagatggtcacaaactcctataaagcatgatattaaaaaaataaataaataaaatctagctctcataattgtcaagtaaaattctatagttttgagcaaatattttcaaatcatcaacagatatttcttgagtacctaccatttgtatagctttgtggagaaatataaaacatgaacctcacattaaaacttaccattcagttaaggagctttctctcctaaataattcccagcaaaacaaatgattacgtagaaaaggtcttttagtgttatttttagatctgcccactttcacaatgctgtttccttccccccatttcatctgaattctaacaggaaatgatttatcagctggcattaaactattggtccacgatcttttatcccaatcctttgaggccagatgatttgtggaaaytctcttttgggtgcggtggtaggggtggaattttcaagagtagtgccatgtctataccatatattacatgatacccacagtaaggtgtggagctgctctgaacaattaaacacattaacatgtctgcaataaaaacatgtaaatatttggaataaagactacaaatggcctcaggccaagttttaccaccaaatgagttggaggaaaagttgatttccaaaagtttttggatttcaggattgagaataaggaacagaggagctgaactgactttatccaaagacttgggacaataatgacaatagcatctaagaggctgagtgtccagagctatctctgaaaagatgcatttaaggtggaactatgagaaaagaacagctcttgtgtttgtacaggttctgcctatagacatgagtttgactcgtaaggaaatgagctctggccragaatgctacgggaaaatggttatagagactaccatgccattaggaggtgttactgttttgatgaaaagaatactgtcagaggcagagaatctaatcttttccagccctaagtgtgtgttcattaatttattcaactaataatcttccagagcttaccatgtggcaggctccattctaggaaatggagaaacaggtgcacaagacacagtcctcacaccctggagtaaacagctactcttcattgaacgctcacaatgtgctcacacctgggccttcacatgcctcatctctctcctttaattaggattcaaagccatgatttgaggtcctgctttgccatttcctaactaagacttaacaacttctctaagtctcagttccctcatccgcaacacaaagaataatcgccagacagggccgtgggggaggaagaaacgagatgctttggaaagaattttgaaaatggcgggtggaggctgagcaagaatcaactttctgtgggcagggcctttcctcggcatcctcgtcttcattcatacaacccccacttcagatgacgactgtgtaccagatgagccaggtgctgggcgttcggccacacagagaatcagaccagcaattaccctaggagaaccggcagtggaggggaaggctggacctcaggaaagcctctagaaggagagagggacgtgatggcgtcacgtcacgccacagggatttcacctcctgcggatggtaatggcctcgccgccctcccgcccccacctggactccgacggtgccggcaagaaacgggaggagggaaggcaaccgatgtttccagacccgccttgagccccaccaccactcccaagcagaggctgttacctgagaggaaagtcggccgctgcccaacgaccaaacttcctctccccaggatattccacctactccagccaggctcaagggcccaggccggtccccacttccgcttcctcactttctggcctggtgcagttcctgtcagggcgtcaagcaagatggttgcagatacctgagctggagggtaccaaggggaatgaaggtaagtgtcttcgtttcacaggctgccgggctgtgacactgccctaatcctcctttcaaagaataaatttttttttttttttgagatctgggaaatagtttaatcagacactagcatttattcttagctgctttcttaattaaataaaaatgagtataaattaatttactaaatgttcacaacgtaaaaacggacattaaaaaaagaaaaaaaatgccaaggtaagctgataatgtttttaaaaagtagacaataaaataatgtatgtaacttaaaatttgccatgataatttattcttaaaatggaaaatcagtaaaatactcagacttctagcataatatctctttttttttatttattattatttaagttttaaggacatggatgaaattggaaatcatcattctcagtaaactatcgcaagaacaaaaaaccaaacaccgcatattctcactcataggtgggaattgaacaatgagaacacatggacacaggaaggggaacatcacactctggggactgttgtggggtggggggaggggggagggatagcattgggagatatacctaatgctagatgacgagttagtgggtgcagcgcaccagcatggcacatgaatacatttttaaaagtgtgttactactgtcatttcaactgactagaaataccaccagcacgtgattgccacctcaaaggactgagaatgtaatagtagtctatgaagagcagtgtgtgtgatggacaatgatggggtagctccagtgactgatggcttcaggtgccactgacgggtaattgttgatgtattcaactgattttccgtgagcacccactttgtgccagacagtaaggactcggagataaaaagcagccctctgctggatacgtttacaggctagtggaggtgacaggcaccgtcagagaagattgtaacaagatatgtatggcatagtaagagagaagagatcatctaattctgccactgagtatttaagggcaggtttcacagaagagtttacatctgaattgaatcttaaaggatgacagggagttcactggatagacaaagtagaggaggacgtaagaggcaaaggacacatcatgtgtaaaggcatgaaagctgagccagcctattatcttggaaaaactacatgtactgtagttactacaactgtcacaaaggctattagtggagcagcagaggaaggttaaataacagagggaagttggatcatgaagaaccttatccatactacaaggtgattttatccagtaggcattgaaaaatgtaatcgaacctgtgttttaatggaatattgactaggatgaggggaaaagacagaggataacaaaacacttagtagacaaaagcaacatttgtttctatctcctactacttcagtcataattataataataatagcccacattattgatactgacatgtagataggtgaatccaatataaaatgataggaggtatgaaagaagttggtgagtttggaatattatttgactggctataatatagagtaatggggtgggagccagagggaaatcgaaaaggtgacctggaaaacattgttcagggccttgaatgctatgttgaggtattttgactttataaaatagtgggggacaaactacaagtattttatacattgaggtatagtttatgaagtttttttatatgtatagcttatgtaaatctcaaaggaatgctgagaagtaggcgttattatcccattgtacaggtgagaaagctgagtttgtggaatatgcatacattctacattattgagcacctgctatttgccaagcactatgctgagctatgagactagaaggaagttgtagtttaatactctaatagaggaaacaggaataaatcagcaattgtaagtagttgctataataaaggcaaacaatgttacgggagtgaaagggggacttgtctatatttgcatagtcagggaaggcttcctggaggaggtgagcttaaactgagtttggagaaacaaatagattacagtaattgcccagagatatttaactaggaagcagtttacctgaaacttgaacccaaatctcctgtgtctagctctttcccctactccaaggaccaatctttggtccttgattttaagctctatcagcaactcagtcacaagtggacttgttatgtttggagaaggtcagagattccaattttttatttttaaattcattcattttctccttttaaaatctctgtgtgtgctcaaagagtagattggaagcagaggaactggaagaagaacagaatgttctgatagttcaggcaataagtgatgaaggccataactaaggcagaggtcatgggcatagtgtgaatctccactctgttcactctcctcacacatatacttttacatgtaatgttaaagtgtagcagttatgggatcgggctctgaatatatgtggcaatgagagagaaggaggagtctacagggactaagtttctttttggggtgaccaagtaaatgactgttgctgttcaccaagatgaacatgatccgaggggtcagtttggcaggaaagctggggaattctgcttcggacattttgaatctgagcaacaggtgggagatgttcaggggacagttgaatagagataactgaaagaagagggtttggggctaggttcatagacttcagagtagtcagcatatagaaggtgattgaggaggcagatgggaagtaggagacagggtaagattaaagactgaagtcccaataaacagtgagggagttggttaggcttggcaaaagtgtcaagtgttaccagcttagtggaattaaccctgttcaagtgacaatatgtaaggggtccttcttatctgctttcctccatttgggggcacaatttagttgcaataccgtaacatccactaaatacaaatattgctctatggtagcttggttggttttctcctttaattttttgaacttgaggttctataaaagtgaacacagtttgcttcacctgacttcccggacaccatttctccttctcatctccttgactcatccgttctcaattctatgacctctcaactttgaaggagcccattctctaacctcttgtcttctctatctatattcactccacaggtagtgttatccacttgcaaagcggtaaatactcttcgattctgacaactctcaaggttttctcttcagcttctcctgacctccaaactcgtgtatctaactaccttgacctctactcctggtcttgccttccaaaccttctctcccacggtctctcctgtctcagtaaatgacacatccttgcttctaggttctcaggccatgaacctgggagtcaccttaactcctgtgtttgtctcttatagctctcatgatatccatgagcttacctttgaaatacaaggtggctacccagtctagataataaatgatttattgatgctacattctaatacaagatacaataacattatctatgtttctagactttatgatcaccctgtatattcaaaatccaaccacttcccaccacttacatcatcctgttttaagccacaaccatctctggtctggactatgaaagtagcctctttttttttttttttttttttgagatggagttttgctcttattgcccaggctggagtgcaatggcgcaatctcggctcactgcaacctccgcctcccgggttcaagcgattcttctgcctcagcctccctagtagctgggattacaggcatgcgccaccatgcctggctaattttgtatttttagtagaaattgggtttctccatgttggtcaggatggtctcaaactcccgacctcaggtgatccatccgcctcagtctcccaaagtgctgggattacaggcatgagccaaccatgcctggccaacagtaggctcctaactggtctctcttcttctgttcttgctcccttgctatctaatttcagcacaacagccagagctacccttttaaaacttaaaacccaagtcagatcatactactccccagttcaaaatcttccattggcttccatctcactcagagtaaaatccaaaggcctcgccatggcaacaaggccctacatgttctgctctctctctgatctccatcccaactcctctccacctcactcacagtgttaaacatgtctccacctgaagtctttgcacttgctagtccctatacctgcaaaagctatttccccagatgtccatccaggaagtactggcttcttcactttgttctagactttgctcaaatgtcctttgatttcccaacgtaaaatcgcaacccccatctcagccacactccctgtggctcttgcatcattttatttttctccctaacagtaggaccatctgatgtaccttctgtttctccctttaccagaatgtaagatccaggagggcagagattatgttttgttcactgatagttttccagcacctagaacaggactaacacagagtaggtgttcaaactttatttattgaataaatgaaacgagaatgtctgaatgcacactattaaataagaagtacatattttaccataaagttaaattgagcataattatggcaagaagttcagatattggccaggcgcagtggctcatgcctgtaatcccagcactttggggggccaaggtgggcagatcacctgaggtcaggagttcgagaccagcctgaccaacatggcgaaacctcagctgtcctaaaaatatacaaattagctgggtgtggtggcaggtgcctgcaatcccagctactcgggaggctgaggcaggagaatcatttgaacttaggaggtggaggttgcagtgagccaagattgcgtcactgtactctagcctgggcaaccgagcgagactcagtctccaaaaaacaaaataaaacaaaaaacaaaacaaaacagaagttcagatataaacaaatgacccctcaaaaggaattgattaaaaaaattttaaacaaagtatggtttaaaaaagaaacttctccactgtggctaagtccatatttcacatgttactgtatcctcctcatcttgctgctatttttctgagtatctcatgatagtgagtactgaaatgctggcattctcacattagggtctttattcttaggatctgcctttgcactcgttcagttacagagctgttatgaaataaaccactcaagtggccttgcttccctcccactatgctctacataacatgtctgtcaatcagtacttactaccaaaataacttgcctttgagatttttctgttctgcaatctgtcccatgcttgtaaggggaaggattatattctgctccctggggagtagtgcctggtgcaaaattagcttcctcattagggtacaagctgaaaacaccatgatactttccatgtaacaccattcaacattttcccttcgctcccactccccaaccatagaattttagggactcctttaaccatttcaaaaccatcgacttgggagctatcaaagaataaggactgtagccagaggatttcagcatttaaaaacttggcaatagagctgttcagtgtaatgatccaagaaggtccttagaaggctgaataattctgaggtcaaggttgagacgttattatttttaaagtagcaagatgttgttatttttaaattttatctttataatgtggaaatagcagagatccttttcagatataaccaggatttaagaaaatttgacaaagttgcattaataaaaagaaagcctgttattaaggagctacagggccgggtgcggtggctcatgcctgtaatcccagcactttgggaggttgaggcgggcggatcatctgagttcaggagttcaagaccagcctggcc

SEQ ID NO: 97175 - DNA, 12655 bp, Homo sapiens
agctacctgggaggctgaggcaggagaattgctggaacccaggaggcagaggttacactgagccaagatcgcaccacagcattccagcctgggtgacagagtgagactctgtctcagaaccacaacaacaacaacaacagcaacaacaaagaaaggattcaactagacagagaaagatatatggcaattgggagatatgaacaattggcatataagtttcatttcttttttttttttttttttgagatggagtttcgctcttgttgcccaggctggagtgcaatggtgcgatctcagctcaccgcaacctccgcctcccaggttcaagcaattctcctgcctcagcctcctgagtagctgagattacaggcatgcaccactacgcctggctaattttgtatttttagtagagatggggtttctccatgttgaggctggtctcgaactcctgacctcaggtgagccgcccgcctcagcctcccaaagtgctgagattacaggtgtgagccaccacgcccggccataagtttcatttctagggtcaggaggaaggaggtagttgtgtggcaagacatattacttgatgtttctaaagacaggttctctaacacagagagcatcacataataactaccatatatagagtgttagtccctgttttacatggactatgctgggttaagtatagtcacctatcctcacatgaactcagcaagggagatattctctatattttataaatgaggaaattgaatcccagagaagtcaattaacttccttaacattgacccggtgcagtggctcacgcctgtaatcccagcactttgggaggtggaggtgggaggattgcctgaggtcaggagttcaagaccagcctgaccagtatggagaaaccccgtctgtactaaaaatacaaaattagccgggcatggtggctcatgcctctaatcccagcactttgggaggcagaggcgggaggattacctgaggtcgggagttcaagaccagcctgaccagtatggagaaaccccgtctgtactaaaaatacaaaattagccgggcatggtggctcatgcctgtaatcccagctattcgggaggttgaggcaggagaattgcttggacccgggaggcagaggttgcggtgagccaagatcacaccattgcactccagcctgggcaacaagagcacaactccatctcacaaaacaaacaaaaaaaaaacacaaaaaacaacaacaacagaaaacttccctaacttcatataaatactggatctataatttgaacacaggcccatgtaattctgaagcctgtgttatttccataataccatgttgtctggctcctctacggtgacccttctattccttcatcaaggaaggctcttgcccctaaatactccatagtatgaaaggtaatctcaataaataaaatttcttctgggtccaaaagtagccttttataaaaatataaattttcctgggaaacttaagtcacttgcaccttgctgtgaattagggaaaaataaccaaacggaacaataaccaaacaagcaaattaaactaatataagataaagcaaatgaacatgtccttcaaggatgggaaaggtaaaggaggtaacatcggaagagatgggcaggatgaatgcactaagtgcttggggagcatgatttgtaaggatttactctctgaatgtggaaaacttgtgttttttggtaacaaatggcagatgttttatttctaaatctgttagtaagtggctaaggaagttttaagagtctgtgatttaatacatgtatgaactttattttcagtcccagaaaataagcattggattatgaattgacttttgtcccggtggttccccagttatacttcccttgctctttctttctttttttttttttaattgagatggagttttgctcttgttgcccaggttggagtgcgatggcacgatctgggcttgccacaacctccacctctagggttcgagcgattctcctgcctcagcccccagagtagctgggatcacaggcatgcgccaccacggccaatttattttgtatttttggtagagacagagtttctccatgttggtcaggctggtcttgaactcctgacctcaggtgatccatccacctcggcctcccaaagttctgggattacaggcgtgagccaccatgcccgtcccccttgttctttcttaaatgtcctctttactttctctatcatttttcagactattcttatcttttttaaatgtgtgttgccagtggggaggtgcggtgactgaaaaatctattaaatttctccttttccaactacttttctgtgtgagactggatttttcatttacttctgccaaaacaacgtatattgcaacaaattaatccagaagcaaatatgggaatctagttgttttttattaggaccaatgctaaaaaaattcaaaaaaatgtgaaacaatgccagtcttctcactatgtttatttattttgagacgaaataagtgcattctcagctcagtgagcaaaggtgcaatctcagctcactgcaacctctgcctcctggattcaagcaattctcctgcctcagcctcccaagtagatgggattacaggcatgtgccaccatgcctggctaattttgtgtttttagtagagacaggttttcaccgtgttggtcaggctggtctcaaactcctgatgtcaggtgatccacctgcctcggcctcacaaacttttgggattacaggcgcgagaccagcttggccaacatggcaaaatcctgtctctactaaaaatacaaaaattagccaggcatggtggtgggcgcctattatcccagcgactcaggaggctgaggcaggagaattgcttgaacgcaggaggcggaggttgcagtgcgctgagattgtgccattgcacttcagcctgggcaacaagagcaagactctgtattaaaaaaaaaaaaaaaaaaaaaaaagaccaagtttgacaccccgttctaaggcaagtaggaagcatgaatattaacacagttttgattttgtgagatttatttgtcccaagcataggaggaacaccgttctacatgtgcagttggccttagccacacaggagaggtgtgatctggttcatgtcttcgaggagcttgtaatcatggagctggaactgctgatgcagtcttctaagtgctggtttcatgaataaacacctcctttatctgtttcttctgggttccaaaagaaccctccataggcatgattttcacaccagtgttggctacgtaatcttcccagggcctggatcatagtgggtatttaaaaagtcagaagatcaattggtagacaggagtatttggcatagaatcacatgggtgcatttattcattcagcatatttattgagtgcctgctgtgcactaggctctgtatactaagcactgggaatacagtagtatactaggcaggtgtgcttcctgtctaaaggaattagacttgtttgtgttttttttttcttttttttcccagcaaattccttttattttcctttagagttgagggcctgtgtactgcctaactggattggtaatggagtgagtgccccatgaattcctgtgtttgcaatagtatcacctctcacagaaaatcaagaagagaagttgtgctaccaggggatcctctctcttcaccctaacattttcttcttccttcttttggctgtattttggccagtctacataaattaaggttattatttgaaaacaaccatcagggtccactgagttctactgagattggtattggagagagaaactcagaaccgggaggcctggcattcatgtcctgtgtgtaggtagtggtagtagtcatacatgctatcctccttgtgccagaggctcatgcatgttctcctatttaatcttcagaataccaccaatcaggtaggtggtgatatcaccttcttatgatgaggaaataaaaacatagtaaagtattagtatacagggtggctggctttctagtgaacctactggcaattcgtggcccctcccactacttcctgagactatctcgtagaaccttccatgacttgcccccagtgtcttatgtataatgttcatggtgtcgatatcatgataggtgttcctagatgtgatggtgtctgttgcacacacatgtggtggtgtgtttggtggcagaggttgtacaatctgccaccatgccagctacacacatcttggctatccctgtggatgagctgccactcacagggcctgttgatttacaaagacttgtatctatacttcaggtgtcttcctaggagctttgatctaaggaacagacaacatcagtgtaatcatcttaatttggtctggcagctgctgacattctatagctataaatgtggaaaacagacataagatttcaggagtttgccaaaagtgtgcatctggatgccacatgtcactagcttgggggttctgatgtgtattattcatgtctcctggctgcttatggaggacatggctttaatgccttcagcaagagggagaggaactaatatttgagtttctttttatggcagtgtctcatatctctcttacttaatcctcacaacagctttgtgtggtttttggaattaattctgttgttgtgaggaagcagatgctcagcatttgaataacttgctcaatgttgctgtgtcaagcccaggcctgtctgcttccctagttgcctctttggcattgttttccttgaacaaataaaaacccctcacaagcagaggtaccctagctagctcagttctcaccactttggtattgatacttactcattcaacagatttgttttgggcacctatttatatgccaagcactggcaggagagaaaagatgagtaaggcacaacctcgttctttaagatcattttacttgtttgcctctgcctcacttccaatttcagtgtaatctggtatctctaaaggctgtaggatcacgggtggacaaaggtagtgggtaagacatttaaagctgtaaacaaaagcaacttagaaaacatcatggcatgttcatttagagcaaaactggcaaggcctggggcagagaacgatgagaggttaagagttgaaaagtaaagaggctttctcccatagcgaatgaggagacatgggaggttgttctatttattttatgaatgaggctcaaaatattctttaagcattttggttttgtctataaaaatgttaatttttttaaatttggagaccacagtataataaaatacaaaaaatcacatataattgcatccagagatagccactattaatattttatgtcttttttgtaaactctgttctgttttattatttaatattttacatgttatataagttcttaattttctcaatgactacaaaatagtccatgtatttacttagccattctactatatttggacagtctattgccaattttttgctattgtggaataataggttagaaatgtttttctttgtacgtgaagtttttgctgtatttagaattattttcttaggatagattactggaatggatttatgggtcagagtatgaacaattctaaggttctagagccctttaaatggtgtgtactaattaataacttcataagctcaaagagttccctgtacttagtagtaagaaataataataggttttgggccaggtgcagtggctcctgcctgtaattccagtgttttgggaggctgaggcaggcagatcatgaggtcaagagatcaatactagcctggccaacatggtgaaaccccgtctctactaaaaatacaaaaattagctgggcgtggtggcatgcgcctgtagtcccaactacttgggaggctgaggcaggagaatcgcttgaacccgggaggtggaggttgcagtgagctgagatcacaccactgcactccagcctggtgacagagtgagactccgtcttaaaaaaaaaaaaaaaaaaacttccttttgcgggtggcggcgaacgcggagagcacgccatgaaggcytcgggcacgctacgagagtacaaggtartgggtcgctgcctgcccacccccaaatgccacacgccgcccctctaccgcatgcgaatctttgcgcctaatcatgtcgtcgccaagtcccgcttctggtactttgtatctcagttaaagaagatgaagaagtcttcaggrgagattgtctactgtgggcaggtgtttgagaagtcccccctgcgggtgaagaacttcrgsatctggctgcgctatgactcccggagcggcacccacaacatgtaccgggaataccgggacctgaccaccgcaggcgctgtcacccagtgctaccgagacatgggtgcccggcaccgcgcccgagcccactccattcagatcatgaaggtggaggagatygcgrccagcaagtgccgccggccggctgtcaagcagttccacgactccaagatcragttcccgctgccccaccgggtcctgcgccgtcagcacaagccacgcttcaccaccaagaggcccaacaccttcttctaggtgcagggccctcgtccgggtgtgccccaaataaactcaggaacgccccggtggaaaaaaaaaaaaaaaaaagtgatctggctggacaaactgagccagtcccacacaaaatcttaaaaaaaaaaaaagaaaagaaataataataggtttttaaaaatcattatttgcctattggagaggtaaaaacagatttctttatcttaatttgtatcactttgattattaatgaggcacaatattttttcctgtatgttgtatttcctatgtgtaccttgctgggctcaggtggtcctcccaccttagccttccaagtagctgggactatctaaattgtagtcactgtgttgtatttcattatctgaattgcctgttcattttcctcatgggataataatactaggaagagccccggtgcggtggcttacgcctgtaatcccagtactttgggaggctaaggtgagtggatcacgaggtggggagatcgagaccatcctggccaacatggtaaaaccctgtctctactaagaatacaaaaattagctgggcatggtgacgcatgcttgtagtcctacctactagggaggctgaggtaggagaatcgcttgaacccgggaggtggaggttgcagtgagttgagatcacgccactgcactccagtctggtgacagagcgagaattcatctcaaaaaaaaaaaaaaaaaaaattagttggctgggcgtggcggctcacgactgtaatcccagcactttgtgaggccgaggcaagcggatcacaaggtcaggagatcaagaccatcctggctaacacggtgaaaccctgtctctactaaaaatacaacagggccgggcgcggtggctcacgcctgtactcctagcactttgggaggccgaggcgagcggatcacgaggtcaggagatcaagaccatctggctaacagggtgaaaccccgtctctactaaaaacacaaaaaattagccgggcgtgttggcgggcacctgtagtcccagcaactcgggaggttgaggcaggagaatggtgtgaacccgggaggcggagcttgcaataagccaagatcgagccactgcactccagcccaggcgacagagcgagactccgtctcaaaaataaataaataaaataaaataaaataaaaataaaaaataaaaatacaacaaattagccaggcctggtggcgggcacctgtagtccagctacttgggaggctgaggcaggagaatggcctgaacccgggaggcagaacttgcagtgagccgagatcgcgccactgcactctagcctgggcaacagagtgagactccctctcaaaaaaaaaaaaaaataatataataattaataataataggaagaaacctttatatatagctctttattttcttttctctttctttctttctttctttctttctttctttctttctttcctctttctgtctgtctgtctgtcttgctctattgcccaggctatagtgcagtggtatgatcttggctcactgcagccttgaactcctggcttcatgcaatcctcccacctcagcctcccgagtagatgggagtacaggtatgtgccaccatacccagctaatttttgtattttctgtagagctggagtctcatgagccaccatgcccagcctgccttacttcttcctttccttctttcctttcctttcctttctttcttttttctgagactatcccgtagaaccttccatgacctgccccacctgtcttatgtataatgttcatggtgttgatatcatgataggtgttcctagatgtgatggtatctttctttctttctttctttctttctttctttctttctttctttctttctttctctctttctttctttctttctctttctttctttcctttcttccttccttccttcctccctcccttccctttccttcccttccctccttccttccttctttccttccttccttccttccctccctccctccttccctccttccttcctctctctctttttttttttgagactgagttttgctcttgttgccctggctggagtgcaatggcgtaatctgggctcactgcaacctccatctcccgggttcaaacaattctcctgcctcagcctcctgagtagctgggattacaggcacctgccaccacgccaggctaattttttatatttttagtagagacagggtttcatcatgttgtccaggctggtctcaaactcctgacctcaggtaatccacctacctaccttggcctcccaaagtgctgggattacaggtgtgagccacttggacccggccccttcctctttctctctgtctctctctttctttcttttattttttatttttattttttgaaatggagtatcactggctgggtgcggtggctcacgcctgtaatcccagcactttgggaggctgaggtgggctgatcacgaggtcaggagatggagaccatcctggctaacatggtaaaaccccgtctctactaaaaatacaaaaaaaaaacccacccatattagccgggcatggtggcaggcgcctgtagtcccagctactccggagggtgaggcaggagagtggcgtgaacccgagaggctgagcttgcagagagctgagatcgcgccactgcactctagcctgggtgacagagcgagactccgtctcaaaaaaaaagaaagaaagagagtatcactctgtccccaggctggagtacagtggcacgatctcggctcactgcaaactctgcctcccaggttcaagcaattatcctgcctcagcctcctgagtagctgagactacaggctgcactaccacgcctggctaattttgtatttttagtagagacggagtttcaccacattggccaggctggtctcgaactcctgacctcatgtaatccacccgccttggcctctcaaagtgatgggattacagtcgtgagccaccgcacctggcgtacagtagagcttctttcaaaactggaaccaatcctctcaaaccctgccactgcttatcaattaaatttatgtcatattataaatccgttgttgtcatttcttttttttttttttttttgagatagagtctcactctttttgcccaggcactatctcaactcactgcaacctctgcctctcgggttcaagtgattctcctgcctcagcctactgggtagctgggattacaggcgcctgccaccatgcctggctaatttttgtatttttagtagagatggggtttctccatgttggccaggctggtctcaaactcctgacctgaggtaatctggcccgcctggcctcccaaagtgctgggattataggcgtgaaccactgtgcccagcccttgttgtcatttcaacaatgttcacagcatcttcatcaggagtagattctatttctagaaaaacattatttgctcatccataaaaagcagctcctcatccattcaaattttacatgagattacattaattcagtcatgtcatcagactctactttttgtgggttctttttttcttctttttctgtgtttctttctttttttttttttttttgagacagggtttcactctgccacccaggctgtgctgcagtgatgtagtcatggctcactgtggcctcaacctcccgggctcaagtgatcctcctgcctcagcctctcaagtacttgggactacaggcacatgctaccacacctagctaatttttgttgttgttgttgttgagatggagtcttgctctgtccccaggctggagtgcagtggcgcgatctcggctcacagtaacctctgcctcccgggttcaagcaattctcctgcctcaacctcccaagtagctgggactacaggcacgcgacaccatgcccagctaattttttttgtatttttagtagagacagggttttatcatgttggccaggatggtctcgatctcctgacctcgtgatccgcctgccttgtcctcccaaagtgctgggatgacaggtgtgagcccccgcgcccagcccacccagctaatttttaattttttttgtagagacagggtcccactatgttgcccaggctagtcttgaattcctgagctcaagcaatcctacgttggcctcccaaagtgctaggattatagatgtgcaccaccatgcctggccttctcttctaattctatttctcttgttatttccaccatatcttcagttacttcctccactgaagtcttgaattcatcaaagttactcataagggttggaatcaccttcttccaaactcctgttaatgttgatatattattgacttcttcccatgaatcatgaatgttctgaatggcatctagaatagtgaatcttttccagaaggttttcagcttactttgcccagatctgtcagaggaatcactgtctatggcagctatagccttataaaatatatttcttaaataataagacttgaaagtcaaaattaatcctttatccctgggctgcagaatggattttgttagtagtcatgaaaacaacattcatctccttgtacatctccatcagatctcttgagtgaccacatgcactgtcaatgagcagtaatattttcaaaagtcttcttttctgagcaataggtctcaacagtgggcttaaaataaaccaagttgtaaacagatgtgctgtcattcaggctttgttgttccatttctaaagcaaaggcagagtagatttatcataattcttaagggccctaggattttcattgtaagtccatttgtctcctgtttaaatcataagtatagaaacaccttaatatggccattatttgatagtagtgacatggaaaatactttgccatcttagaaagggcaatgactaaatactggcctaatgtatgtttttcctccgagaaggaggaaagccacttaatggtcaacattgaatcctgtcaagcagagtaggaggcaatatagcctcctttatagcaatacagcctcaggatattcctgagattattgaaagattaactagccgggtgtggtggctcacgcctataatcccagtactttgggaggccgaggggggtggatcacctgaggtcaggagtttgagaccagcctggccaacatggtgaaaccctgtctctgctaaaaatacaaaaaaattagccaggtgtggtggtgcaagcctgtaatctcagctactcagtttcacgtgcatccgtgtgaaaagaccaccaaacaggctttgtgtgagcaacaagcctgtttatttcacctgggtgcaggcaggctgagtcagaaaagagagtcagcaaagggtggtgggattatcattagttctttctttttttttttttttttgtgagacagagtctcgctctgtcgcccaggctagagtgcagtggtgcgatctgggctcactgcaagctccgcctcccaggttcatgccattctcctgcctcagcctcctgagtttctgggactacaggtgcccgccactaattttttgtgtttttttagtagagacggggtttcaccgtgttagccaggatggtctcgatctcctgacctcgtgatctgcccgccttagcctcccaaagtgctgggattacaggcatgagccaccacacctggccatatcattaaatgttcttataggttttgggataggcggtggagttaggagcaatgttttgtgggcaggggatggatctcacaaagtacattctcaagggtggggagaattacaaagaacctttttaagggtcggggagattacaaagtacattgatcagtcagggtggggcagaaacaaatcacaatggtggaatgtcatcagttaaggctattttcacttcttttgtggatcttcagttgcttcaggccatctggatgtatacgtgcaggtcacaggggatatgatggtttagcttgggctcagaggcctgacactcatgaggcagaggttgcagtaagccaagatcacatcaatgcactccagcctgagcaacagagcgagactccatctcaaaaaaaaaaaaagtagaagaaagaaagatgtatttggattcactttaagaaag

SEQ ID NO: 97176 - DNA, 14491 bp, Homo sapiens
gagaactaaaaaatagcatcactggagatttggattgatggggacccatgaccactgggcattgagcctttgtggcaaaatctcagcaagacaaaacaatacccaggcactaaggaagaatattctggaagattctctgtgggacccagaaaagaatacatggccaccagttggctaccctggaagaaactgggctctacccaacattaaaggtggccaagaccccggcagtcagctaatctaactgcctctttctacaggcaaggcaggggcagcctagagagggaggaaaggaagaaataatactgattgcgtatctactgtgttcaggccacggagtacacaccttatagtcctcacaccagcctaacaaggcatcggagtgaggatctcctttgcataggcaaggaaacaaaggccaagaaaggcccaggccccatatttgggtcataataacatgcaaactggatccgtggttcagtagcccaggcctctttgcacatatagattattgctctgccctttatagtggggataaatttgttgagtggtggcatttggtctgtgaataaccagaggtcggtaatttgccagttatttccaagctgggaaactccaggccaagctggttttaccaagtggaacccgaaaatatatatatggtgcccttgcttctctggaatctggctgagggtctcagcatcgtatcccggctaggaccctcagctctcctgtttttcagctctcctgttgcagttatttattgctgggcaacaaatcaccccaaaacttagtggcttaacacagcactgatatgtcacctgccacagctctgtgggtaggtaatcgggcaggtctgctggtctcacctgggatcattcacatcactgtggtccgtggatggctggcagttggtgctggtctgcagtgccccagtcttcatcctccaggaggctggacaggtctttccatagcatgactgtctcagggcagcgttccaacagcgtgaaggctaggaactgcagggcttcctaataggcttcagaacgtgttcatcgttgcttctacctcattctactcatcagagcaagtcacagccagcccccattcaaagaactggagaaatagagtctctgcttcttgatgggaggagtgtcagtgtcagactgcaaaggggaatgcacatcgggggatactagcaactctttccagatttccaccagttatttgtgaggctaaagcagtgagagaatcaccatactcttcacacatagaccttgcaaagtgttggtactctgtcttggtttgcttcctcccttgggtataaaaatttttagtggcgatggcatgttatagttcagcgtgttgctgggaagattaaacataatgtatttaaatcacctgtgaaggtgcctcctacagagtagctccttagtcatactgtctgctgttgtcatggtgaccatcaccatcctttgtcctggggaccatgagaggagatggacatggagcttaatgcagggtgcaatggcttctccctggtggctaccatgatgcccctcagttccccagcaaactcatcagtggccctactttaggcccatcccaatggccctgtgcaccttttagtaaaaattgtgcagattgaggttcaaagttggaggagcaggggcagatacttgggttgcactcaagtcctaggctctactgacttggctgtccaggtgactggaggatttcacggatacagctgcattctcaggactcaaagccacccacagtctggcctggaggaggcggtgactctggggctccgagtccctgtgaagtgagtggccacaggagttgagaaaaccaagaatgaactagacaggagggttgtgctatgaagcacactcagtgttgtgggtgttcagtggagggaatggttattccacttgtgtggcaggggagtgtgtggggccatgaagaattgtcaagtttggggccaggcacagtggctcacccctgcagtctcagcactttgggagactgaggctggccaatcacctgaggtcaggagtttgagaccagcctgaccaacgtagtgaaaccccgtctctactaaaaatacaaaaatcagcagggcatggtgatgcgtgcctgtaatcccagctactcggggggctgaggcaggagaattgcttgaactctggaggcggaggttgcagtgagctgagatcgcgccactgcattccagcctgggcaacagagtaagactctggaaaaaaaaagaaaagaaaagaattgtcaagtttataccagcagagattgagaggggagaatcccagatgggcccagcctaaggaacgcttgcggcaaagaggaaagagtgaatcattggtttctcgggacccccccctccggttatgaaagggtgaggagtaggaatcaggctggaaaagtaggttggcattgggctatggagaaccccaaaaggccagtgtatgaatgggggcttggttcctggggcaaggaggcaaccaagacaccacctcatctgtagctccagagcaactattccatagccctgtgcccccagtttctctgtaactttaatcacaattaatattattccatttatataaaagaaggaccatactgaactttcatgagtggtggtggaggtaaggcaggaatccgacagtagggtgccaccactccgtgaaggtctctgagcctctgggtgctggagacgcaggtggtggcagagcaggcagagtgccctcctgtttcctgttctgggtagactgtgagtactggtttggactgggagtgaatggcctttggggagaaacttttgctcttagaattcagaggaacacacacatcttcccaagcatttccctttgccctctattgaggctgacagctctctgccctggcacctcctagactatgagtgatttaggttatgtctctttgcagtgctgagcagagcactttatacatcatgaggtctggatccatgtggggtgtgtgtgtgtgtgtgtgtgtgtgtgtgtttagagacagggtcttgctctgtcacccaagctagagcacagtggcacagtcatacctcaaggtaaccttgaactctggggcttaagtgattctcctgcttcagcctcccaagtagctgggatgtcaggtgtgcgccaccatgccttcctaattttttagtttttttagagatgaggtctcactatgttgccaaggctggtcttgaacttgtggcctcaagcgatcctcctgcctcagcttcccagagtgctgggattaaaggcatgagccactgcacccagcttagatatgtgtttgaacgggtggatttatgatctacttgtagccaagtggaaatgtttcaggcaagtactgagttcttattcgtcttgtgtctcctctgcagctggagctctcaaacactgctgtcctgcaccagatgcggcgggaccaggtgacagacacgtgccgagccaacagcgccacaagccgtaagcggagggtgctgacccccaacgacctgaagcacttggtggtggatgaggaccacgagctcatctactgctacgtgcccaaggtggcctgcaccaactggaagcggctcatgatggtcctgaccgggcgggggaagtacagcgaccccatggagatcccggccaacgaggcacacgtctccgccaacctgaagaccctgaaccagtacagcatcccagaaatcaaccaccgcttgaaaagctacatgaagttcctgtttgtccgggagcccttcgagaggctagtgtccgcctaccgcaacaagttcacccagaagtacaacatctccttccacaagcggtacggcaccaagatcatcaaacgccagcggaagaacgccacccaggaggccctgcgcaaaggggacgatgtcaaattcgaggagtttgtggcctatctcatcgacccacacacccagcgggaggagcctttcaacgaacactggcaaaccgtctactcactctgccatccctgccacatccactatgacctcgtgggcaagtacgagacactggaagaggattctaattacgtcctgcagctggcaggagtgggcagctacctgaagttccccacctatgcaaagtctacgagaactactgatgaaatgaccacagaattcttccagaacatcagctcagagcaccaaacgcagctgtacgaagtctacaaactcgattttttaatgttcaattactcagtgccaagctacctgaaattggaataaagggggtggggagagggagagaatcatgctttttaatttaagatttttatttgtcaaaagaattatatggatattgggttattttgtaaattaatatttctttggggatgatgctgcgagcagcatagtgagaattatttaaaatccttcgtagggaaggacagctgtctttgcaggggaaataggatgggtcgtccttgtctgtagaagtgaatactgcaacactgtctcaaaggtttcttgtgttctggtgaattccatgaattgtgcattccataaattctaattaatattatttatagttatttaaacatggtctcattatttctttttgtggcagcaaaattctaacatctttccagaagaaatctatgattcctgctttgcttgctacagctcatttgggggcatgaatgttctccttactaacctctcatggagtcatgtgataacagccattgtcatgtgtatggatgccaccattcttgaatttctgctagaaataagtaggttgctattgcacttagagtcatctttgcaagggactcattccaaaccaattccaatcgacctgaaagtcccttgcactaaagaaatgtgatttttttttaacccaaggagaaagttggttgtaacaatttttcaccagaattagcaatctgatagaataggcttttttaacaggaattttaaactggcggtgccagttgcagtgaaggtgaagtggctattgctttatattcgacaaatatttattgagcatctactatatactaggccctgaagatagagcgttgaacaaacccaatagtcttggccctcaaaaagctttatgtgacatagagcatccagctcgacaattagcaaacccctgatattattcatggacttgacatgaggtttggactattcatgagcaacagcagaaggtccatgacccctacaaatttacatttttctatggcccatatttgaaaacctcacattcggagcaggccactttatattcgtgagtgatcccaagctcactgaccaacagaaaagatgctaaaaaaatgtgtcctatcatgtgcctgctccaactgatgggtaatgtctgcctttaagccccagaatggattctccaggcacagtgtggaagagtgctgtggttgattagcaatgtctgccttgggtgaggaaaggggaacactcctcaagtgcctcctactgtcatctccattcagcctagcaccacatccccatgtagaagtgttgtcttctactgcttgccacgtacaagtgtgaaatgccaaggtgagactcgtacacttggggatttgcaatggtttttacccctcatgaaggtcagaggtggactatttgtacacatacacacatgcacaccctctcacgtcctccagaggctgaaagactatcagcatcttggtaactgccatgcatgagcagcaaggacagccttccataatccatgccccatttcctctggaagcctggaaacttttcatttcctgttccttgctaattaacatctaaacatgcttctcatttccagccattgctgatgcttctcagttgaagtttgagccacatccctcttacagctagtgaatgagttggtagcagctactgtatataataataataatagttttaataataggggagggtgggatggggtgtgggtaagttttgccttttgttttgtttttgatgccgtatatagtgaaggggtgaggatattctaaacaaacaaaaattgaataatttattcacagaaactattaagattgtattgtaaagctcacagcaagctcagtgggcagcagctgcaacatctcaccggggaaattattttatttaacgtgagtgagatgtgggccggagaaggtagctgaagctatttataaaacgttgtgtaccttcttccgagctctctcccctttgtgaagggcgcagcaactatacccttgatggatggagatttaygcaatgtgttttactgggtagagtgacagaccttggctgtccctggaattgagaatctggaccttatttccaggcagagaacactgtcctcagaaatgggacttctgataatgaaacaggttgtccaacattttctaatacgcattctacagaacacaggttccaggaggcatcaggttggtgtgatgcagactaagggttttgtggtcaaatatccttaagaaacaaagttaagtcagtttcctttctgcaaggacttttcagccttcaatgtgtgctgtgcatggtgaatccccaaaaataatccttgagtctgtagcatttcctgaacttacatgaccaggatactctattttgcagatcaccccacagagctagggttccaccgagtatactttgcttaggttgacttagcatatctgaggtcttcaaggataaaaactgccaccccaacacccttccattaaaaaaaaaatacaaaatagcaccacagtctccatctggtttatagcaacaraggtactttatttaatgaagcaatggttctaatcctggatactgccayggactacaattcyatccctcccagagggagtggaggaagtcttgggtggtgtggacagaaggaagagaggagagggtgagtggggtatagggcccagggtggctccctactcctcaggctcaaaaggatgctcagtgggaacagatgatctcttgatgagtgcttcttcagtttcatagtttggaatcgttcactgtgtgctttttggggggttttcaatggaaattcacgttgctttgcatttctgtgtccgtctttggtcagttgtgcaagcctgctcactgtcatgtgaagatggcctttcatctggcttctctctcttaagtgagaaagattgtccttcaggggacatgacatcaataggtttctggaatgagggactctttctccccgtgttttgctttgtgttcacattttcttttctaatggcattgaaactttaaaaaaaatggattcaactgtttttgcagaatgtagaaagtattctgtgtccttggttaaagaaatccacttgtgaagtgtgcctggaaaatgaaagtttgtgttttttaaagaggaatatttgaaactgctttctatgcatgcttagctggagaaaagtacaggcaggcgtcccatctcccagccacttctcaaaggtgctgctgtgttttaaagaccaggtacagccagggcagtatttgcaaggacattcctgcttactttatccctttggttggaaagctctagatgattcccgcagctcctccagaccccgcctccctgccctccccagctggtctgggaagaggtggtctgctgacctgtggtatctcagaggggacgttcctcctcctccctgtgcaccaggtgggctgcaccctcctgcctattcaggatgtggatgccacaggagagcagcaggcagtggaaacttcagttgcactggttctcctggtggcaaaggcatgaagcacaggggtcgattaatccaggctactagaaagctccagagcaaagtgtgcgggtcccacaaatgcttggctggtggggtctggatcagtgctgagatagagttggcagaagaagcagaggcactctgcttgctttcctagccagtcctcccctacacacacacacacacacacacacacacacaatctcagctgcgccattctgtgcaatcccagtgaccaaatcccttccttgcccacctctatgtcagcaggactgaccacatcactcccccgagttcccaccaccagcatttcctccaacctttttccatcacaaccagttagaaccctacaggcaacaaggccttctagaatccgcttaacccttggctgataacaggcaaatttcagtctgctacactttgttaggtccagaaggagctgcccatactactttcttatgagcatgctcagtatggcatatggacatgtaatgtcacatctttgtggagtgtgattttyttttttyacatatttgtatgcagtagagrgcctgttgtagaaaacgctccctgtatcttgctgtactgttaaagaaagctgaattccacattgccaacaaaagcgtgaaaatgttcatgaaccttcctccaggaaaagccattcaagcctgattatttttctaagtaacttcaattaaattgaagaaaaaagaagctgctttctgtgtatggtttgctcatggctcattaacaaaagactgtaggggtggggtgggccgtggaccttagcatgcggggggccctgctcatgtgtatcaaaggatggagatgcaggcttcgttggaagactcagccctggtaaaaaccgccatagatccaaattctttctgttcatcgggtgaatggaagcttttcttctttccattttttctataaagtctttgtagactaatgcattagaaggtgcactgtgatcacacagttccaccactcgtgtgaaaaggcatgaaggctgtcagtaaatggctttggtggcagagccagtattcaagcccaggttgatgtgccttcagaactccatgtttttggcactgaatgacatgcctctctaaatggccatccatggtgccactgctaggaagttgcaagcctgcacttcaagtcccagtttttcaattccaaatccaatcctgttctgattccccacatagcttatttcggctctatggatgagcatcttttagcttttttttttttttttttttggaaacggagtcacactctgttgccaggcgggagtgcagtggtgagatctcggctcactgcaacctccacctcctgggttcaagtgattctcctccctcagccccagagtagctgggactacaggtgtgcaccaccacacccagctaatttttgtatttttagtaaagatggggtttcaccatgttggccaggatggtctcgatccctcgaccttgttatccacccgccccagcctcccaaagtgctgggattacaggcatgagccaccgtgcctggctgcatcttttagctttattggtaaaaatgatttctgtatatttttccaaagaagaaattatactcaatgttgtttctgtttttcattgtattctaatttaattttcttttaagagacaaggtctcactctgtcacccaggctggagtgcagtggcacgatcgtaactcactgcagccttgacctgggtgcaagcgatctcccggcacagcctccaaaatacccaaggattataggcgtgtgccaccatgcccggctaaccaatttctttaaacataacatctaaacatttttaacattacaatattgggtgagaaaatagatcccgttttcaaccatgctagatatggtttctaatcaccagctggctttccccactggtagctggtgcccacccatgggcatgatatccaaaaagaccaggaaccattggctaagaatacatttggccaagaatacattgctagtgtcatcactgtccttgctatggtcccatctggttgggaaatgcccagaccacagagcttagtcatcttagattcatagaaaacatacatcctttttcatcagtgaatggatgtgactttgcgatagcctgtctctgtctcatttggaacattgtaaatgtcagtgggaagcaaagctagacgaggtcatctctagcctgtttgctccccttggagtgacactgacatgctttcttgccagctaatcgggaggtgtttctgatggtgccccaggtgccctatgtctgacctgcagaagctgcagaacctgaggagcctgtggcccagaacattgcctgggccaggtcagggtaaggtaattattgatcccccaagtggacaaaaataggatgaggcagaatcagtagtgtaagatgtaaagtactctttctcgggaagagctcccttttctcaagttacgtctttcctacatttttggtattagaatatctttttttgtttccttttttttgtttgtttgggtttttttttttttttttttttttgaaacggagtcccgctctgtcgtcctgtcatcaggctggagtgcagtggcatgatcttggctcactgcaacctccacctcccaggttcaagcgatcctcctgcctcagcctcccaagtagctgggactacaggcacccgccaccatacccagctaatttttgtatttttagtagagacagggtttcaccatgttggccaggatggtctcgatctcttgaccttgtgatccgcctgcctcggcctcccaaagtgctgggattacaggtgtgagccaccacgtccagcctcttttacaataatagatgttaattgatactaggacataaaatattggtaacttagtgtcagcccccaatgtcatcttaaacattttctgaaaaagtcatgatatccaaaaagaccaggaaccactggtcaagaatacatctgaggcacgaagtgatgggagagaaacctcagggcttggtggacagaactctgtggaaatcccttctgaagcacagtcctgagtgccccacagctggacaccacaatgtggccagtggctatggcctctgggttctggggtgacttacaagaagctgaacactgggctagctacattcactgtagataaagtttatcagacatcttgggtctggggtgatgaatatgtctggtgtaataggaaaaaggaacattctagcaaggctgatatgagaaaaacaaccaccttttccctatttcacaatcttcaccagcacccgcctcttccccaaattgtaagaacccacaggtggagaaaacagccagaggttgtgagtggaggcagcctgctggttccaaatgcgttgctggctgagaaccattcccaaacaaactcccgtagtcacttcctctttgaaatagggaaaacaataatatctggattgtgccacgactgaaaaccctttcctagctgcagttcatccaccaaggagctgtctgcaacctacaggtaattacttcctatgcagggaggggacttacatttcctcatctgcggaacaaaagaattgagctatatctgtggttttcaatgcggtttttaaaaatgagcctcttaaaaatttttgcattctgaacactcatatgtaaaacagatgaggcagagatgctgtgattgaatggtttgaggcccagctctgcctttttcccataaagtccctgtaaaccatcacgggccatagggttctaaggaaaacagtttgagaagcagtaagttacgtgacctctgagcctttcctgtttgactaatgatctacctgaatcctcctctgtggcttctgctgctttatgcctaagagattgaccagttagatggtaccacgcaggtaaaaactgctttgagaagggagttaaggggatggcgttagacagagattaagatgcaacaatagaaattatttaaaaaaaaaaaacgtaaaagctgatgcagcaaagaaatagctcatagctagattcaagatgggaaccgaaatttacactcctctttccaaatgctctaccatggaaacacaggctccacctttgtacaaaaccctattaatttgaaatacaagagactggaatgaaaaacagtctctgtattaatctgctttttatttttccatggttttgttttgtttttcttttttgtttcgttttgtttttttgagatggagtctcactctatcacccaggctggagtgcagtggcgcaatcttggctcactgcaagctccacctctcaggttcccgccattctcctgcctcagcctcccgagtagctgggactacaggtgcctgccaccatgcctggctaatttttcttttttttttttttagtagagacggggtttcaccatgttagccaggatagtctcgatctcctgacctcgtgatcctcccgccttggcctcccaaagtgctggcattataggcatgagccaccacacccggctccaagtttgtttttaaaaataatagagcatctcattatgggagaagagtaagggctttggatttcacgttggtttggacaagccagcagcagctagagaagattattttgtggctaggaccagccttgggctttatctgatagatcaagccagaaacaactttgtgcccggaaccaaactggcaaaaggatagagaaaaaaaatgcctaaagaagagatgaaggaagaaggaactctgactatagaaattatacctttatgctgagcttctttgcacagtgaacacaaactcaactgtgggtgccttggaaatgtttgcttttaatgtgctcttttccaaattctatcttttcatagggaaagctgaccataaaggtagctaacttttattaactattagtttattatatgccacacagtgtgttacatgctttcaatttaatcctcacaaacaacaaacaaggtagatactgggaccctttttacagattgatatggtttggctgtgtccccacccaaatatcatcttgaattgtagctcccataattcccacatgttgtgggagggacctggtgggagatcactgaatcacgggggcagtttcccacataccgttctcatgttagtgaataagtctcacgagatctgatggtttttaggaagtttcccctttcacatggctctcattctctcttgcctgccaccatgtaagatgtccctttgcccataattgtgaggcctccccagccatgtagaactgggtccatcaaacctctttcctttataaattacccagtcttgggtatgtctttattagcagcatgagaatggactaatatacacataaagatgcagaaaattagaataaataacttgcctcaagttacccagaattcagatccaggtctggttgactctccagcccactaaaattgggcgttattggtggaccaagagtggaggaggccagaagtctaaacctggaagccaatggtgctacaaagagacatggatagagatgaaaactttagcccagttggcaaaagcttggaaaacctactggactgatgaacatcaaatttggacaaactgtttagaaagcttggacttccaataaaagccaatgaatggcaaagtgaaattcaaatcagggtctcagagggagctgtgagactgctgaatggaaagaacaagccataagtattctgatgctctaacagaacaagccagcctaaggttccaacatagccccaaatcaagttccaagggcagccattcagggtaaaggttgtgttcaagcagctgtacacacagcaacactgccatgcaatgcacttgggcaagcagcagtgggactggagtcatttggcccaaatgaaggacatttccaagcagaacagaaaggcagacaaaaatagggtaagagaaagagactccatggcaggtgggagtgtcttagggcacctttggatgtctcttctacagagttccctctgcgtggtagcaccctgcacacagccctaggccttactctgtaagctgagagctctgagcttccccaacttcccctcctccatctcagccccagggacctgcagctgtcaagagatacattcattccttcatctgtgcaaacatatattaagcatctgcctatgtcagcccctgtgcaagatgccaagaatatgcgaattcttaagattcataagtggacaacatagaaatgttaacgggtagttatgggatagttgacacatgcatgaagacaaaacaccaaattccccttgggaaagaagtgatgcaagtcagtagctagagagatggagaaaagttgagggtttggaacagtggctcccaaccaggaatgattttgccttcctatggatagatccccacaacaaaaacttgctcagttcacaatgtcagtaatgctgagactggaaagccctacattggagaaatattaatttgggatagaacctatgtcttttagtaactgaatggaaatgtaggtgaggaagagggaaataagaagggaaggaggattgccacgaattgagtttgagcaaccatagctggatagtggggccattattggagatcagttaattaggagcagaaacaggttttggggaaggctctcagttaactatgagacatgctgaattaaggttcaggtaaaacatccaggagaagttgg

SEQ ID NO: 97177 - DNA, 14414 bp, Homo sapiens
agtgattctcctgcctcagcctcctgaatagctgggactgcaggcgcacaccacaatgcccagctaatttttgtatttttagtagagacaagttttcaccatgttgaccaggctggtctcaaactcctgacctcaagtgatccgcctgccttggcccctcaaagtgctgggattacaagcgtgagccacggcacccagctggctttctcaaacttaatcgttgctttatctggtagttcctttgtttatgagaaaaggaattgaaggagagaggaggagagtggaaaacatcacccctgaatatcttaaaattcttggtcacagtaaattagcaaggggccaagggagtgaggcttcccatgtcaactccgggtgccagcagagaaaacctagatgcatgaaggccaggagatcactcacctctgtatccccatccctgagtctagtagtacgaagaaatttgagggtttttttgttttgtttttgttttttgaatcactttacctggctgggcgaggtagctcacacctgtaatctcagcactttgggaggctgaggcgggcggatcacctgaggtcaggagtttgagatcagcctggccaacatggcaaaaacctgtctctactaaaaatacaaaaattagtcaggtgtggtggcgtacatctgtaatcccagctactcgggaggctgaggcaggagaattgcttgaaacccaggaagcggaggttgcagtgagccaagatggtgccactgcactcctgcctgggtgacagagcgagactccatctcaaataaaaataaaaataaaaataaataaaattaaataaataaataaataaataaaataaataaataatcacttaaccaataaccaattactcaggtctcaactcttctgctgtctgattaacgtaacctcattttcctctagaggccatccctaaagctatttccttttagtgatatgtatcaaacactatgttgattcacctggttgtaaagactttgcctgtttttgatttcctggtaatcttgtggagggtaccacaaacaaataaacacattttgactctgtaaggggctgtgaagcccatattctatgttcatttgtagtgactcaaaaatatttttatattccctcccccaccacttgtttcccacctgcttctctttctgatttgtacttgggaaggttctgttttggtgcagactcgggttttttacgtggttgccaggaaacagaagtcatttggttgagatgcatataatgttaaattgttcccggctgcctctggggcagagcctgttgaaactccagtgtgtatgtaagtcatgccgagatctggttagacatgaagatgtccgagactttccctggacaggtcagggagatgcccaggcactggctttttttttttttttttttttcgagacggagtctcactctgtcacccaggctgaagtgcagtggcatgatcttggctcatcacaacctccacctcccgggttcaagcaattctcctgcctcagcctccagagtagctgggactataggtacacaccaccatgcccagctaatttttgtatttttaatagagatatagggtttcactacgttggctaggctggtctcaaactcctgacctcgtgatccgcccgccttggcctcccaaagtgttgggattacaggcataagccaccatgcctagcggcaccggcttttaaaaggagagatccctgtaactgcaggtggtccgaggaggcttgagaaactcagtgcttaagtatcaaataacttcaagatgggctgttggaacttctagaagacacaaaagcttgagaaggctggaaggcaccaaagctggggccttattttatctacctattctactccattccattccatcctgtcttgccctaagcatattgcaaatattaactcatttaaccctatcgcaaaccaatggcgtagaaacgatcataactgatttcacagtgaagaaatggaagtctagaaaggatgggtaacttacccaaagttgcatagttagaaagtggaggagctgggatttgaaccaagacagtccgggtgtcttagtgacagcatgggggggtggataggaatgcggcttcttcggctgcacagcttgggttcaaatctcacctctaacattagcatgctatgttagccttgcataaactgtctgatccccttgcacgtcagttacccaagctttaaattggaggagagtaaatcgtaacatgtcaaagcattcttgtcaagattagcttttttttctttttttcttttttgcctgactcactctgttgcccaggctggagtgcagtggcataatcacggctcactgcaggcttgacctcgcaggctcaagcaattctcccacctcagccttctgagtagctgggactacggctacacctgggactacaggagcacaccaccacacccagctttttttttttttttttttttttttgagacagattctcactctttcacacaggctggagtgcagtggtgcaatctgggctcactgaaacctccacttcctgggttcaagcgattctcctgcctcagcctcctgagtagttggggttacaggtgtgtgctaccacacccagctaatttttgtatttttagtagagatgggggtttcgccatgttggccaggctggtcttgaactcctgaccttaggtgatccacccacgttggcctcccaaagtgctgggattacaggcatgagccactgcgcccggctgtattttgtattttttgtagacagggtctcactatgttgcccagcctggcttgaactctcgggctcaagcaatccccccacttcagcctcccaaagtgctgggattacaggcatgagtcactgcgcccggctgtatttttgtattttttgtagagacagggtctcactatgttgcccaggctggcttcaactcctgggctcaaacaatcctcccacttcagcctcccaaagtgttgggattacaggcatgagccactgcgcccactaagactggcttttaataactgttagcccttcttaaaattggctaatacattgttgtaggacagtaagtagggcatggagttccctgactcctgctctgtctctgatcttcatcccacacttgaacttaggcatgaggctcagggatgggatggaggagtcaggagtgatgtatgtgtgcaggtggggtgggcaatgagttgaataagctacttggtaatttaaaaaaacctgaatgtcggctgggtgcagtggctcacgcctgtaatcccagcactctgggaggctgaggcaggcagatcacctgaggttaggaatttgagaccagcctggccaacatggtgaaaccccgtctctaacaaaaatacaaaaaatgtagccgggtattgtggcggatgcctgtaatcccagatacttgggtggctgagtcaggagaatcatttgaacctgggatggatgttgtagtgagctgagatagtgccctgcactccagcctgggcgatggcgatggagcgagagtctggctcaaaaaaataaaaaataaaataaataaaaaagctgaaatgtctagtcacagcatccaaatcgccatgtctggaagggcatgatgaagcctcatccccctgcatcaaacccaactgctagtttattcctttatggtcacaaatctgtcgggcatttgacatcagcacttcttcatctattttttcttttttttttttttctgagatggagtttctctcttgttgcccaggctggagtgcaatggtgtggtcttggctcactgcatcctccgcctcccggattcaagtgattctcctgcctctcaccttcctgagtagctgggactacaggtgtgcaccaccatgcctggctaatttttgtatttttagtagagatggggttttgccatgttggccaggctggtctcaaactcctgacctcatgtgatctgcccgcctcggcctcccaaagtgctgggatcacaggcgtgagctaccgcgtccggtctcttcatctattcttttactgcttttgaggtctctttgttttggaactgggcctgaaaccagccaggaattagagtttagggtcctcagggaggagggccctaaatggaagagggctgagggtgaaggtcttactgtttctctggggccctggctatggatgcagctgtgctggaggaaaagggggtgttggggaggcgggcagagaggacgctcagctacgccacccagatctgcatcgggactcaggaacgagtcccctggctgccgggagcaccctcagccttcagccccttgggtgtggcttctgctggtgagagttgcctgactcaagatgtacgggtctaaaatcctgccttccagtcccaaatcgggacacctctgaaaggtcacctttagaatgccctgcagggctggctgaagcttctgttgagacttatggcagctcagctttgcctctgaccagagaggcctcctcccctcccctcctctccccctgcccttcacttctgcctcctccttcccctccccttctctcttcttcccttagttttcttctcccctccctcttttcctctcttcttgctttccctcctctctgctccttctcctcctcctcttttctctccttcttctccctcctctaccctccctcctcttcccctcttttccctccctcccctcccgctcccgctccttccctggtctttcttttccctctcccctgtcccttcctctcttccctcttctctcctcccctcccctctcctcccttaccctcccctctcactctctcccctcccttctcttcctctctcctccccttcactcccttctcctctcttctccccttcccttctctcccctctcctccccaagagcactctcttgtcagcctcctgccaactccatctcagagcaggcttctggggcacccaacccaggacagcaggccaaagtgtgagaaactccaagcaaatccaacagaagacagcagccagccaagttgaatccactttttaatattgtaaccataatgcaaacaagcataataggcttttgttgaatcccataaaattggaagatgagaactatacagaagaagagcatgcgacaaacacagcctggacaacctcgcaaagagcgtggggtgggcgtcagtccttcaaggaaggtgctggagcacagggacacttggcagagattagcagcattgagagctcagaggtaggggggacggccgagtttctgacagcgtgtgtgtgtgtgtgtgtgtgtgtgtgtgtggtgagatgcgaccaggtctgcccacctccccagcttcccaagcccggaacggacactgcgacgtggggtgcccggcaccgctctttgggccttctggaaaaccactgctgagccaggagtgtgagtcttaacaatcacaacgagaacacaacaatgaaaacagtggcggcagagcacaggacatgggaggggactgagacccagctcaagagcactggatctcagtgagtcttaatcagaaccaacaccaaggacacagtgtcttattgaaacagactgccatcctctgttctggcatgggagggcttttttttttttttccacagggtctcattctgtcaacaagctggagtgcagtggtgccatctcggctcactgcagcctctgcctcctgggttcaagtaattctcctgcctcagcctcccgagtagatgggattacagatgcccgccaccacgccgggctgatttttgtatttttagtagagacgaggttttgccatgttagccaggttggtctctaactcccagcctcaagtgatctgccagcctcggcctcccaaagtcctgtgattacaggcatgagccaccacgcctggcctgggaggggtttttgaaagcatactgccctccccatgccccctcccccggacaccctcaaatcccactttggcagcagataatggaaacaaccactgggctaggcaaagtttctgctgcgtgctccaggaaatctataatgagaagtcctggggtagccagcagagattctcttgaccctgaagtccaagagaggggtgttgccccctggggacattgggcaatgtctgatgacatacttgattgttaccgttggcaggacactgctacaggtayctygtggatggaggccaggaatgctgctcagcttcctacagtacccaagacggcccccacaagaaagaattacccagccccaaatgccaatagtgctaaggttgacagaccctgcgctacagtctcctagaacttaggagtcaaatctgggcacttcgatgtcctggagttactttctaaaagactacaggaagcagtgcatggaggcagatttgttcccgcctgccagggccatctcgttaataacggactgtgttttgggccagacgggcatagccccgcttgaccagaactgtttggrtattttagaacaaaacaaactcatataaacatactaaggcatattgacagctgaccacctccctcgcacatggctttgataagtattaataggaaacagactctcgacagacactgctttccacgggtgaaagtgtacctgggtccttacatttggggaagggcagcttttcttttggggcccctttgccacaaggcagggactggcagtgggccaaggatagggagtgtgagataaagggcagaggccaggccaggttggcctccaaagtcaaatccctgttcatggggaacatctrtgttgactccctgggaggcaggccccttccctcagaccctcagacctgtgtttccttaatcccagcacctggtctttcattttaattttttttagagacagggtcttgctctgtcactcaggctggagtgcagtggtgcgatcctagctcactgtcgcctcaaactcctgggaccaagtgatcctcctgcctcagcctcccaagtagctgggaccacaggagcatgccatcatgcccagctaatttttttttttttttttttttagtagagacgagattgcgctgtgttgcccaagctggtctcaaactcctggccccaagtgatcctcccacctcagtctcccaaagtgctattacaggcatgaaccaccatgcctggcctactttttgagccaaagaggacatttggatgcaggagactatgaaggttggggacagccagagagtatgaatgggttataaaggaagactagttagtgtttctctctccttgttgcttcctggcagtctcagactacattcctgatacagacagaaggctttgaggacatggtggccacagcggcatgctgggtatgtggggcagcgggtagggaaatatacaaggaaacatggctggtttaaaacacaggctagaagtccacagatttcctaatggcaagaatgaaaaggctgcattakgcgctggtgctgtcggagtgaaggggctcaggcatctggattgcccatcctattaggaccatttgccctatgagctaggtcaggacacctctcacttgttttgagcttagggcaagacctgacctctttcaaagtccagagcaggcagctgctgaaagcgtgtttggtcagaagattctgtgttcttagccaatgtctactggctgggggtcagttttccctccgggcatctgggcatggctggacttgggaaggattcaccctgttgactccagagaagctgactatcacatcagctctgaaaactcatcttttccctgagcctgctcttcagagacctctctctcagctaggggcaagatgttttattttattttattttattttattttttttgagataagagtcttgctctgtcacccaggctggagtgcagtggtacaatcttggctcactgcagcctccacctcctgggctcaagcgatcctccttcctcagcctcccaggtagctgagactacaggcgcatgccaccatgcccagctaatttttgtattttcttagtagagtcagggtttctactaactggctgactggtctccaactcctgacctcaactgatacacccacctcggcctcccaaagtgctgggattacagacatgagctaccgcgcccagcctgcaagatgctttaatttctcctttattctcaccctctacaatggatggggtgccaggtacrctgattcagttcctggagtctctttatcactacatccgcctcttccctcactcaagccttggttgcagcaataacccccccaacagctcaacgggccatgctctgtactgtggccagaactttcttttccaagtataactccaatcgccttaatgtccctttttgaaaaacattcttagggactccctgttgccttctgaataaagcctaaatttcttgtaatgccactcacctctccccacggtctggtcccagcccaccttttctcaccctcctcagccttccaaagccagcctcaatttatcttacatgctccctgtccgtgcctttcctctcactcttcccaattcctggacaactcttaccttccagaagctaccagtgaaatcccgcccatttctcaaaccccagaaatttatgtcagttccaagacgggtgtctctctccatcagattataacctttggctgggcgtggtggctcatgcctgtaatccagcactttgggaggctgaggtgcgtggatcatttgaggtcaggaattcaagaccagcctggccaacatggtgaaaccctgactctactaaaaatacaaaacttagctgggcgtggtggtaggcgcctgtagtcccagttactcaggaggccgaggcagaagaatcacttgaactgggggaggcagaggatgcagtgagctgagatcgtaccactgtacgccagcctgggtgacagagcaagactctgtcaaaaaaaaaaatgattctaaccttctgcacgagaggaactgtgttttgcttatctctgcaaactgcccggtgccttccacacactggagaagcaagacatgttataagttaagtgaaaaattaaaatgcagtaagttttgaaccaggtactgtaactgggcatttcgtgggcattgtctcattcaatccaccttgttatacaggtgggtatgcagactctaaaaggtcaagtgagccgcccacagccatctgcaccaacaggggcagaattaggatttgcactcaggtcggctcccaaaattccatattgatgggtctgaagtgtccccccgcaaaagaaagacacctggctgtctcactccagggaaaccaaaagaagccctctctcctcccaaggagtttaacatcatctctctgctctttcacgacacaagctgtgggaactggatgcatagtgatggcaggtgagcatgatgttccggtgttcctatttcaggagacgtctcattcctcctggccaaactcacttttgtgaaatggggctggagctgctactggtcaattcagggggaagagggaaataaatgggccataacccgaataacccccaaatatcttgtcaaccctattttgcttacccattgcttaattctattttgcacttaaacggttggctacgaggcctggatgaaaagccaccacgagagggcagtatttccccacccttgatctgagcctaacaatctggactccactctggtccttgagaggttactcaacagagagagaggcttttggtatcaggaattctggcaaatgaaagaaacacatcagatcgctctcctgccttctagcctggagttgtgaagcagcttgtgttggggattgaaaggtgtttacttaaaaaaaaatctttctggagaagaaggatgaatcctggttttataatcatttctttggactccttgacaaaatgagacaatgtttccatctgtctgctactagaaaggcaggcacatgcagaaaggaggtgcctggcaccttgtaagcgcttctaagtatttattccctgatggaaaagcattcctgcataaagcttgacttggagtgggaagcactgatcaatttgtctttaatggggattggacacaacagtttccttccctggggaattggggaggcgtctccaaagctataaaggattggaaagaaagcctttgggaggaaagctactaggagctggaaatgggtttgcaggaaaggagtttagaatgggcttcccttcaggattagaaggggtgagtgtgggatgctaagtgtttgttctttatatctgtggaagagtgagcaggggaaattgggattaaaggaaggcaggggagattatagctggcatgaagtcaagctccatgtggcaggaacaggacaccggtgggggctgccagggatggcagagcaaggtgagtcatagattgccttttcactttaacagtctcctggcctgggccctttggggtcttggtgcccccactgtaaagccctttcaaagagggccagtgcacttcctctttagcagacacccaaactgaacaacaagatatgcccacgtacagtatataaaagaaatgtggtttttctgtatagcaagacacaacaaacagggtagaaccagcagaacattccctttccatccttggggaccctgcagtctgggaggccactaggatttcttgtctctttctgggaactgcctgacactaatttgtagtatttaaaaaagtatacaaagggatcccttcccaccatttactctgagagagtaaattcaacaggttgcctcttagggaggaattacaccggctccaattcctaccgaagacttggctgcccatttttgatctgagttgagggtaacttatttgtcaaaattaatttaacaggtttaaaactttggagatcaactgcagagggcaacaagcctgagggacaagttcttcccaccccaagttgtggctcctatcgaagaagccacgtgggacctcattatggcaactctttccaacctcatccactttaaccagcttccattatttcatccccaagggtgaagcagcaagcccgctttgggggaataaaaaaataataatcatattgttacttgatattgtttccaggcaccaaagctttaacatttaatccattcatattctttaggttcgtatgacattatgactaggaaaaactgaggacaagtgacccatccaaagtcatccagtggcaaagtgggaagatccttattgccaccaggcttctttgaacaacataacttccaggccccttggatgctattgctggaggagggggtcagtcaatggatgtggcaaagtcaagtgattctagctggtatgggtgggtttggggaggggatttgcacaatccattggatgggttcatgtcacatgagggctctgctcactggtatcaaaatctaaatgcagcaaattctgggaatgcctctttcattgggagacagcccctttaatcaatttcccactcctctccccatgccctgaaccctttctaactagaacaattatggggcttccaaatgtttcaggtacatgggcgtggaccctaattatggacacacgagggattaatatgggccagggacacgtttcttggcattgagggtcttcaatgaaagcagtggcaatctaagatcgacacacttgtgcagggaagaggacggacagagacctggcccatcacacacacacacacacacacacacacacacacacaggcacgcacaaccaaaatgtcatcataaaaaaggagaaagggggacttcagtggctgagggactggctcagagagcttgtgcctagttcctgcagcctttccaggggaaccccagagaaaaaaacccccacagcgacggccatgttccagtggtttcatgcacccgtgagttgcccttgtcggcaagagagggagtgggaacagagttttgtaagagccactgcagattagaaaagcattgcatcgcagcaggaaaactcaaggagtaaacccaggagggccgaggaaaccactgaggggcgagaagcccgaggagggaaaccagggcacagcgacaaggacaggaggcagagcgagggccacagggggtcccagaggaaaggttcagcagtgtctgtccgcgcttacaaaacttgcagccggctgggcaagagggtccagttaggagctgaaaaccctgtggaaagagaagttggggggcagttagtgccccaagggcaaggctgctgtttcctctgagtgccccagagaaaatcacccatgctctgggctcaggggctttgtctctttcttttttttttttttttgagacggagtttcgctctgtcacccaggctggagtgcagtggcacgatcccagctcactgcaatcccagcagggttcaagcgattctcctgctttagcctcccaagtagctgggattacaggtgcctgccaccacgcccggctaatttttgtatttttagtagagatggagtttcaccatgttggccaggctggtctcaaactcctgacctcaggtgatctgcccgcctcagcctcccaaagtgctgggattgcaggcgtgagccactgcacccggcccgtctctttcatttattctgtagccttagtgtcttggacaggacctggcacctagcaggggcttgttttgaaagaatgaatgaatgaatgaatgctcacaagtacaactggccaggaagagaaacatttaaaaggacttttttttttttttttttttttttgagactgagagtctcactgtgtcgcccaggctgaagtgcagtgacgtgatctcggctggctgcaacctctgcctcctaggttcaagcgattcctgtgtctcagcctcctgagtagctgggattataggcacatgctaccacacctggctaacttttgtgtttttagtagagacagggttttgccatgttgcccaggctggtcttgaacacctaggctcaagtgatccacccatctttgccttccaaggtgctgggattacaggtgtgagccactgggcccgtcaaaagggattttttttttttttttgagacggagtcttgttctgtcacccaggctggagtgcagtggcgggatcttggctcactgcaagctccacctcccaggttcatgccattctcctgcctcaggctcccgagtagctgggactacaggcacctgccacgacgctcggctaattttttgtatttttagtagagatggggtttcaccgtgttagccaggatggtcttgatctcctgacctcatgatccaccggcctcagcctcccgaagtgctgggattacaggggtgagccatcgcgcccggcctttttttttctcttgagatagggtcttgctctgttgcctaggctggggtgcagtggtgccatcatggctcactgcagtctcgatctccctgggatcaggccatcctcttgcttcagcctcccaagtagctgggaccacaggcgcgtgtcaccatgccctgctaatttttaaattatttgtagagacagggtctccttgcgttgcccaggctgatcttgaactcctgggctcaagcaattcacccacctcagcttcccaaagtgctgggattataggtgtgagccaccacacctggccttaaaggcttttgacaacccagggacttgtgaccttaaagacaatgatatgagtctactggccacgacagtatgttttagagactgctgtgtcatcgtaaggggaaaacaaagaagatgccaaattcaagaaatgagtgtatgccttgtgttgttgaaaaaagagacagctgagtccccacccaatttaaagtaaagggcgtccaggggtgctttccaggggttctgtggcagggactggggcggggagcactgggaagtgaaattacgatcaaggttgccatgccatagaattcaagtaaggtttaaatcatgagacccgggcacagtcttctggtgcctcagcctgtttccagcaatttctagaggttcagtgaaattgtcaaaatcatgtgaattataatttgtgttgatgaaaaagcccccagccatttaggggatgagagagctggtggaaaggacacaaaaactgagcgccagacctccacctagctccaggggcgatcccattcttctccccactttcctaaatgagcagcgttcaaacacttttgtagaagaaacccttgccctaaatctgatgctaaaccccagtaggtaaaaaacaaacaagacagatacttctggtagaaatgtcacaactccggccatgtgcggtggctcacacctataattccagcactttgggaggctgaggtgggcagatcacttgaggt

SEQ ID NO: 97178 - DNA, 13259 bp, Homo sapiens
agggaactgaggttttgagagcttcccctgaggactctgcaaaacgaggtggtgtctggtttggatgaaagtggtcggtgattcctcaactcctgccctgcctccctctctcgttcctccctaacatgttatgctcttgttggggctgggatgccctaggcccaaggttaccaaatcctgggtttggaaaattgctgctgggggtggtatctaggaccagagaggaatctactatttctactgtgaaataattcagcagggggtcttcttacttcttccctttgaggacaaagtttctctcgaataaagagactgaagcaagagtgtgtggctcagttctgggggttcctgccatcacctcccttttgccttcctcacttacttcacagaacagcagctgaggctcagagaggtgaggcrgccagtgcaaagtcacagagctatgttgtgggcagcaggagaagccctgaagtccccaacctgccattctcaaaccttcgagctccaagaaatttgcattttgaaaaaaattcttttcacttattttgcttttctagcaactgaggatgtgaaagaggtagttactcacccaagataatatagtaaaccctagcagataagggacataaagccaggcctcctcatggtcaggtctatactctttggcactgcatcaggtggcccaaggacagatgctcctgtgacacattcatccattcaccttttcaccaacccattcaccctaacatccacccacctatccacccacccattcactccaagatctacccatccacccattcaccccaagattacccacccatccacccacccattcacccactcattcaccccaagatccacccacctatccaaccatctattcaccccaatatccactcacacatccaccatccattcactttaatatccacccacacatccacccacccattcacccactcattcaccgcaagatccattcacccatccacccacccattatcccaagatgagctcacccatccaccccaacatccactcatccacccacttacccactgactccgacatccactcacccagccattcatctcaacattcgcctagccatccatccactcacccattcacttacataaccatctatctatccacccattcatccattccattaaaatgtatttaacagctactcttttgctaattctgtggtaggcactatatacagagagatgatcaagacgtacacagcctctgtcctcctgagctcattcattgacttatgagagagacagccaataatcaaaattatacacgtcccccaatgggaaacaaccccaggaaatgttttctctgttgcccaggctggaatgctatggcacgatcactttagccttgacctccctgggctcaggtgatcctcccatctcagcctccggagtagctggaacctcaagcacatgccatcacacccagctaatttttgtattttttattttattttattttttgtagagacagggtttctccatgttgaccaggctggtcttgaattcctgggctcaagtgatcctcctgcctcagacgtccatagtgctgggattacaggcgtgagccatggtgccaggcctgcacacacattatagagggatccgatcctgtccaaagactaaggaaacttccttggggaggggacacttgagctgacatgtggaagatgggtgggcacggatgtggtaaggaggtgcaggaggagggtgctccaggtggaggggacagcaggggcagtggcattgatgcaagagggagcaatgctcacagtgacgggaagtggtgggggtggggggctggctgcaaggagggtgtaggatgagtgagaccaggtgggggtggagtggaagggccaggcagtgggggagaccttcaccctgagatgcggcagccatgtgcaggggagtgccatgctcagatctgcatgctggaacaatgcccctagctgctctggggaggacaggttggagaggggcagagtgggaagcccggaggctactgcagcctcagatgagccatggtggaatctggactggggaaacagaagcgatgctggagagaaatggactattggaaagatatttaaaagctacccaagctttctcaggggagtggttagtgggaaaccaacccagggcccatttctgctacacagaggcctcggtgcattgctttattgtctgaaattaattgtaaatattattcaaatgtaccacccaatgcacaattatatttctcaggggagccctctgaacacataataaagccctataaataatacatatattaacctaagaggaacagaggcatgttaatgctgcaattgcaggttgtgctgtggggactttatacagatgagatgccaagcacttggacttggggtttgaccttgggggtcacctgagttctgtcctggggaatcttccagaagtctctccccctgggatatggggatacccccagacaagtcaggcagctactgctctaggtatctagtcaatagacaggtgggggcaagatgagagttggtgagggaggaagaagcacaggtctataaaacacttaccttgtgctcaaagatgcagaaacagcaacagcagtaataatagcaaatactaattcagccttgtctaagttttgggcaagctcttcagtttcattgtctcattgagtccttgcaacaaggatttcacagtaggggtattgctatctccatacacaagtgaagagattgaggttcagaaaggtgaagtgactttgcccgatgccacacagctggtaagtgacagagctgggattcaaaccccagtatgtttatcttgaaagctcctgctgttttccccagaaatgtgcaaatgcaaaatgtcctctgtagagacccttccctggagagaagaggacaagaacatattctctttcccatgtcaaattttgaagatgtgggagtcggggagtctgaggaattgctttttccttgagaggaggaaattgcatttgaatgggcttgtcactttctcacaaccctgagaatcttagggtttttgcgtttggaaaggactacttcctcaagtttgtcccttcctgttcccccatttcacagatggtgaaactgagacctctttgcaaataagatggagaccacctgcctcactgactgctgggagatgagaagtgtgtgaaaatgctcacctgagtcactcttaaaacaccatcaccccagagacctgagcattcaccaagccaccctgcttcacttcttagtttattgacaagcactttggtgctaatctgctgtaaagaatttctgcccagggtctgggctcccctgaggagtttccagcagaatcctggctgaaggggaggcgggagatcttggcaaaaactgctgtagggcagacatgctttgtttgggggcataaatgttactcttaaagattgtcctgaatatgagtgagggatgctccccatcttgacctagatagtggttacacggggtaaggggtggggaatgggggttcatctgtaaaaacccaattatctgtacattgaagacgaacgcacttcactatagtaagttatgcctcagcaaaagtctttgtaaaaataaaataattcatgttgtctgcagaaatgagttcccacctccactggtacccaggacaggtagtggcaggacaggaccaggtctgacggtttgtccttgattcaagagagcattttagagggcagtggctcctgcagcatccatccaaagaggtagagtctcaggaaggactaagccctcctgggggcctccccagcctcaccacctgactcaaagggactttgatgtttatgacaccgggtcaggtaggctcaggaatcagactgcgagggctcgaatccaagctctgctatttacgtcagctaagggcagggttagagttaggctctgtgaccttgggcaagctattcaatgcctccgaagcctcagttttctcctctgtatgacaaagggcatgataaaggtttgcagctgtgaggattcagtgagattgctgcactttagcgtttagcaggtgccaggctctttcatctgaatatgcatcggctttcttgctggcctccccacttctgtctttgctccctcaacccacactgtaggaagcagccagagtgagcttttatcacagaatacagtaatccagagcccttactatggcatcaaaacccctatgtgatcggctactgcctccttctctaagttcatctcatgctgctttccagctaggtgatcctttctgcctctcaagcaaaatgaaacaaacagatcaacagcaacaatacagccaagattggtcccacctcaggcccttgcacttgctattcctgctgtttctgggcccacttgcctcttccctttgcatgactgattcgtccgcctccttctggtctcagtccaaatgccatctcctcagacaggccatgctaaggtagcctccatccctactcgctgcctatcagatccctattttgtattagtgttttctttatactagttactgccatctgaaatcatattattatgtgtgtatttagtggccttaagtctggcccctacttggatccagcaagatggcagggactttggccaccttattgtatccctagcagtgcttagcccagaaaagctgctcataacttctggttgaatgaatgaagacattatcataagctgacattatttttgccatcatcatcatcgagtttcatgacaatcacttttataatacaccatttccaaagtattttcacatttttttcctatcttaatgaaacctggggagggtgggatttttcctcatttcaccaacatggaaactgaggtcgcaggtcacttagtttagaagtggaggagacacagttctttacttgtgccattaagagtaatcacaggctgggcgcggtggctcaggcctgcaatccccatacttcgggaggctgagacgggcagatcgcttgaggccaggagtttgagggcagccttgtcaacatggagaaactccgtctctattaaaaatacaaaaaaatttagctgagcatggtggcacacgcctgtaatcccagctactcgggaggctgagacacaagagtcgcttgaacttgggaggcgtaggtcgtagtgagccaagatcacactagtgcactccagcctgggcagcagagtgagaccctgtctcagaaaaaaaaaaaaaagagtaatcacagacaaaggaggtttctatcaagtgcttccacctcccttggccttttcttttccctgttgtctgatttattacagccagaaaataaaggaaccagatgcctccctcctcctcatattgttttgtagttcttttccggaccaggtttctgttaagggtttggctggtaccactgtgaccacagacttcctgtgtttatcccttcacttagaaatcatagtcaactgggcattaaagtctgtgctggacactggatgacgctaagacaccaacacacagccaaatacctgggggtcccgtggggcccagaagcctaacacagaaagaggcagatccagggtatctttgccctggtttccactatgtagatgttttccaccttcagagcaacatcaagatgagtgaacaagtctccagtttgcctccagatgttgggactgcggttgtggagcaaattccatacagggaggaggaatggaggctctcagccttgcctgctggcagatgatagcctggtggatggcaggcagtttacaatacctagcccactgcctgggcaccagtgccttactgggaaggattgacttgtgatgggattttagggatggtgacaggcagccagagggaactccacattggtcaacctatttcatccttatcagaagcttaaatggtaaaaccaccttgtcttcagaaacgaagaaatgctgggtcagctgaaattcgagccctcactgtcagagaagctaagcagaaacatcttagaggtagggacaggggacaaatttcagacaaagatcatggtcagggcaagcctgccaagaaggctgcacatgaagcctcagatcagaaacctgatggagtggatgtatccaggcacattctactacaactttgaaaacagacccatcctctcaggttggaacaccacctggctgtgctacaaaatgaaaacaaagaaggacccctcaaagccccctttggacgcaaggatctttggaggccaggtctattccaagcctgaacaccacccagagatgagattcgtagattggttctgcaactcgaggctgcatcgtgaccaggactacctggtcatctggtacatctcctggagtccctgctcagagtatgcagggaacgtggcagagttcctggccaaggatggcaaggtcaccctgaccatcttcgttgcccacctctactacttctgggaagcagattaccaagaggagcttcacagatggtgtcagaaaaaacagtccacatgccagcatgaagatcatgaactatgatgaatttcaacactgttgggacaaatttgtgtacaaccaaagaatgctatttgatccttggaagcaactgaatacaaattatgcattactgcacagcatgctgggggagattctcagacacattcacttacaattttaccaatgatccttcagtctctgggcagcaccagacctacctgtgctgcaaggtggagtgccaaaacaatgatgcctgggtccctctggaccagcaacaagggcatcctacccagccaggctttgaataatctcagttgctattaagatttccatgcagagcagtgcttcctgtacctgatttccttttggaagctggaccgggctcagtgctacagggtcacctggttcatctcctggagtccctgcttcagctgtgcccagcaagtggctacatttcattgggagaacagatgtgtgagcctgcacatcttcgctgcatgcatctataattatctcccaggatatgaggggctgtgcatgctgcagagggctgggacccaaatctccatcatgacctccggaagtttaggcactgctgggtcacctttgtggaccaccagggatgtcccttccagccctgggatggactagatgagcacagtcaagccctaagtgggaggctgcaggccattctccagaatcaggaaaaccataggatggacctcagactctaaagaaggcagaaaacctgtgttgagcagcagaatggaaatctttcaagaaatgcaaacaggccattcaccactatctctggctgagcagtggacactagcaaagcaatgagctcctgacaagtagttttttttttttttttttttttgagacagagtctcgcactattgtctgggctggagtgcagtggcacaatcttggctcactgcaacctccgcctcccaggttcaagtgactctcctgcctcagcctcctgagtagctgggattacaggcgcccgccaccaagcctggctaatttttttttgtatttttagtagagatggggtttcactatgttggccaggccggtctcgaacacttgacctcatgatccacccaccttggcctcccaaagtgctgggattacaagtgtgagccactgtgcctggctgacaagtagatttttaaaaaaatcagagtgaattacttttaatcaaaaatttataccatgtttcaaggatacagtagttaagattatggtcaatacacacagaaagttttcaaatttactaatccagtgaccatttgattttatatgtagaagaataaaatgaaatactaaataaaaaaaaacttctaaaatttggtgaagacaaggcttggcaacgccaaagaaacttttttctccttgaaacagggtctggctgtatagcccaggctggagtgcagtggtgtgatcatggctcactgcagcctcgagctcctgggctcaagtgctgtccccacctcaacctcctaagtagctgggactacaggtgtgcaccaccatggccagctaaccacagaaactttcatctgtttattctttctttaggcaccattaatacctaaggcaggtagaatgggtcccagaaagacacaattggtagcggctgattgttggcttcggtcattgcccataggtcagctggtacaggatgccttaaggtgaaaaggagtgagggtgcatgaagaataatgagcacagggaagagagaagcagagcaaagtaccagataaaataccggccaagcacagatgaatgtcttcaaggagctgttatgtttctctgcacaatgtaaatacccttgctatttcaggatggcggctggcctgctcagtaacacacatgttccaaataaagattttgcatgaaagtaaaaaaaaaaaaaaagaaagaaacgaagaagtgaagttcagtgggaacaagtaagcttcccagaaccacacagaatctacccattgatttgtattgaggatttactatatggcaggcaatgtgctaggctctggggatacagctgcagatgccatcctgaccttcatgaatcttgcaatgtattggcatgcagcagagctgagatttgaacccacagctgtataactgtgtggtttatactcttttactacatatccttcctgagttaaataagttagatacagaggaattaggacagagcaaagggaaagacttcatgttatgaagccttgaacttgtcaggagttagagaagactcacattttggctagggattgctgagttgagattgattctgggttttatgacgcacctgtcaataactgctctcccatccctgaattctcaaaacagaaaagtgacctaatccaatagcttttccttcctttgaaaaagcagtaaaagatgatgctgcttaacccaagtgaatggcatgctaaaggtgaaattgcaggaactgaggcaggttaaaggataaagaaacagggaataggtggaggctccctagcttcttccattctccctatagggacaattggttttgcaggttattagaatctgaaatgtccccactttctgattcctgaattccttgggcattctatccttttataaacctcatttcggtctgctggccacagaatcctcacagatatagatagatgtatggaaacagctagttcaatcttaacatgtcagagataaaaagccctataatcagtattgtcaagcccatcccaggatctctgatgaaaaattagtctcacaatacattagcagtgagacatggcaaaaacttggacatgtccatgcccggctccggtttcccactccatgatgtgatcctccatttcattcaactgctcagtcatcttctcatattttggttcagacacatcaatccctgtaaacttgagaagcacagaaacagaaaatcagtatatctttaaaggctaggaatatatattacacgaataaaagtcttgataccctatgctatttaacatttatcttaggaatcacggtttaaaataaaccaagcaaagtttgaaagaaataagattatatcagttagaatgcattggactgcaagtaacagagacctcattcaaaacggtagaatctataggaaaagtgcattcatttgcatactaagaatgcctggaggttgagaactcagcaactgaatattggcatcaaggatccagagtgtttccttctgtttgctctgtcatcttcagaggattggctttgtccccaaaatgacatatctcctggtcaaaagatggcactcacagtatcagatattgcagctgcccatggcatcaagtagaagagccattgattatctcagagtgttgcaagggaatctgcccccgcccccaaccccctagcagaactcccctcacacctttttggccagaactgggtcacatggctactgctaaaccaatcactgataaggaaagaagattggtttagaccaatcaggatccacccaggggacacaggacaaagaagtggacattcagacaagatcagggtttcatttacatggaagaaggggaatgggttagggataggcactgagtggtgtctcctacagaagagacaggagacactttaaaaaataatgaccaacctgttcaggccggagattcacatttttgttaggagaaaacataaattattggatctgagcaaaattatggtgtttggtggggtgggctctcctaaaaagtaagaacttatttctcagaaaatcagaatgccttatcccttgagagtaataatttttctctttttttaatattagctcatcatatttggcaaaaaatttagtatatataaaccaggaaaaagaaaaagaaagtaagagagaaagaaagaaaggagggagggagggaggaaggaaggaagagaaagagagaaagagaaagaaagaaagggtaagaaagaaagacagaaaggaaaaagtgaaagaaagaaaagaaaaggaaagaaagaaagagaggaggaagggagggagggaggaagaaaggaaaataaagagaaagaaagaaagggtaagaaagaaagaaagagaaagtgaaagaaaggaagattgattaaaggaaaactacctgtgaacccaggaataagtactattatcattttagtttataatctaaagtctagtttatatgtctgtatcttttaataactatctagtaaaaaagatactctgttctataacatttttatttatgaacagacacttctcaaaagaagacatttatgcccaaaaaacacatgaaaaaatgctcatcatcactggccatcagagaaatgcaaatcaaaaccacaatgagctaccatctcacaccagttagaatggtgatcattaaaaagtcaggaaacaacaggtgctggagaggatgtggagaaataggaacacttttacactgttggtgggactgtaaactagttcaaccattgtggaagttggtgttgcgattcctcagggatctagaactagaaataccagttgacccagccatcccattactgggcatatacccaaaggattataaatcatgctgctataaagacacatgcacgtgtatgtttattgtggcactattcacaatagcaaagacttggaaccaacccaaatgtccaacaatgatagactggattaagaaaatgtggcacatatacaccatggaatactatgcagccataaaaaatgatgagttcatgtcctttgtagggacatggatgaagctggaaaccatcattctcagcaaactgtcgcaaggacaaaaaaccaaacaccgcatgttctcactcataggtgggaactgaacaatgagaacacatggacacaggaaggggaacatcacaccctggggactgttgtggggtggggggaggggggagggatagcattaggagatatacctaatgctaaatgacgagttaatgggtgcagcacaccagcatggcacatgtatacatatgtaacaaacctgcacgttgtgcacatgtaccctaaaacttaaagtataataataataaaattaaaaaaaaatcagttcactaaatgttcctctatgcaggtatggtaattcaagtgattgcctagtagacatagaagttttgcaatttatctgaccaatcccatactgatggacgcttaggttagttcctttttattattgtttctgtaatttcttgatgggttcttgctccagtacagctgagtttctgaggccccacacttaagccctaggaagccagcagatttaactaacccaggctttctgcacactagcccggcctctgggtccctgcttccctcttagagcagagggaagagctctttggaacctttaagaagaggtcagccagcttggaaaagaggggatggtaggcaggcagtgatcacatgcacaggctctggaatcaagccactataattgggtaaatgattctccctctttgaacctcagttttcccatttgtaagattgggagtgtaataacaaacattttgcagggttgcatgaggattctgcaaaatagtccatttacaaagcttatcacatggtctggaaaactacgtgattaaaaagttgccagctctatgggaggccaaggtgggaggatcacttgagcccaggagtttcagaccagcctgggcaatatagggagacattgtctccacaaaaaaaaaaaaaaaaagaaagaaaaaaaagaaaaaagaaaaaaaaaagaaattgctagctctcactgttgtaatgttttattcttttttttttctttcaaaactggagctacaagattgcatttgctttgttatctccggggggccatatctaatccaggccattgattcaggaggctgcacaaatctgcctaaattatgtattggggttgcatgtttaatgcttgcttcaatttggttgtgtgaagaaaatgtattttatttgtctgtagctgatctggtcttctcttccctctctgacacacaccctatgttggcaaaaaaaaaaaaaaagaaagtttaaaaaattaagctatacccctgttatgagttgaattgtatcccctgtctcccagtttacatgttaatagcctaactctcaatacatcacagtgtgactttctttggagagagggtctttacggaaggaatcaacttaaaattaggccattgaggtaagccctgattccactaggaccgatgtttttataagaagaggatattttgggcacagacacgtacagagagaagatggcatgacaagacacagagagaagatggccacttacaactcaaggatagaggtctgggacagatctcttataggcctcagaaggaaccagtcctgctagcagcttgatctcagacttgcagcctgcagaactgtaacgataaatttccattgtttaaggcacccggtttgtggcactttgatttggcagccctagcaaactgatacaaccaagttttaaaatatttgtcctaatgatagttttacaagttcctgaggcaaatcttctatggataaacatatgcatcctctctgaaactctgccctcctcaattttctcctggggaggctttgggcatatggaaggtgggcatgatttgatggtcctaggagagtatggaggagtgaggagcaactaggctcctctgttctcccctgtgc

SEQ ID NO: 97179 - DNA, 26061 bp, Homo sapiens
cgggaacagcgctgggcggcggaggcacatggcggcgaggtggggtgggggcagccggaagggtcgcggctcgactgggactgcggcggtcgggcgcgcgaccacctattttaccacttttctactaatttagtttttgtgttccaggatcagattcagggtcccattttgcatttagttgttaagtctccttagtgtcctctaatcgttgtcagttcttcagtcttttgttgtcattcaggacttaggcacttaaaaaaaaagaagtttcatactcaagtttgatttagtttaacctaatgttctttttctgtcctgggatcccatccaggatatcacattacatttagtcatcaccaggctcttctagactgtgacagtttcttatactttccttgtttttggtggccttgatagttctgaagagtactggttattttgtacttaatttgagattgtctgatatttcttcatgattaggctggggcaatgagtttcggggaggaaacagatcaaagatcaaatgctattctcatcatatcatatcaaggttacatgccactaatgacatactagagatgttagccttgatcagctggttgaggtagtgttcttcctcctttccatactgcgctctttgaaaaacatttactaggcttgactcatgcttatggggtggagaattatgttccatcttctcgagggtagagtacataaattttttggaatttttcaatatgagaattatctcccaattatttgtttcttcaatcatttacttgtatcagtatgaactcatggatcttattttataatttgggttaaatccaatgctgaattacttattttttgaattattctagctttagctattgggagctcttttagttggctcctatgtcactttgatataccatcagttttttgtgtctttttaaagcacttgtttattttctggcactataagatgtttcagactcatcttgtatatcccctgccccagtcctagaattaggcatttttctcaagggctctggttccctttgttggagaacagtattagaaacaaaaaactggatgctgggtgtgctccttgcttctgcttgtcattgcttctaggccttcggaggacagaacttggaaatatatgtgtgtatactaatgtattaaacatgaatccacatgcatttttaagtatttctatatttacccatctgtatctatattaagctaaacatttcatattgatgcctcctaccgtaacccaggatttaatgatcacatgcctactcctctcattttacagatgagaaaatttatggctaaaaagataaaagtacttgccctacatcaaataattttagagttggcagcctatttgtaccaaattaatactcacatggtgatgatatatacatagtagattcatagttaatgaagatgttgagatactaattattccagtaatgtatatctataattttagaggaaatttgcagtgaatatttagtcacagtatcactatacaccatatctatttagagttgtagtagtttccttagagatttccagagcatgtgctcctctagagcaggggtggctcagcaaaagctcaacaagtattggggccctcaatcaaggtttgttgaaataaatggactatacttatcaagaaatactggctaaatatttaacctgcacctcatttataaaatggaatatcatggatcatctgttctgcttaccctcatagggtggttctgaggatcacatgatagaatttacatgcaaatcctttggaatctgaaaggaaaaattatgatactatttggggaaaattctgtacctttgaattgggtctatcttcctttaggtgagcagaatcactattatttctctgcctgtataaaaactataaaaagattaaaatcaatggtatttgtttaaaaataattagtttacccaatggttgagtagtctcttgtgtataaactcatatattttgctaatgctgattttattaatagtttttaatttaggcataattttcatacaataaaaatttactttttattgtacagtttggtaagtatcaataactccactgcagtcaagatacagacctgttccatacctccccttcaaaatttcttcatgcccttttgtagtcaatcactccccaccccccacccccaagtcctggcaaacactgatctgttttctgaccgtatagtcttcctttttccagaatgtcacataagtggagcctggcttcttttacttcccataatgcatttgagattcatcaatattattgtatgtatcgagttattcttttattactgagtagtattccatttatagctatgctacattttaattattgattcaccagatgtattagcctattttcacactgctataaagacatacctgagactaggtaatttataaagaaaagaggtttaatttacttatagttctgcatggctggggaggacttcagaaacttacagttatggtagaagggaagcaagctcatcttatgtggcacaggggagagacagtgagtgtgtgtgaatgaaggaagaactgccaaacacttttaaaaccatcatctctggtgagaattcatgcaccatcacaagaacagcatgggggaaaccgcccccatcatccaatcacttccctcccttgacacgtgaaggttataggtccttccttcaacacgtgggtattacaatttgagatgagatttgggtggggacacagaaccaaaccatatcaccaggtgaaggacattatgttttttccattttagggtttgtgttttttctattatatgaataaagacatatatgtgtttacaggttttgtgtgaacttgtttttatgtcactcggataaatacccaggagtgggaattagtatgctgcatgattaagtaaatgtttaactttataaaaaagatcagattgttttttgaaacagtaaccatcaagatcagatgttatacctatccttggtcataaatggaggatgaaacttggtgagtggagatgggaatataaacctccagatgcccaatttaacctgtcatccagttctgtaaaatcaatccttcattctcacatcctcacttctcagaggaagcgaggtctctttagcagtgtgtgtaaaggcttgcatgtgaggctgcccatgttatttttctgtttattaggcagaatgattgatctgaggagaccagtggcaatgacatcctagacacagtaacatcaggacaacccattacttttcctattacctccttcttttcctttcctctagaaagaaagaagagcattggggtgacagcaataaatctaaagggaacaattatactgatactggttaagaggatcttgtatctttacttattcccgaatctaagaaaaaaaaaaggaatttgggactaaggagaattcattcttcctacagtgtcacattacatttgttctgtgtctaaaacctgcaatattcaaaactgacttttattattaactgttgagtgacttacaaatgttgttagagcagagcagggcagaacagtgtcatggataatcttccaaagcagataattcaaaagtcatttccatttagctgtgcaaaaacagtttatttctctccgtcagttttccattggttaacgtactttgtttctgctaggctgatttgactactgcaaggaaatacataccaaggacatattatttggcatggtgaaaccaccttggggtcagaaaactgaatactacacaagtcaaggtttaatgtattatgtatcttcaagggccttgcttcagtgtcctatggtaaggaattgaggggtggagggagaaaagtagggataaccaaaaagcatgtactcagacataaagattttggaggggtgagcaagaagttgcagtaaaatcgtaccttttttttttcttcctgtaaactgtctttggtttatgagccaaagaatgagtttataagaggcagagcaaagaataggggagtagtgaatttgttgtacttaagtgggatgtcaacttcataatataaaaatgaacgtttcagcaaatagagctgctcactcagaaagggtggcctatgtaacttggggttccccatcattggccgtgtttaagcctaagtggcatatctggttagaaatggattacagtaaacagtattcctgtatccttcattccgcaaatgcaaaagcctactctgtataaggtacatgcagaatatgaaaaggtatcaaatctggatctgctctctgccagctgtcaaagcattgcttctcacacactttaatgtgatcttgttaaaatgcagattcagaaccctggggatggggcctgattctgcatttctaacaggctcccagttgacgccaacactgctggtctgtgtaacacagagtgataaacgtttctagaaggagacatgcaaatacttataatacaaaggtaagtaccttagggattccactaattttcataaaaaacctggatccctcccaaccctagggctgtctttgccctttttatacctttagtgttccttctgatgttttcgttgttgctatcttccttgaattttatttcttctgaggtttctcactgtgtatgctgtttcttagcctaggagagccttttcgttcttctcctaagactaacattttactaatttgtcaaggagctagagctcctaaacacgccatcttgaattcttccctgcgaccccagtcgggctgaaagctccttccttgtcgctccccactgaacagatttttcttggggcggggagagggggacggagtatcgctgagtcgccaggctggagtgcaatggcgcgatctcggctcaccgcaacctccgcctcccgggttcaagcgattcttctgcctcatcctcccaagtagctgggacttccggcgcgcgccaccacgcccagctaatttttgtatttttagtagagccggggtttcaccttgttggccaggatggtcttgatctcctgacttcgtgatctgctcgcctcagcctcccaaagtgctgggaatacaggcgtgagccactgcgcccggtcagaacagttttaacctccagcaatgaccactgcttccttctgcctgcagttggaagtcagtttcagttttcttattccctataaggaacccacctctccggtcgcctaacacacagatgctgcccagaaaacgtgctggcgcacctgaggcggggtagaaagccgtgccgctcctcccggcaccgagcaccggagcccagggaggcggcctccgagtgtcatttggggacgtcccttctgccgggtagtctcagaggccaagcgctcctattatcccgggcgcagtctccccaggcgggacaggccctgcctggcgccccctcctggcgctggaggctgcgtgcgactgcccaccatcgaggcggcggcggcggcggctagagaggccggcgggtcccgggcgccgaggctgcaggccgcagggaacgcgcactgggcggactccgcgccgccggccttgtagccattttaggaggaatcgctggtcgccagcgaggggtgcggcttcaatttcaataactttattggtggcctgatctgcagaacagccatcacatcagtggcccttggaggagggagcgcatcgcccgaggtgactggagtgggggcgcccctggcagtgagcgcggggacgcgggggaggtcccgatagcgggtttcctgagctagggccagtgagggcaccggggtatttgcaggcgttcccgcaggccaggagggagagggctccagggctcggcttccctggggcggggaatcccttgccctgtcccgaggcgcaggggcggggccggggggcgcccctgacgcggcggctgaggtgttcccagcccggtgtcgttccccgcggtaggtggtccccgacgagctgcagccatgggaaacaccaccagcgaccgggtgtccggggagcgccacggcgccaaggctgcacgctccgagggcgcaggcggccatgccccggggaaggagcacaagatcatggtggggagtacggacgaccccagcgtgttcagcctycctgactccaaggtaagcgtcccaygcccgcagttggtgtcagtactgcagcgggttgatttctgggctcctcttccctttcttggttcttttctaccgcgccgaaccgggctatggttttttgaattaaagggatttatcggggacagaggtgttggatgataattcctcttgaagtgccgcctcaaaataggataaagaggcggagttcttgctttcctggtgttctgactaatctgttggccacatttttaggatggggacaatagacatccccccatccccgatcctccgagcacgaatggctctcttccatagcgttgctgaatttgtagtttgtaatccctggtggacaacttcagagggtaggttgcacgagttgctgaccataggtggtagtttctcacctttgccctgaggtggctaaatgaaattctttttctgaaaatttctatgtatcagtatcatttttgctcttctagcagctctacagttgtgatcctcttcccttttggcacggctgtaagcagcaactacttgcttattgaatactttctcctagtcttggggatcaattaaggacatcatttagttgactgcttaatttttgtcccatactttatagttgtggtggctgaggctgtgcctctttcacgccccgctgctgctccgtaggtggaagagccaatgattccacgacttgtttactcctcagtagtacttcaaaatgttgcgtggctaaaaaaacgacaacccacagctgccctgaagaccttgctctcaattccaaggactttcaggaagagaacaacttgttttcactctgtaagaaaggacagatggagctgatagcagcgattaccattctaatgtttctaatggctttcagagctgtcagcatgaaatacaagtaattcctccaggtagactgactggatgagatagaaaaatggagggcttgaggagattcgggtgtgtttgatgtttcctatcatttcatcacttcccagggaactggggctttagagagtgaatagagtattgtttgccatattggtagcacatggaatttggattccatgatttatttctttggatctcaattgataacatcatcacagcctggcgcagaggctcacgcctgtaatcccagcactttgggaggccgaggcggttggatcatttgaggtcaggtgttcgagaccagcctgaccaacatggtgaaaccccgtctctactaaaaatacagaaaaagtagccgggcatgctggtgcatgcctgtagtcccagctactcgggaggctgaggcaggagaatcgcttgaacccgggaggcggtggttgcagtgagtttagatcaaaccactgcactccagcctgggtgacagactctcaaaacaaaaaaacaaaaaaacaaaaaaaccaaccataatcacagagaagtgagagtgattaaaaggagcacttattggggtttattctccaattctccattcttatttgggctatctacaagccatctgaatttacttcttcaaagctttcgaaaggtgatccgcctcattatatttttacccttttcctatgttgatgactcaggatttaaatacagtgtatttgtcgaactgtgactgcagtaattggtgtcctgattaaaagccaggttgctctgtctgaattggggcctattttgtattattcttatctctcacctcagtcttggcatttgtgaattaagaaaattattcatataattttcagattgtctgaaaatcagataattcctaaggtctcatttaagtctaaaattttatagttctcaatgtagcctctttacttctaaactcaacattttacttaaacatcaaactgtagttctgattgtcgttttgccwcttttcctggtagttttgctgagtaacttggagtaaacaatctttctgctagtcagttgcattcattcctactacagaaatgtcatgtcataagtggaagggctttcctccaaagctaggcatattaatagtttgtagctttcaaattctaaactgaaaatcctgtcataaaagtaactgacagaaacagtggcaggggggcctactttgctttgaatgcctgcctttttcagtggactagttcagtggttctcaatcctgtttgcacattagaatcacctcagatttctttaaatagtttttggaaaatttgaaacactttcaaagtagggggaaacagtataatgacatctatatacatgccacccagtttgaacaatgatcatatcttgaatgaacatataacatctataccccagtccactattctcccactagttattttgaagcaaattcccagatattatatcaagtattattttatctgtaacattttaggatgtacctctaaagatgagggttttttctttgttattttaacataatcacggtatatctgggaagctttttttcctttattttaacataatcacagtgttatctagaaagctttttaaaaataggttcccagatcttacatccgaatctgagggttattcttaggcatatgtcaaattcttgtaattctaacgcagccagttagtcaagagtgcattgttctgagaatatgtagttttctcttaagtcaattccttatgtgaaagtcctttcaattctctttctctatttactttggattatcctgctactgatatgctatactgtagttttgaggaatatcaagagaatgtatggagggaagctatgtcaaccattttgaaaagaaagcccaaatgaataagctagtcctttttttaaaaaaaaacccacattattcaatttagtaatatttaggcttaatactatacagtcttatttaccaaagtcacttaaaccagtctaaaataggggtcagcaatctttctgtaaagggccagatagtaaatagtttagactttgtagaccatacagtctctgttatagctacgcaattctgccactgtagcctgtaagcagctatagacaatataggtaagcaaggcaggtatgttggttcacacctctagtctcagcttctctggaagctgaggtgggaagatggcttgagcccaggagttcgaggctgcagtgagctatgattacaccactcactgcattccagcctgggtgacagagcaaggtcctttctcaatcaatcaatcagtaaaataataggtaaacaaatgggcagagctgttttcaaataacacttgataaaagcatctggcttactggctgtctgccaactcttggtccaaaggatagtaatgaaaagaaacaggagttactgtttttacaatcccataaacctcatttgataagagagctacttttgataaaggaaattgtatttttgatctcttgcttcttgaggttctagaatttttattcctactcctgaaataattagtataagcctgggataggggaataagtaagatttcatagccacttctcaagttttaagaaatcagtgatctagtttttgaatttttaatgtttcttctttttacttcttagctgaaatacagtttatgaattacttatgaattttgatatctctgacttccattacaactggtaattgagagctattcatatttgcctataaaaatatatggctgacttaattatcttttacagaaccatactttgttttcatttttttttcctctgaagaaagactcagaagcatatcataattgcctgcctatgagttaaactagtggtagggagttatttttttctttttttttkaagggagagtctaaggctctggaagggtaagtgacacaggtagactcaaaagttaggctatgatttaggcagtgcttgagcataggccatttgaccatttttggtcctagatgagttctttttctataatttgttcaaactctgatttagttgctaattttggggtttatatccttagccaaagcctagcacccttctctatcctagggaggagagtgacctttttagaattcttgggtcacagtttattctagggatgacctactccttcttacagctccctggggacaaagagtttgtatcatggcagcaggatttggaggactccgtaaagcccacacagcaggcccggcccactgttatccgctggtctgaaggaggcaaggaggtcttcatctctgggtcyttcaacaattggagcaccaagattccactgattaagaggtgacaagtgtcttggttgaatctaagggtccaggaatagagacctgatttcttttctcagaagagagacccagctggacttttctccacctactaaggactgtctctagaacatgcccttttctgcggccacttagtatatctgtgggatttttttttaacctcatagtgagtcagagatgttttaccctttagaatttcattgcctcagagggattcataatagctttatggctacattctttaggactatgtcatacaagtcctgtctatgcttgtgggaagtcttttgtaactgtctgagtcttgttgctctgacttctgcactaaagcaaaacacattttgaatttttaggtagtcatgttatttgttgcttccaaagcaataatgagtgatttaactggttgtcagaatggccctttgtatggtagttcattctctagaaaaggttcaccaaaacagggaaagagtaccttgaggcacttctgtatcctaaacctacctatcttatttgcactggtgaggaacttgttctactgaagcaaagtaagttatactaaggtgaaccatttgaggggattaatgtttttattattcttttccagatattggttaagaactaacgttgttgggaggagctggtaaatacatgtccaagatgatacagaaaaggagaatgggtttatacgttkttttttacaccaggggatacaatggcttaggaatctgggaaattattyatatgatactatgattgccacttgttttttagattcagtcttctaaaaggaacttggcctgtttgcctttcttttttcttctgtagccataatgactttgttgccatcctggacctccctgagggagagcaccaatacaagttctttgtggatggacagtgggttcatgatccatcagaggtaaggccttgatctccaagggtaaccattgacttagcagtctcattttagctgtcatttctgtcaagactgatgggcagctgctcccctacactggaggatttctctcttgataaaacgtggaggtgctgagaacaatcgtgtaaattttagtaaaagaggaaggttggatggaagagatggatttgaaagagagattcaataattttttctattcactgtttcagcctgtggttaccagtcagcttggcacaattaacaatttgatccatrtcaagaaatctgattttgaggtgttcgatgctttaaagttagattctatggaaagttctgagacatcttgtagaggtaattttgtattatttactctctcttgctktgtctttcttgtagttccttcctaaaagttgtttatgtgtgtatatacatatagagggagagagagagcagggggttggggggaggagagagagagacagagatttttctcctgtaaacatttaggtctcttatttgcagcaaacacaaacacacacattgtaacacaagtctcatgatacaatgtttaccttattacatgggatacactctattttccatgttatcttttataatcactaatgggctacagcctatagtttgaaaagctgtttctagtaatatttcaagttttccactgacctttgatgatattacccagcagaggcgatacatgtgtgtagtttgtttggtttgccccatcttaatcctgccagtttgagacctcagttagcagtttcatgattttatgaggtccaaaaaatgtggggaaaaaaatggttwaaaaaaccaacagcctgggcaatatggcaagacccatctctacaaaaaatttttaaaaattagccgagcgtaatggcacatgcctgtggtcccaacaatttgggaggctgaggcgtgaggattgcttgagcccaggaggtcgaggctgctgtgaagcatgtttgagcctcctcactccagcctgggcagcagagtgagatactgcctcaaaaacaagacaaccacccccctgccccctgacaattctgttgtaggtaattgaaattttgtaaatttttggttaaaaaaaaaaaagtctatggtagcggaaaatatctttacacttttatttcctctaatattatttgagccaaggccttcatctctgcttacaattgctatagtatcagagaatattttgctaaccacacttgtagttaccattttgttactttacaataagaactatctaaagaattgtgcacagtattcccagtgagcacacttctctcctgtgagttcaaagcctgcctctgctactaactagttttgccatcatgaacaaatctctcaacctttttcgttctgagtttcttcacagtaaaaccagggacttaaactttcagtgattctcagctgaggaggcacaataccttaagtggaacatatttgaatttcaggggagaagggtggctttgctgtttttaaaagaaattattggctgggcacactggctcaggcctgtaatcccagcactttgggagaccgaggcgggtggatgacgaggtcaggagatcaagaccatcctggctaacacggtgaaacctcatctctactaaaaaatacgaaaaattagctgggtgtggtggcaggcgcctgtagtcccagctactcgggaggctgaggcaggagaatgacgtgaacccgggaggcggagcttgcagtgagctgagatctcgccactgcactccagcctgggcgacagagcgagactattattaatagtgtaatcatctgttgaggaaacttttgaaaatgttgttttcatcatataagctcagaaggttaaattgggcattatttttgactggtgggacagtaatttaaaagggttttaaaatgctgaattagattatgaggatacttgtgactaatttttgcattatataattctggcaaagtaaccaataaatagacatgtatcataattatatagagagaagacttgcatacttttgatatttccctttctcctaatttcccaatctattgaggtaacgcttataatccattttttactaggaatctacagataatggattttagtctgcactcatttactgtctatccatgtatgtaactttaggcaaataaccaatttgtatttatttttttctggtgaaaaggcaataaaaactattctgtgcacttcccaagggtattttgtggatcatgtgaygaaataacaaagcataatactttgtaargtttcaagttccatatgttttaaagatattatttaatatcagagtattacttctgcttttttcttttgccttatatgtattttttatttttaattgacacataacaattgtacatatttatgagatacaatgtgatgtttcaatacattttatatgtgtaatgatcgagtcagggcaattagcatattcatctcaaacatttgtcgtttcttcgtggtgataacattcaaaatcctttcttctagctattttattttgttacattattgttacctatattcactctactgtgcaacggaacactggaacttagttcttacaatgaatttggtggctcacacctgtaatcctagcactttgggaggccgaagtgggaggatcacttgagtccaggagtttgagaccagcctgggcaacatagtgagaccctgtctctacaaaaaaaatcaaaaaattagctgggcatggtagcatgtgcctttagtaccaactactctgaaggctgaggtgggaggatcacttgagcccaggaggtcaaggctgtagtgagccgtgatcaagccactgcactccagactcggtgacacagagcaagaccctctctcaaaaaagaaacaataacatttaaataaaatatattataatatatttctcttcatttttgtatattgkattcttgtctgcatactttttttcatttttttgagatgtaatttatacatcataaaattaactcttaaattgtacaactcagtaatttttagtatattcagagttatgtgattatcacaactatctaattccagagcatttttatcacccgcagwataaaccctgtacccattagcagtcacatcccattccctcctcccctccgtccctggcaaccacaagtcttgctgtcttaaggatttgcctgttctggacatttcatatcagtggaatcctacaatatgtggtcttttgtgactggcgtctttcacttagcataatgttttcagggttcatccatgttctaaccatgtatcagtacttcgctcttttttatggctgaataagagcccattgtgtggacatactgtttgtttatccattcagtagttgatagacatcttgattgtttccactttttggctattataaataatgctattatgaacactggtgtacaagtttttgtgtagacatatgttttcatttcttttgggtatatacccagtgtataatgctgggtcatgtggtaactttatgtttaactatttgaggaactgccaaactgttttccaaagtggctggactactttacattccctctagcagtgggaatagtgtgagcgttccaatttctccattcctttgttgacacttattactgtctgtctgtttgattttagctgtcctagtgagtatgaaatggtagcttattgtggttttgatttgcatttccctaatgacagttacatacattttgtccttattgttgcaatcattgttgtattggtagtcttaggagtttataaccttgttgtttggctggaaaaaagaaaaaatctaatcttttcccattgtttgaaagttacaaggcatctttacatccattatctaatttgatttccttaaaamcatcatgaaatagggcaaagattatttttattttataaagaaactgaccattgtggagggattcttccaaggtcctacagctgatacatgtagtagctcttccctgagcctgggtctttgagtctttatatctttgtctgtctcccaaatcatgttgctatgttgaggagcttcatggtttatgtccaggggactcagatttttcctctggttaccttacagctgtagatcccacaggtcacaagtttgtgatccaggacttctaccatatttaatgttagctgccatgtattgatagctttttccatgcattcttgctaattctccaactctttctcatatttgtataaatatctttcagacctttccagctcacccccagggccttatggtcaagaaatgtatgcgtttcgatctgaggaaagattcaaatccccacccatccttcctcctyatctacttcaagttattcttaacaaagacactaatatttctgtgagtatcctgagtattactggggcatctgggggtgtctaggaccatttggaccaaagttcagtaatcctagaggttaggattaytacagaggtgtgttgagattataagtcatacacataccaataacattacagatttcctttttccagtggtgagtcacagctttttcaggtactgatataaaaattcatagttgtctcctcatcctaataaaatcaggatcagagctatggacttcttttgagcacaacataaaggagtagttrtcatttggggktgtacaaaagaactatgaaagcttttttgtatataattcatgtctctattcaatctacttgattcctactatgattgtttttgccttgtaacacaactcttccttgtgtgttgtgggcaagatttttgttttagctctcttaaggaagattagtagatgctgaggcatgagatttctgccctggactgataatttttctaattttctgtaataggattgtattattgatacatactagagtgggtgcattattgaaaagagatagcgcattctagtttaaatttctcaaagagctctgaggaagagtaagctgtttggtttgtctgtgcattaatttcatttagtaatttttttagtaatttttttctctttctcttagtgtgacccagccttactccctgagcccaaccatgttatgctgaaccatctctatgcattgtccattaaggtaagtggtggccctggctcttcacagagctccctggaatgagaggtcaagggtaacatacgttctcagtggttactttctctgctatttcattgaagctgaagctggcagtaatgatcaaattatagaagaactctcttttttttaactactaggttgtttgttttaaaatctcagtctctgtgttctggctggctgaattgccctctgataggacttttttgctgcccagttattttttgggtgactagaatctttacactaactgtttacttaagtttgtgttcatagcataggatttcttctgcagaaaaagcaggtttagcttccagttcaaagaatgcttgaatgtgatattaaggctttcattttttgaaggtggaattgagctactttcaggtgcctcattcatatatactcaggtgcttgcatctctcctatacactagttaaaggagagatgtgaccagatttgccctgtcccgtcaactctagagtcctccttggtttttctgctgctttagagtctgggttggaaatagccattctgttctgtcttgttatgtctttgtggtttggctattggaataaagttatatagctctgcagttatcaaaccaggctgattatcattagagtctcctggagaagattgtaaaaatacagattcagcagctccattcctagagattctgaataagtgcatctaggatgggccctataatttttttaagctgcttttacttggatatatagctggattcgggaaatcactgatatagctaacaaactatgtggtacaatataacacttaaaaatatattattgaatttaatttttataataacgttgtaagtatttttaactcctgttttatagataaagaaactaaggctcagagaaggtcaaattgccagtaagtaccagagacaggactgctgaggtccagtcctcctatgctgacttcatattctttcctatattatcattatgccaggtctttccaagtaggtttttctcaggtattcctcatttccacaaaacctgtggaagtgtaaaagtgaattgtttacctgccttgcttctgtcgtatttaggctttgtgtcagcatgactctggagtgttaacccgagaagcattcatggtggataatacagtacrggggaaggtagaaggatacacttgttcttaatcggatttgcttgggttctttgggatctgatggattttgcctcctgtaactgctccttggatgtcatttaatttgcctaggcttgccatctcctcctgtggtacatctgtagtctacaacacagcctgggaaatggtacctcttgctgtcttcttactggttctgactcaggtgaaggtgtttgattattgtggcttagcttggttctgacccattcctgattctctcatattgtttaggcagtttggaattgatccattggattgggtgtctttctgaagaggattttgacatctactttgttcaaggatagagagggattcctaggttccctctaaatcagagagatcttttggaagtcatccctggttttaaatgraaattagacctgctttgggacttggaaatagtttttcagaaggattgtttctttttttcctcattgtctttaagactttcttctagaaatggatgccagaatattttgttcttttttgtttttcttgctagttttaggcccaacattagaatttaaagtagggaagggagcaaggtaggagactattatttcttcagcccttttatgtgtcagaaactgtgtcagatattctcatgtaatcatcagagcaaccttaatggtaggtgttatcttttgtaatgatgagataaaaagacttggacacactaagtagattacccaaggccacaagtagaatgatgataggagtcagaattggaactaaaacttatttgacctcctgctcttatatcaaactatctctgttaaaagtgagtgactgtgaaggactgatgactgggaagagctacctactgtctgaagtaatgaattagctgcgtatgtttcttttccttgcaggacagtgtgatggtccttagcgcaacccatcgctacaagaagaagtatgttactactctgctatacaagcccatttgaagggatcccttcttgcctctaaggattcaggagaagcatctcccttgcatttctggactgaaccagtcttacmtgagactggaaggctgatttgctttgaggctgatatgtgtgtttcagagcctctgagtaggatgctctgcttttgcatttgattgcagatgagagctttatgagttcacggaatttattttaagaaaaaaaaatatacatatgagaagaaggtaratggaagcctcctagccccagctagaagtattgtttctgcctgtgggttttcaccaagacctgtttgggggcgctgcaggaataactatataggaagatttttcctaaaatgaaagaacagcaaactcttaggatccttgttgggtggagattctatcactgctaccttggctctccaaggaatgggcttgtgctagaccgctgccctacttaacagctgcctcattgcaagggcagtttttcttgcatgggttctctatattcccagagtatgtggcacaatctgtgttgtttatatgataccagatgccccacaagaacccttattcctctcatttcacattcttcctttaatagcctccttcagatcccatacctgacccctctctaacacaaaacttattgggtaagtgactttgaaaagttttgtggcacctgacccaccccagacactagggctatcagaaggtctcctttttagcccagcacaggcccaggccactttgtcgtgtttgttttaacttctaaagaaaatatgtttcagcattataagaaaggcagaatgcagaacacctacatttttgttttagtttggtgccaaggctcaggctgtattggcaaattcccgaaagttttcccactttgcctggccctgcttctgtcttttctttctcagtaaacagttctgaaggcaggagtggaacccgggagtattttcatgtctttcatccttgaaagatttttatgtgcctgcattttttttttaattaaaaaatgccttttcattggtcttaagagaccgcattggagaatttcaggcttttgataaatgcttcttcaaagagattttcttctctagtctagccttccacattcttagattaatatggccaaccctgtacacatcactacactaaacactgctctagataaactgctcaagttcatttaactcatttgatgcacctaaaggggttcctcattttaaagatttgttagrccaagaagcaagagagtattcctagtattcccaaccatgaaaagtatcattctttgcaccaaatgttaacaaaatcattttgttctcctgcctcttctttttaaaggtgtttgatgattaagtggggtcactgaattccatttgtggactgaaaagtattcaatccacttttggggttcagagataaaacattttttcccaagtagctggggctcttccattttgcagataagtcaaataatcaacactaaaggaggctaaactgttgatgaatgagagactccctgactgctcagatgaccctagccacactgaaagggcacctacaggtcagtttagctacctcctgtctttcccatgcaaagctgataacacagttgtctttggacttgtagacctcttggattccaggtgtgatggagtaaagtgtgggattgttgttttgctgggatgcaaataactaaatgctttggtggttaattgctaagagtaaatactactttagccatccaaggccaccttctgcagcaaaaggcttttgtggagaaccttttatgttcccaaccactttttgaatggtgtgccatttaaaaatccaggccagatcctattataaccaactctcaggatttacagccttcagttgtactagaattttgtttttatccaatactcattaaataagtgggccacttaggaagattcaaaatcttggttattacatgaagtttgttatatttcttgtcaacagtattgaaatgtaatatgtatgtgttcatgtatgaaaatttttactccacacaggtgtttcagtagagtggggcaggaaaagagatctcttcgatttctttcaggcctgaggcttttgtgaaatgcgtcagccccctgtgacagtaggttttgatgctagtgatcttcagatctttctctctggaaatgtgcagagagtgtcagtttcccaagttctgaggtaactctcagcccagatgtgaaatgggagcctaccagctggtatagaagggaatgggtaggaggcactgggtgctgactcattcagcactgtcccttttctatactgctgatacatcccatggttctgagaagccttatctcagtctatttggaagagagggaggaagagaaggaagtaacccaaagtactactcatttatcattgtatattgattagttaaagggataattaatttaatgctgaggagagtttgacagattttgaaaatgagtaaaggcaaaaaaaatttttttagcctttattttgcttttgggaattttacagagtcaaagtaggcagaataagaaaatagttcttcaggagggccgacctttaaagaacttcaacatagtttcggaattgtggggaagagaagagtgactgagctgagaagtaataatagaataaagggttgagtaacttagaactgaaaatgatctcttttaaaaagaaattaaatcagacaccacatggtggtgtccttggatctcactgtacagaattagcagtgtataaccatcttctcttttcatcttgttccaattctctcctctttcctttccattctgctttaagctcatgtgtcaggcagactttaccagagtgtcagacattacctaaaacacatacgttagccatgctgctggtatggagaaattccacaccatgattattagcctcctttaagctgaatgggatttaaccattctaggcaacacccctgaagggcatacctaacctcaatagtgttggcttttaaaacgtatgtttgtatggtagagaaactttgtaaaagaagaatccaagagaagtttgtgaggatcctacaaacccaggcccactcactttgctctaattctttctagtatcttgtagatctaatgggtctgggataaaaactttgaaaagtgtcaatattccatgtatgctgctgaaatgaagttaagtttggaaagaagtgatacctctagactgggtttatattaatctgggatataaatgaagaagacatactaatagaactccttgcttttaattggggaaatagggctttaataattttgacctcaactaaaaatgatatgcaatagtctctgtgtgtgtttgaaatacattgtgttctcagagatttctacattctcacgttctagtgatttggggcatgggcttaatagcagatgtacagtgtattcctgcattattgtgattccccttaaagcccagttcttgctgtcttctaccaggggctgctgactccagttacccatggaatgcaggacctgggaggggtagccattagggtctttcaaaactctttggatctaagcatttgtctctccttaagtgccaatcacaattggatatggaaggactgtgatttctgcaatgaacccaaacttttagagtaaaaagccaaatttaaattataagaaagaagggaaaaaagagaaaaactcaagtctattacttgtagagtccaattcttagcaatggaatcgctctaggattctagtttgggctttgtctggatttgcttttctcagttgtgctttgaagtgaataagctttgttacaaattaattttttattagttccaatattagttggagttaacttgaattgattgtatgtagcacagcacttttgcagtaagattggtgtgaaatactaaacactatggattttgtaggtgtcaggttaaatggtcaagggatacctacattaagtcatatattaggtattgatgatcttacttcttttctgttcccctgtacaaaacacttacctaacccagcttgtggttttaggacagccaaagctcactgttgttggttagtcctaatcactacacgggtctcataaatgagacttgtttgaattttggtacattggagcatgttggttggtattacacggcagcatttcgaatgagtgcagctctgtgtctgtcagaaaggagagataagactactttgaagggaattaaatatgtgagtcctctttttaatggtgctttttgtaacctttaatgctgaggtacagagctgcttttcaatatttcataaaggagtggcagacaagagtggattttaaagctgttcttcaaacgtaatttgtcactggactctgacacacctggaaattatatgatatgatacatacagaaatgttgtgggttttttccataaaactttaataaaagtattatacagcaataatatctgagttattgattgatgactgattatattatcaaggtctgtttgccttggtgtctcagggcctaaagaatgtaaactgcaagaaaacacatttgaaagaagtcatggggtaggggacacaaatgatgtcctactttttctcttctttttgtttcaggctatgccaacattataggaatgcagacttcatgatttgattttcagcattttctctgctggctgcacatttagctatcatcctgtactggattagctgagctcttagaccaatgattctcatccctggctgcacattcataacacctatggagactctataaacattggtggtcaatccatttccaccctagttaaatggaaatctctggtatggggtccaggcatctgtattttttaagttcccccagataatgctaatagacatctaggattgaggactgctatcctggacccttcctacttctctttctctgtcagattatatgcttcagtatatatgaaaacattatatactttattctgacagcagatcattcacctgagatggccttgttcagggacatgattaaaatataatttctgttttccattccgtcatttcacaaggtttctacatagctggcctctggactttttttcctaaaacaaccaagctgttgtatttttgctgctctaaagagtcaactgagttgaactaaggaagaaaagggactgacaatgtggagtgtgagaagaataggggagttactgagggagtggaaatgcaagacagcaggacatgaaaggaagacctgtgacagaaatcaactagaacagttcacctcaaacctcaatagcaagtccagagattgcctccaggctagaggtaaaaagtgggatatggtatgaactcagcctctggaagaatggtcttctaaacatcatgtaccccagtcactgaaaacaaaatggcaccagaatttcatcggggcccaaacttgcactgatgtgctttctaaagcatttatttctggctcgtttggcttggagtcttttgtagtatctcttccaaagacccccttctcccctgccttgacaattaaccatgacacaggtgatttgggtacatcatgagtctcttcctctccctactcctctgtcctctgtggtcactgttcatccagaatcacatatgcaggtctggagtaccacgtccctttctgtaacccatttcttggctccagggcacgtacattgactgaagatgaaccactctgttctctcctggcagttagcattctctcagcacttagctgtgttctgaaggaggctcctgtctctcaagaacttcctaagtagaaaggcagagttctgtgtcagaagttagaaggtttaaggtctgtatgccgggcgatattttaaacacaaagtagggtttcacagacttctcaacgactcctgagctaatttccacttactacatcttccaaagccctcttgctagtgacagcttatgatgagaatatcaggtaaggatatcgaacacctgaaagagttatggagattactacagacctgtatacctggatggtgttgaggggtggactctgacttcagaccagctgatactctaaactataacctacaactctaacttattttttttgaggggtgggggggaaatctctgttattgattacaatagttgtggatcacttacaagttagatatagcgattgggtagtggaatgggtgttggatgcaacaggatcttggaaaatatttctgggggttagaggataggctgagaatattatagatgtttggaaacatttgtgccaacctgaagatggtgtttctttgtctctcccaattagcacagctgtgttctgttggtcatctggtagagtgatcaatctagagttagaatacctagggatgacataaaggaatatgacagtccggaaatctaccagatgaagagccagtctgagctcagaggggattttgagccaaggcatggcattttatttttagatggagctgaacattgtgatagtaaccagcactagatgaactaaagttcaggaggaaaagcggaactatccaaggtgaactgagattactagccattttatcccctgggcccatttgcttactctgcacgtggagttaggactgacctttgcccagacacagggtgtttgatggggtcaaatgacattaaataccaagcactggatccctaaaatatgggaaacaaatgaggtgagccctttagttgcccaggttacatgctgaagggaaactaagattgcagatggaatcaagtttgctaatcagctgaccttgagatgcaaatattaccctggattatttagttaggcccaatctaataagtgcaagagggaagtcagagtgataggacatgaaaagaacttgacttgctgttgctggcttttgaagatgagaaaagagaactataaacccaggaatgtggtagccttaggagcaaggaaatggattctctctcagagcctccaggaagaaacacaatggctttattttagttcagtagtcttttttttttaattttattatcatcatactttaagtcttagggtacatgtgcacaacgtgcaggtttgttacatatgtatacatgtgccatgttggtgtgctgcacccattaactcgtcatttagcattaggtatatctcctaatgctatccctcccccctccccccaccccacaacagtccccagagtgtgatgttccccttcctgtgtccatgtgttctcattgttcaattcccacctatgagtgagaacatgtggtatttggttttttgttgttgcgttactgacccatttggatgtggaaatacagaagtgtaagacaataaatttgtgttgttttaagtcactaagtttgttgaaatttgtcaacagcagtgataggaaatgaatacaacatgtctatggtctgatctaatatcttaaatcaagagccataggatcaagttgtttccaagtaactt

SEQ ID NO: 97180 - DNA, 13456 bp, Homo sapiens
  misc_feature (1)...(13456): n = A,T,C or G
gaaaaatggaaaaaaagtaaaaaagaaaaaaagaggccaggcatggcggctcacacctgtaatccctgggaggccaaaatgggaggatcacttgagtccaggagttgaagaccagcctaggcaacatagtgagaccccatctctacaaaaaaaaaagcattagcctggtgtgatagcacacacctgtagtcccacttaggtgggatactgaagcatgagaactgcctgagcctgggaggtcaaggctaaagtgagctgtgattgcaccactgcactccagcctgggcaagaaagcaagatcctgcctcaaaaaaaaaaaaaaaagacaatacctattagtaagtgaatgttttgggtgaaaacagctgatcataccaactgtcggtgaggctatggaggaactggaattctcacatacagtgggtaggaatgtaaaatgctacaaccactttggaaaacaatgtcttaaaaagttaaacctataccctcaatataatccagccattctggtcctaagtatttacctgggagaagtgaaaagtatgttcatacaaagtcctatacataagtgttcatagtcgctttatttgtaatagccccaaataggaaacaaccaaaaagtccatcaacaagtgaatggataagcaaattgtggtacatccatactatggaatactacgcagcaatgaaaaagagtgaactattgataagggcaacaactgggatggatttcaaaataattatattaagtgaaagaagctggggggtgggcatggggagacacatgctgtttcatcccatttacataaaatgctagaaaatgcaaactagggccgggcgcggtggttcacgcctgtaatcccaacactttgggaggccaaggtgggcagaatacaaggtcaggagttcgagactagtctggccaatatggtgaaaccccgtctctactaaaaatacaaaaattagctgggcgtggtggcaggcgcctgtagtcccagctacttgggaggctgaggcaggagaattgcttgaaactgggaggcagaggttgcactgagccaagattgcgccactgcactccagcctgggcgacagagtgagactccatccccagcccaaaaaaaaaaaatacaaactaatgtctagtgacagagagcagctcaaaggttgcctggggatggagagcagtgagagggaccccaaagggccctgaggtgatggacatgtttgctattttgattgtggcaagtttgatgtccatggtgtacgcatatatgaaacgttatccaagttacattcaaacatgtgcagcttattgtatgtcaattttacattgataaagctgtttttgtttttctttttttaaaaaaaggggctgggtgcagtggctcacgtctgtaatcccaacactttgggaggccgaggcgggcagatcacctgaggtcggtagttcgagaacagcctgaccaacatggagaaaccccgtctctactaaaaatacaaaattagctgggtgtggtggcacatgcctgaaatcccagctacttgggaggctgaggcggtagaattgcttgaacccaggaagcggaggttgcggtgagctgagattgtgccattgcactccagcctgggcaacaagagtgaaactccgcctcaaaccaaaacaaaacaaaaacagcctgggtggtggctcacgcctgtaatcccaacactttgggaggccgaggcaggcagatcatttgaggtcaggggttcaagaccagcctggccaacattgtgaaaccccatctctactaaaaaatacaaaaattagctgggtgtggtggtgtgcgcctgtaatctcaactactagggaggctgaggtgggaggattgcttgaaccgtggagatggaggttgcagtgaggcgagatctcaccactgcacactagcctgggtgacagaatgagactctgtttcaaaaaaaaaaacaaaaaaaaaccagaaaaacaaaacagtacagggggccttggttagaaataggagtgtaaaccaaaaagtgactggggcaggtctcaatggattagtggcttattttgtcaaggttgacgccgggcccaaggaaaagaaacataagtcacagtaggatctgtggcctgtgctgtttccaaaatgggttctgaggacttaaatatttaaaggggaatgcgcaagcaggaggggaaggatggaagaaaaatgtggggaatggtaggcagtgaggcagggctgagtctcactcggctttgacgagcactcatgaatctacattttatgtatatttatgtattcatttttatctatttttctgagacagagtctcactccgtcgcccaggttggagtgcaggggcgccatctcggcccactgcaacctctgcttcctgagctcaagtgatccttctgcctcagcctcccaaagtgctgagattacaggcttgagacactacacccagcccaaatctacattttacacaagataaagtaggcagctatctgtttgggaagcaaaggaaggaagtttgtgtttgttttttttgtttgtttgttttgtggctcagttcccaagcttaactttgcccttggcataatgagtttgagatcccgagattctatttttccttcataggtgcaaaggggctggtagcaatgccgccagctgctctggggctgcagcgggattggcagcgggcagaaggggcagtgggagatggtgaggctgtagctggtcaggctggggcagggttcccggcaccctctaggtccgaggaacactgccctcggtgacttctcctgtgaagtctcattcctcttgtacttgacattcctcttaatccccatccgataacccactccctcctcctcctcggcctatggtgtttaattcgaatgttgctttcaatgcattcttacaaaatgattatattttgagataggatctcactctgttccccaggctggaatgcagtggtgcaatcatggctcactgcagcctcaaccacctgggctcaagcgatcctcccacgtcagcctcccgagtagctgggactgcaggcacaggcaggcgccactgcacccaactaatttatttacttttcgtagaggcaagttctcactatgttgcccaggctggtcttgaactcctggactcgagcgattcacctgccttggcctcccagtgctgggatgacaggcgtgagccactgcacccggccacaaaatagtaattttttttgtttgtttttcagacggagtttcactctgtcgcccaggctggagtgcagtggcgcgatttcagctcactgcaacttccacctcctgggttcaagcaattctcctgccttagcctcccgagtagctgagactacaagcacttgccaccacgcccggctaattgcattcttagtagagacggggtttcaccatgttagccaggatggtctagatctcttgacctcgtgatccgcccgcctcggcctcccaaagtgctgggattacaggcatgagccacctcacccggccaaaatgattattttaatagcaggtattgactttattcaaatgagctgcccctcctcattctggtttccttctcaccccacgctgttactgtcattactacctactgcacgtcctccagtgcctcaccgcccccgctcacctgcctgctttcccagtgacaggccacccaggctgcccccagataacttcacaataactagcctcaaattgtccccttatcgacctatgtgagattgtctttgcgtaaaaagcaggagcagtactcttgggttaagagtaattatacttggtcaaggtaaattatactcctgttacatttgctcctaaatgtttactaagaataggatttttaaggctgggcatgatggctcacgcctgttatcccagcactttgggaggccgaaacgggcggatcactgaggtcaggagttggagaccagcctggccaacatggtgaaaccccatctctactaaaaatacaaaaattggccggacatgctcgcttgagcccaggagatggaggcagcagtgagctgagatctcgccactgcactccagcctgggtgagagtccatctcaaaaaaaaaaaaaaaaaaaaaaaaaaaatagaaagaaaaggattgttaggacctgagaaagcagcatgggtatgcggggtggggtggagaggcacgcatcactgtgctaggactgtcagatttggcaactaaaaatacaggaaacttgcttacatttgaatttcagataagcaaccaacacttctacactatactaaaacactactggttgtttatctgaaattcaaatttaactgggcatcctgtattttatcttgcaaccttacctccaactgaatacataaattcaaggttttatgactcttctcagatcgaggaatagaaccatagaatcctggttacacatcaaaactggggaaactccacaaatgtttggttagaagtgatgagatatattttaaaagtccatacaacaaaattacaataaacatttattaagctgtaattttcacaatattttaattctgttctgagatctacaaatatctctacataacaccaaagccagtgatttaataaataagaggaatgtatatatcgctttgcaaaaaaatgcctgatacatttatctctatataagatatttgtagaatcagtttcccaaggctcacgaaactaaagtgcacacacacacacaccatgtacacacacacactattcaaatcaaatggatttatattaagtgccaaattaaatgctatacaaaatttataaccagatacacaaaatatgaagtcaatcatgaatccactgttgataatggataccatacctcacaagtgtgatttccagttaagaagagggagacaattgcttcattgggtttttagtgtgtgctaatcaccatcaccatcacaagttaatcagtttaattacatggtattcagagattaaacacacatgcagatattaaatggacactacaataaaacctttaaatctgcaaaaagacatgagaacacatggtcaataataccactcgctgccacagcttttcagtagacaatgcaaatggcaatcagcgttttaagccaccacaagagaaaaactggtactggtgcacctcctacatatcaaggaaaagcaaaacacagaataatttaatatgctgaataaaatttgtttacaccagatactatacatcacactgatggttgtccagtatgaattttaagggtattatgttagattctgcaaaatatattcctattattcacaagtgaggagtcaaagtccaactattcaaatggccataaacaaaaatgttgcagaaggtatagaccattaaaaataaaaaagtcaggagtggggcagctgaccccttaggagcctcaggaattccttttaatgcaagatagatggcaagagctggctttttggttaagtcagccagttcggaaacccatcagggagaagttatcaggtgtcaacttgtaaggcagatgacattcatcaaaagcatcttaagaagtagcagtgatcacagaaaggaagcaattcaggatttccactagcaacaaattgcattaaccatgtctaggccatttgacagctgttattcttaacgctccataagcctgaatcacagggccagatgagcgactaagctgctcacatcctctctacaaggcagccctcccgggcatgcacaaagtcatattatagtcttcctaatcactgacccaaacctttgcgttcttactcagctccccagaggggaccaccccacttggttaccaccatcacagtcataaagacatagtcccagttccctgacatcgctgcctcccgactcctgcatgagacaggctctcatttctggggtaagtgtatgaaacacctttcaacggcattcacttaccctttgtgaattaagacacaggcacgattcacaaggtctgcttcccagaaattctattgctgtgctctgttaccagaaatgatatgggggctgaaatccaaagcaaaagaaaccaaagggcgggtaatgccgactggtattgaaagtgtgtnnnnnnnnnnnnnnnnnnnncgcgctatcgatggacagtagttcatcatttttttttttttgagactgggtctcactctgtcgcctcaactggagtacagtggtgtgatctcagttcactgcaacctctgcctcccaggttcatacaattctcccacctcagcctcctgagtagctgggactacaggaacccaccaccacacctggctattttttttttttttttttttttgtattttttggtagagacgggatttcactatgttggycaggctggtctcgaactcccgaccgcaagtgatccacccgccttggcctcccaaagtgctgggattacaagcttgagccactgcacccagcctggaaagtatatttatgaaaggtttgcactccacaaaagcatctttgctagggtgtcaaggaagagatcactaaaccaaccccaacacatccatacaattccagcaatctagagagggctggtccttttccttttctggattattttctgttctcagtaaaacaagtatttactgtgatactgaaacactgggaaattaacactgattaagatattttaaacactgagtcttaattataacagaaccagttttcatcagaatgcttttacgtcacattcagtgaagtgttacgctaatatattctacagccctgaagatagaaaaaaggtttctctccaggtatgagatatggtacaaaaatacatttttccacatacaaaagagagaaaaaaacaaagacatgtggcgggtggcgaggggaggcccaatcccaacaccctacaaggttccatggaatggagaaggaacaaaaaaatccccaattattttggggtaagatgtgccccagaaaaggtgaaatctatgcaataaaacccaggttttcttcaaatctagcatctaggatttctatcagagtttcaaataatcagaatttctatcagaatttctaccctgaggtgacacctactaactgtaggttctttcattaaaaatgaagacatctttcaccagaatgtatcaagctataaaactggcttcagagcctacacttagccagagtggaaaaaaaaaatagtgcatattttcgacagcaattttgaattgatgcttgaggtctcaatccaccagcacccagatatcatgttacctccctcagttgaatacaagttaaaatgatgatcttatcgagatctcaatagagcacagtgcccttcatgtttcgggtaagagggtgggaggaggaatgaagcgggtattacacccagcccagtgacagcttaagccttaacatgcgggcatcttacaatgaccataaacaagggaggggccaaggcagggctggcgatcattagctttgcgcacagaatgccatgttttcccctggccaacataagcaaagctgttttagtacctaaacgtggtatagccaaatgcacaaaaggaaagaagatagagatgacctcccgagttatttataccttgtgctaaaatagattcatctacaagtatctaaatgacaaaactagaatgatttcaacccagtaatcctgtgttccaatgtgcatggataaagatttgatctaggcccagcgcggtggctcacgcctgtaatcccagcactttgggaggccgaggcgggcggatcacgaggtcaggagatcgagaccatcctggctaacacggtgaaaccccgtctctactaaaaatataaaaaattagccgggcatgatggtgggcgcctgtagtcccggctacttgggaggctgaggtaggagaatggcgtgaacccaggaggcggagcttgcagtgagccgagatggtgccactgcactccaggcctgactggctgtttttttccttctacaagtgtaagcggtgccagtcccttttttggtttgtgtaagtcggaggggggaggggggcctatgtgcagtgttgattcggggtatatagagacgactgtgaggcaaatgcttactttcgagtgcggctcaaataatggctcggtggccttacatttgtcacaagatgcgggaggatgcagatatacagttgaagaaaaagtcgatcacgcttcattaatttcgcacacccgaatgaggatctctggatatccacccggtcatgatctgatgggataaggtcgcacgccagagatcaacaattttagatttataggcaccttgacctgtaagtgtttattaaatgaacattgtcccggatcgacttacgggatcgcatggaactccttcgcgcataatgtgtgaaaaacgccccttgtagcacgggtattacctcccctccctttgcataccgcgctacgaccacaggaagacattgtctgcgaaatgaagcttttgtttatttgtgccgcgtgctccgaatatggttattatattgggcgagggaggggcgcgcctatttattcnnnnnnnnnnnnnnnnnnnnctcagcctcctgagtagctgggattacaggcacccaccaccatgcctggctaatttttgtatttttagtagagacggggtttcactctgttggccgggctggtctcaaactcctgacctcaggtgatccacctgccttggcctcccaaagtgttgggattataggggtgagccaccctgcccagcctgctccagcaaatcttaaatatccatgcacactgaataaacatgcacctgaaacaggtgcacgtttcaggaagtgaatggaactctccaggagagtttgggtcccatcatgtgtaccttagaaacagaagtctcaaaagtctcaacaacatccacaaaaacatctgcatctgttttccagatacttgcaaccaaaaataaaacttcacaggaacactacacaagaagtggtagacagctaaatcttctccaaactgagacctggaccataaggtcttggttgtagcaggtctggcaggggttatctataaacctgcacgcagggcactgtgagcgggttgccagggtacatctgtggccaggtaagggccacagagacagtcgtgatccccagcagcttcaaagctgcaaaatgctgggcttttttttttttttttaagatgaagtcttgctctgttgcctaggctggagtgcagtggcgtgatctcggctcaccgcaacctccacctcccaggttcaagcaattctcctgcctcagcctcctgagtagctggactacaggcacccaccaccatgcctgactaatttttgtatttttagtagagacgggggtttcaccatgttggccaggctggtcttgaactcctgacctcaggtgatccatactcctcggcctcccaaagcgctgggattacaggcatcagccactgcgcctggcctagggctttcttttttaaaaaacaagtcctaacaaaagggggtttctaccagcccctgagccacaccttctgaaactcccttgcccaggatccccacagctgtccacctcgcaagtcccactctctgcccacagagactgcctaaaaggaggacacaacagatttcagataaaaagcacctgtgtatcgtaaatatttcaggaaaaagaattcagatcttttcaaaggcttgcttattgctgctaattgttcctgaggatctttctaagcagcaatatacttgagaatattagctgctactgtttgttttccctctaaggtcctgaggaaatcaaaagaaaaaaaaaaaaaccctcaagggtatagcttttgtatatagccctagtgagcaaactgcaaattgggacatgcagtagattctggagcaatctccaatccttaccaggtacttcctggcatcaaatccccaggacatttcttggcccctccttgcattttccgtttcaaaatgttgaggttaaaatacatcgaagcacagagggaagaaaatctcaggtcttctagaaatggcgatgtcttcatttaaaaataggactgatgggggcttggcaggggtctctaggatccaaaagaggttgagttgcatcctgcagcccaactgtccacatttagaagtgacaacattcatgaactaagtcaacatccaccaaaaataacatgaaataaagctcacagtttgggaacatgaaaataacgcacacagacctcacccaccaatccctaagctgtgaaaacaaacgctcgcatttaaacttttctcaaatgtcaaattagcatattcttcccctccatgtaaagttttaataaacttgactcaatctgcctttattaaaaaaccttacaaaagatgtatttaaatgcttgaaaaaattaactttatgctctatgcacagataaatttctcttactgtacaactaaatatggttatatcctttgtttaaaaaatattttttcccccactaattacacttcgtgtgtagttccacgtcaatgatctttccgctcttctgggaatgtgtcctaagagctgccgggtgggtggaaatagccctacacagcgccactttcttgctcagtcgtgtttattaagattgtttggggtttggggtttttttcctccgttttcgttttctgagacagcgtgctggtaactgtggacccgcccggccggctgaccttcacttgtccttggagcggtccaggctctcgagcacccggttgagacggatgttgagcagtctgacctgcttctccaggtgctccagcttctcctccacgctggggttgctggggttgctggggccgctgggactgcttcgccagtagaagcccatgggcccggtcatgaagtagacggccaccacgaagcacagcggcagcaccgcgttctccggctcgccctcgtacttgtgcaggatgtacacgcaggacatggaaaacaggacgacccgcacgatccagaagaagcggccgaacaccacgtgcaggacgctgaaagtgaagcccagggtcagggacaagaaccagtaggccaggaggacgacgccgaccagcaggagcgcgcgggccgggctgctggacaccgaggctgggctgaaatactgggacaggttggagactgcgggacagaaaagaggaacagggctcgttacgcaggggccaggggtttcttaacaagctagaattggatagttgagctggcctgtggggcttaaaaggcctttgcaacaaccaaaggaactcaaggaagttcctctgtgaatagtcacactttgctccatgaggacacacagggaagcctcttttttttgagatggagtcttgctctgttgcccaggctggagtgcaatggtgtgatctcggctcaccacaacctccgcctcctgggttcaagcaattctcctgtctcagcctccggggtagctgggattacaggcatgcgccaccacacccggctaattttgtatctttagtagagacggggtttctccatgttaatcaggctggtctcgaactcctgacctcaggtgatccacctgcctcggcctcccaaagtgctgggattacaggcatgagccaccatgcccagccagggaagccctttaagacgacctgccatgttgagttttaaaaacctctccatatactggtttctcttcaaatcatatacatctttcacctttagcctgggcaacatagtgagaccctgatatggactggctctgtgctcccacacaaatctcatcttgaattataatcctcacgtgtggaggaaggaacctcgtggggggtgattggatcatgggggtggtttccccatgctgttcttgtgacagtggaggggggggggtttcatgagatctgatggtttaagtgtttggcagctgccccctttgctctctctttctctcctgctgccttgtgaagaaggtgcttgcttctcctttgccttctgccatgattataagtttcctgagccacgcagaactgtgagtcaattaaacctcttttatttatgcattacctagtctcaggttttttggtttttttgtttgtgtttttgaggttggagtgcagtggcacaatcttggctcgttgcaacctctgcatcccaggttcaagcaattctcctgcctcagtctcccaagtagctgggattataggcacatgccaccacacccagctgatttttgtatttttagtagagatgaggtttcaccatgttggccaggctggtcttgaactagtgtcctcaagtgatccacctcctcagcctcccaaagtgctgggattacaagtgtgagccactgcgcctggcctcgggtatgttttgatagcagtgtgaaaatagactaatacagacccaatctctagagaacacaaattttaaaaaaattagacaggtgtggtagcacacacctgtagtcccagctactcaggaggctgaggtgggaggatcacttgaggctgggaggtagaggctgcagtgagccataatgtgccactgtactccagcctgtgtgacagagtaagactttgtctcaaaagacaactttcaccttttactaaaacacctctggaagtggggcatagcctgcaaattgtccttcaatttccatagtaacaaatgcccaccttcaggctgggcacacaactacctaggattaaagcatttcctagcctctcttgcagctacataactaagctttggccatgtgttccctaaaagtagcaggaatgtgtcctttacctcttctgcctgctggaacatggatacaatggctggaactggagcagccattttggaaggcactcatggaggaacaataaaatggaaggtgctttggtccagagcaccacatgcatcagagccatcaaacccgcctcaccacctccctgagaactttcatataagagggaaataggtgtccatcttggttaagccaatgttatgttggatttctgtttcagccaaacctgatcctaactggtacccacacacgaagttccatctcaagaatgcagtgaaatgtaagagtagcatcttctgtgtgcctgacttgaagaaattcaaacaaaaaagttaaaagaacagtagaatattccttttgaaaccaactagactgaacaattattaaaaattctgaatgttgcattctctatttacatactttttagattaacccatttgaaagatgtacacatcatacttcatcatacatctaagaataaagacatcattcacctcaaaaccatgatactatcatcattctaagaatattaacaattccaggctgggcacggtggctcatgccagcatttgggaggccaaggtgggtggatcacctgagatcaggagtttgagaccagcctggccaacatggtgaaacccc

SEQ ID NO: 97181 - DNA, 295525 bp, Homo sapiens
  misc_feature (1)...(295525): n = A,T,C or G
cccattcatctggaaggacgttcagattgctttcagctttggctcttatgaataatgcttctatgaataatcacatacaagtatttttgtggatatatatatttatttctcttgagtaaatatctaggagtagatatacattttgtgatcaatatgaaaataaaaattgtattctactagatatacattttgtgatcaatatgaaaataaaaattgtattctactagatatacattttgtgatcaataggaaaataaaaattgtatactactaatattctatattgatcacattccttagcttagagcttgacttagttgatgattctaatttagaaacatttttgtttctgaatttggttatttttatgtaattaaacatgtttgaaaattatacgttttatttgatttttttttttttttgagacagagtctcgctctgttgcccaggctggagtacagtggcacgatcttggctcacggcatgctccgcctcccgggttcatgccattcttctgcctcagcctcccgagtagctgggactacaggggcccgccaccatgcctggctaatttttgtatttttagtagagacggggtttcaccatgttagccaggacggtctcgatctcctgaccttgtgatccaccctannnnnnnnnnnnnnnnnnnnnnnnnnnnnnnnnnnnnnnnnnnnnnnnnnnnnnnnnnnnnnnnnnnnnnnnnnnnnnnnnnnnnnnnnnnnnnnnnnnnnnnnnnnnnnnnnnnnnnnnnnnnnnnnnnnnnnnnnnnnnnnnnnnnnnnnnnnnnnnnnnnnnnnnnnnnnnnnnnnnnnnnnnnnnnnnnnnnnnnnnnnnnnnnnnnnnnnnnnnnnnnnnnnnnnnnnnnnnnnnnnnnnnnnnnnnnnnnnnnnnnnnnnnnnnnnnnnnnnnnnnnnnnnnnnnnnnnnnnnnnnnnnnnnnnnnnnnnnnnnnnnnnnnnnnnnnnnnnnnnnnnnnngaaatgcaaggatggttcaacattagaaaatctgtcaatgtaatcactacattaatgaattaaaagaaaaagtccatataattacactgatagatgttaaaactttgaatagaattcaacactcaatctcaaatttttgaagctctgaaaaaacctataagacatttctcttaatctgatgaaaagaatctaataaaaatacatacttaatgattaaatattataaacatttccattaaagcaaagaaaaatagaagaatgctcactatcatgactacagttcaacattagacataaaaagtaaatggggccgggcgcggtggctcacgcctgtaatcccagcactttgggaggccgaggcgggcggatcacgaggtcaggagatcgagaccatcccggctaaaacggtgaaaccccgtctctactaaaaatacaaaaaattagccgggcgtagtggcgggcgcctgtagtcccagctacttgggaggctgaggcaggagaatggcgtgaacccgggaggcggagcttgcagtgagccgagatcccgccactgcactccagcctgggcgacagagcgagactccgtctcaaaaaaaaaaaaaaaaaggatagtactgggattatagcttctgcctgtgcttgagtttttaggatcttattcttgagagtctagtttgtactatgaaggttagaacacatttccagaaatgatcaatttgagcaatctgagtaagagtcggaataagttggagtatttcatgtagtgaattttggtatttgctttgtctccagtttttccttcttttttttttggagacggagtcttgctttgttgcccaagctggagtgcagtggtgccatcttggctcactgcaacctctgcccccacccctaccctactctctgccaccatccccacgtttaagcgattctcatgtctcagcctcccaagtagctgggattataggcatgcaccaccacgcccaaataatttttgtatttttagtagagatgggggtttcacaatattggccaggctggtctcgaactcctggcctcaagtgatccacctgcctgggcctccaaaagtgctgggattacaggagtgagccaccacgccttgtggtgtgcaaccttcatggttggactttttaatctttcaagcgtttgaggatagttgggaactatacactgtattttaaatttatcaggggaacccaatgttctgcaaggatcattctggcagtggtctattattatccaggtgcttttttttacccccattggaattagttgagagggccctatgttcttttacttttggggatgtagaaaaactgcatgtctatagcatatccttctgggttaccagattctagccttgttccttgtctttgcaatatgagttctgacaaatgcataatgtcatatatccactatttcagtatcatatatcatagtttcactgtcctaaaaaatgccctattctccatgtattcatctcttccctctttgcctcccttcccccaaactcttgcaactactgatcttttactgtctctatagttttgcctactagtgtttttttctctcacacttttaagtaagtgctatgcacacacagcttcaagacaagtttcttatctctgccatccaatcagattacctcctctaactcttttatataatttatcttttcctaagaacctcctggagggtggtggaagagatctgcctactataagctgcagtagagatagcttttgttccctagtatctattcttctcttctttcttttaataataaaacaatcccaccctgtcaaggtttgactgagcccatggctagatgctacattttcttccttccttgaatatagatgtgacctatgggatatgagcagaaaggatatatgcatgcaagtaataagaactgacaaaattgagaaaataagacatttaccatggaactttaaatttgtatccctttataggaccatactattgaaaggatattatgaattatattttaaaataaatcctgtaattatattttgaaagacacatttatactgctttgtaatttttggtaataaaagtgtttattggttaaaggaaaatgactttgaatgtaatgcagtttgtataaccctgttttgaattaaaaaaaatttacatgagtatcagaaaactaaaacaaaaaacaaaaaagctgaagtttcaagttttagaagactctgtgtgaaacatgagcattaaagtataatggacaaacaaaagcctaaaacaatgagaaaaaagaatggccgcatctgtaatcccatctgtaatcccagcactttgggaggctgaggtgggaggattgcttgaggccaggaattccaggttacagtaagttatgaccaggccattgcattccagcctgggtgaaagagcgggagactttgtctttaaaaaaaagaatggccacagagctggaaggagaatcaggggactgggttttacgtaagtgaaaggaagcaagactttttagaagtgagcaacatgtccaaatgaaacacagaaatctaataaaataagtattaaaagaatttaataattaagatattataaaatgggtatgtcatgaagttatgagattaactatgtacatataaatcttctggaatataataggcgttcaataaattttgtgatcaattccttgttttattcaaagaatacttactactagttaggaatattgggactagaaaataataccccacaatgaaactctcagaagcagcctcagaagcaaaagtttttctctgaccttctcctgccttcctgtctcttggtcccattctcccctgacactagccatagaaactaggcaggccatagaaactagaacctcttttccccaaagccagtcataaatcctggaaatattactttaattttctcccgcctttctttgtaaaaactggccataaagaaattatctgatctaccttttttgactgtaggtcctaagaccctcattgcagagagggtcccgccctacacccagaaggaaggaatgcatgcccagagagtccaagaagaatctagacagacaggccttgctgggtttccccactcaggctattagcattagagcatacccttttgtccaatcatatttctacatggctgtccatactttgttggatgtacaaatgaacattacaatttcccctgtatctttgggtcttcattctgaaggttctcatgtatatatgctaaataaacttgcatgcatttcctccaattactctgtcctttgtgagtagatttttcggtgaacctcagcgatcagagaggagagctacaggagccctgcttgaaccttgaaatgctatgatgacagaccgtagccttaaagcagtttatagtgttgtagggtaaacacataaacaggccaatatcattctttgccatgagggatatgatgagaggaagtacatggaggttaactgagttatttcttttagtttctttgtttttggcatgtgaattatgaaactttaaaacacctccagtgcaaaaaaaattttttttaaattaacatggtggttggtgcactgtgtttctaaaatatggagtacaatgtaaagcaatgcattctttttttaaaaatttattgttattttgaaaaatttttgtagagatgaggtctcactgccttgcccatagctggtcttgaactcctgggctaaagcgatcctcctacctcgggctcccaaagtgctgggattacaggcgtgagccactgcgcccagccgcattcttgttttcatctgtgaaatacgtttttaaggtaaatacttaaagttgatggagacacctggtctacttaagctctcattcagaacacactgccttgtgcttttaaaaaaattaaatggataatctaaattggcagctaccaattaatttatatccatagttgctaaaaaatgttagtgtaagttcatttttattagtcgcatcattttgagttttaaactatttcacatgcagtaaaatttatacctcttatgggttttgtcaaacagtggtttagtcaccaacacaatcacggtatagaagctctcaagctccttttcagtcacccccttcctccagccctttgccctggtcgccactgatcagtattctctccttttaaaaacacttattatttggaaataattatatacacaggaaattgcaaaaatactacagcacctagagtcccgtgtacctatcacctagtttcctccaatggtgacatcttacacaactgtagtacaagatcaaaaaactatgtcatgtagtttgaaggcaggttttcctttcacttcttcgcctgcattttctcctttcatttccaacaaatttaactctgttgttagaaggagcagatgctagttttctttcagatgtctgctatttcagttcgattacccctgttactcctacattttttctagtctttatccccatcgtttcgccccaatttaattttgctgctagttttttttttttctcctctgggatatgtgccacagatggtactattgtcaatattcgaattcctaacttctccctccatccgtaagttttcaaggggtagccgtgcttgtgcttaattgtggtgtttacaggactttttgtagcgtaagcatgctggcatggttccccaacctcttagggggatgctagtaacccgctcccccgtcaacgagccgcctttgtgctccgcggagggcaccgcctgcgttgggttggaggtgggggttggcgggggagagctgcccgccaggcgaggggcggggccttggcgggggtggtcgcgggcggcggggaggtctcgcttccctcctctccacccgctcccagtcccggcctgggtctcagccccgccctgcccagagcgcgcggccgatcacgtcaccggcctgcgctaggcggcccccacggcgcgggaaggcgcagtgcgcacgctccgactcggccgtggcggacctgactgaaggaggccgcggacctgactgaaggaggccacggccacttctggttggcctcggggcgcgctggctcggctcttcctccgccctcgaggcccccgcagtcccatcattcagttccgtagggtcaccggcgcggcagtggcctcgcagggcgytgggtccctctccccagctctcctccccctggccccgtcgccccgccctcgccgggctgggctgcggggtcaggggccgagcggagaggggtgagtattccccacagcccttgccggttgcctcctcccggctctgcttcccacacggtccttgccccactcctaggacagggaggaagggcacgcgcgggtaggcgggaaacagcccagtcctgaacaaaaggccggggaagcgggtccccgccggtaactgcaggcctgtgctggccgccgcgagcgggkaagggcgaggacactccctcctcggggacccggtccccgtcgcgcacacggtgtcaccagcacacctggcccagtacccaaagcaccctcgaagtgggtagtaactactttgtgtttaaaatccacatactgatagcaaatctttggttgaaacagtattaaattactggggcttccagtggctgagtccaacttaatttgaagtttcagattaagtatcaggaggaataacttgatatttagagccaacaggtctttcttttttttttaaacctcccaaaaaacctataaaatcaagaattggcggggaggaccggagaatgataaaggaatagttgactgatttatagaaacttttagtggcggtaaaaattacaaaagtattggaaataaggcaaaaggacagcatgtttttttcagagtcaaaatggagcctaacaggcccacctgaagatgatttagatgtctaggggactatattttgtttggcatgatgatattgattagggcctaggctttgtagttaacatctttttcattaatggagatgcaaattatttctgagtgggagagaaaaaaatacagtactcctaaaggttgtagttttagtgccttgtaggatattagccatttttcttttcttttttttgagacagagtcttgctctgtcgcccaggctggagtgcagtggcacgatctcggctcactgcaacctctgcctctcgggttaaagcaattctcctgcctcagcctcccgagttgctgggactacaggtgcccgccaccacgctcagctaatttttgtaagtttagtagagacggggtttcaccatattggccaggctggtccggaactcctgattttgtgatccgcctgcctcggcctcccaaagtactgggatcacaggcgtcagccaccgcgcccggccaatattaaccatttttctgtctaacctatcaaacttaccatcctttcttcagtgtttatgctcagttcctgaaatgcttttgagcacactaagccattcagcttgttccattgtgagtttaataaatctttgtcacaggttcattttgagtcatatttataacttttgttattggacaatggtctctattctttagtggcaaaaacaagtttatgcttctcaggatggaaggacataggccctgtgtggtactcaaatacatcttaggactccaagtagaatcctttctcattgcttcagaaaggttaaacagtgaccagaggaaatgttacagaactttgaccaaaaaataaatcctgagtattgagaaattaaaattaaagtcttgcaaattgcagagtttaaaaattgttattgatattttaaattgaagaaattagtggaaatagtagttctaaattgcatacatttgaatgtggagtgttaaaagattatttcccttgtctcctgttttatttaggataaggttaactgagattttggtacatggtgggccattcaagttatgtataatgttttgtgacaaactacatgtcgacagtagttcctgatgcctaatacatttctgagaaaggtaaagcagccctttaggaaaaacaaggagagtaaagcttacagaagatttcttaagatgggcttgatttgattatctttgaaacctagagatgtgtttgggacccaggaggttgtgtttgaatcataaatataatcagggaaccttaagaaaaaaaaagccatggagatcatttggtgattatctattgaaaacaaatgttttcaggggacaagcagcytgagtataataaagcaattagaaagttggggaatggagaataggagaataagctgtacctgaaggaatcttaattagggaatggttgctgaaaactgcagagacaagacttctctaatgtgcttacctgatcacatagttttataggatccaggaagagggcttagtaataggagtgtagctttgaagctagggttatttcatatcactgtcatgtaacatctttctgagaaaacctttttatcatctcttctgagctcaagaacctacactggtttcctattgccaattgttttaaatggaatctcctttgggttttttggtttcttcttttggttttttaagaagtggggtctctaagttgcccaggctggagtgcagtggctatttagaggcacaattagaaggcactacacagccgtgactcctggctcaagcagccctcctgcctcagcctcctgagtagtgaggactaaaggcgagagctatgtctccaagcttcctttgagttttaagactgtaaacttcctgcaccctgtccccagattctcaatatccctcaatctatactctccattcaggttctttactggtctcatttcaatctgttccaaggttcactgccactgccccatcccttctatttctttctttctatatcctcctataattcaaggattaactgaaatctaactactgtagggcccaggctctggttccagacttccttaggtcaaattactacacttaacagctgtgttaccttggacaagttaccctctctgtctcaatttccttatctataaaataaagaaaatcctagtaatttacctcaaaaagttgctctgaggatttgttactagttcttaatacatagtaatatatgcaattttaattattttaatccatactaattctttaaacagtggttgtacaatttatcactgttttttgttatccattattctctgatgttcttttcaatgtgaatctttacttaaaaatttgattactttgagaagaatgtgtattctgaaaaataaaaaaatatttggttacaaactattgaaggcaaagactgtattatacttctttttgaaagtctcttaaaccaaggctgggtacagtggttcatgcctgtgattcagcactttgggaggctgaggcaggcaaattgcctgagctgaggagtttgagaccagccttggcaacattgcaaaaccctgtctctacaaaaaatacaaaaaattagctgtgcatggtggtgcacacatgtggtcccagctactcaagaggctgaggcgggaggattgcttgagcctggcaggtggaggttgcagtcagctgagatggtatcactgccctccaacctgggtgacatagtgagacccccctctcaaaaaaaaaaagtgtctcagacctctcaggatgatttgggggctcagtgtaatatttttttcttcccatcttactatctagttttctttttcttttttgttttttattgtacttttgtagcttagagttttaaatttaaactcaattttgttccaaaagtatttgaggtagcttaaactatataatatataataacatacaaaataaagagaatcaagatcataaaaatatgaagcttgaatagaaagatgtgattagggtgagttatactgaaaatatactgtgaatgttgtagagttatttatttatttatttattttatctttttttttttttgagatggagtctcactctgtcgcccaggctggagtgcagtggcgtgatctcggctcactgcaggctccggcccccgagttcacgccattctcctgcctcagcctcccgagtagctgggagtacaggcgcccgccaccttgcccggctaatttttttttttttttgtatttttagtagagacggggtttcaccgtgttagccaagatggtctcgatctcctgacctcgtgatccgcccgcctcggcctcccaaagtgctgggattacaggcgtgagccactgcgcccggcctgttgtacagttattaaaggtaggccacaaagttccaagcttcatggtggtcaaaggaaagaaggaaacatatttattgcccagcaaaaacagcttcctgtgttaaaataattaattgggaggccattgcctgaggaagctccagtgccctgggttcctacataaacagacttacaccaaactcagtgtaaatggttgtattctaggaaaatgaaactttagcttaaccaatcagaaaccatcaactaacctctaaccactgacttttactggaatgatccaagtaaggctactccactttgaccaatcacagattttcttggccttgcttctgccgttcactcttcaaaagccttctaactgtgtccttttggtgcagccccatattgcttgcattctggagctgaccaattcattaatatgcctagtgttccattattggaacgctaagcttgtgggagttatttatatcctgctcatggtcatcgccaaggtctgatttttcacaaaaaaaatttgcaacctccagcataaatgggttaaccattgtctgcttaaataaacattttcttgtttttgttttttgagacagtatcttgttgtgtcgcccaggctggagggcagtagtgcagttatggctcactgcagcctcaatttcctgggctccagctatcctcccacctcagcctcccaagtagctgggactacaggcatgcaccactatgccaggctaatttttgtatttttttgtagaggcgggatctcaccatttgcccaggctggtcttgaattcctgagctcaggcaatccacctgccttgtcctcccgaagtgctaggattactttgcctgacctcaaataaatcctttaaaattttaatgtgccttggtttatcttttagcacctagtaaatatttagtgagtgaaatggagattgtgatcacagattttaaaggatacgctgaggccctagagttaaattctctakactttgttaattccttacctacttcccagtatttctcaaagggagctctactggcatttttacagacaactcttcactgtgtgggattgtcctgtacattgtaggatgtttattttacctggtccctcagcactaaatggcaatggcaaactctaacttctttttaacaatccaatatgatcccatttatttccaagcagccccttgaagagcgggttccccataaagttgggaaccattagaccttatttgcccatactcttctccacccgagctatgctccatccactgacatttgttttatttttaaaccttgcattcttttcagaccctgtctttgcaggagctcctcaatctttttggagtgactttgtctccacctggttggcccttactcaaatttcaaaattcatttcttcaagaattgaattcatgtgttcagaactccaagttttggagtcttccccagttttgccaggaagtttgacattcttttctaggaggacactcacagcaagcactagggtattgtaggtactgagtgaatgaatgaaaaacttgtggaaatagaaggcacattagtctcatctctgaacaaagacttttgcaagaagaaaaatttaaagggaatgtgcctttcattacaaaaatgtccaaccatttcctttttttattttccaaaataaaaatatggcacttggtagtatattttaaagacactttgctctgtaatctgtattcagactggcactgattctgtagcttctgatattgtgttggtctttttttttgaggcggagtcttgctctgtcgcccaagctggagtgcaatggcatgatctcagctcattgcaacctctgcctcccaggttcatgcaattctcctgcctcagcctcccaagtagctgggattacatgtgcccgccaccacgcccagctaattttagtatttttagtagagatggggtttcaccatgttggtcaggctggtctcaaactcctgacctcaggtgatccatccaccttggcctcccaaaatgctgggattacaggcatgagccactgctcctttctgtctcttcttattttttggatacttttggccaaggataccccattatctccttatttcctaattctggatacttggcatatgtgctgactagagtttgttgtactagtcctactacccactgttcaaaggcagcaagagagtttgagctgtggatcagctcaaattgtcatcagtggtggaacattttttcttatgtgcttgcagagttttattaaaaaattatcttttgataaaagtaatgatactggtatcagaaagattggatgtcatatagatctgtggttttttttgttgttgtttgtttgttttagagacaggatcttgctgtctcccaggctaaagggcagtgtcacggtcatagctcactgcaaccttgaattcctagcctcaagtgatcctcctacctcggccttgcaaagtgtacatcagtttgtgtaagaaaggtccaagaagtgaacaggcctgaaagttgaagaaaggtactataaatgagaagaggtgtatagaataagtccattcaaatttttgaatttttctttttttttttaagatggagtctcgctttgtcgcccaggctggagtgcagtggcacaatcttagctcactgcaactttcgcctcctgggtttaagtgattctcctgcctcagcctctggagtagctgggactacaggtgcacatcactgcacctggctaatttttgtatttttagtagagaagggattttgccatgtttgccaggctggtcttgaactcctgacctcaggtgattctcctgtctcagnnnnnnnnnnnnnnnnnnnnnnnnnnnnnnnnnnnnnnnnnnnnnnnnnnnnnnnnnnnnnnnnnnnnnnnnnnnnnnnnnnnnnnnnnnnnnnnngccgagatggacggatcacgaggtcaggagatcgagaccatcctggctaacacggtgaaaccctgtctctactaaaaaatacaaaaaattagctgggcgtggtggcgggcccctgtagtcctagctactcgggaggctgaggcaggagaatggcgtgaactcgggaggcggagcttgcagtgagccgagatagcaccgctgcactccagcctgggcaacagagcgacactccgtctcaaaaaaaaaatgtttactgtttgcctatctgttatagatgctaagatacgaagtgtaaatcaaatccccagacattgcagacattgctctatcatctggcatttgttgcagtgggtgaagatggcagaggctaccctgatttttgctaattgtaggtaaacctttttttttttttttttgcctgcatctttttttctttctagtctttaaattaagatattcctgtaggctatgtttaggcataagtttctttccagcagctttgttttttttagaaacatggtgaattctttcaatttataggtaaatattttaaatcttttttttttttccatcttagaacagtttttcagttgtacatttgcttatgattgtagttcagaaattccagttatttgtaggttggacctgtgttctttgtccttccatcaaacaatatgcattattttcatcatggtcttttttcttttgtgtgtttggagaggatcttatgtgcttatacactgaaacacgaatgtgatttttttccagcttctatacatctctctgttgccttgaatgtagaatttttatctctactgttacgtgtttgaatttccttccagttttttcttatccagtttcctttttcatctcagctgtttttccttcctcatctcttgcttttagaggtctttmcctttctctttttctttttaaaattgggaacatagagtagataattcctcggtttgatttccayattcctagtgtaagtccattacaggagcaagctttccctcttcctgtttatggtagttcccctcttttcttatgcaagagcttcttaaaggtcttgtgttgttattaatgtttttggtttacttaccttgacaaaagaggggcatgttgactgrtcagagtgaccaagtgttccttcgtctctctcactacacttggaagctggaggaatcttcctctttatgttagcttggaaagcagatgaatgggtacaacgaaatttatgaaggatagatcattttctatacttaggagaggtcttcctttcctagtgttgaatctttcggtcctgtaamtataatgaggggagtgtttttgtgtgatttgaaataatttatagtttttttttttttagttttttggggtgttagtggtgagactgtactatgctgagagctcattctgttcctgcagctacctgtcgctcgctgcacagtactcagtgcacctcagggctttaccttccacatctggccatgcacactgcactactgggagagaactgccttgaaagagaattaccagtggagctagaaaccaggaggggaggggcaactcaggatctgtttctctgaagggaatgggagagagtgaaatgaccctctttcccctgacctagtgatagagaggtcagagcaagcctcagctaccaacagagattcctcatttccagccaggtacagtgttgcctctcatttaaactttgatttggaatatgtattccaatgggaaggcaaggagggagaattgagcctgctggtcatctgttgttaggactgatacgacttctcttctgatgtgtctctgtgctattttattggattgcccagggccatgccttctgtgtcccacccaggctgccaaatgtcttgaaatccaggtcttttaccagccctgtcaaagtgattcatcttttgtctagggatcatgctaatcttttagcatgattccctttgaaagtatcccaggtgctaattaaaagtaattattttgggtcttcagaatcaggttatttttctggccaaggcctaggattccacatttgaatttgcactgtgggtgcttctttgctgtctaaaatttgaggaccactgcctaaggaccttgctaggtaagtgattaaattaatctgaatcaattcaagccaaattgccataaaagtagtgggttgatgtttaactctcctacctgatagtgcatgttttttaaaaaagagtctacacttagagttataaataatgtggaattgttgctaggagggacaagtattcaggaaattgcctactttattagtcaaaaatgatttttaatgtttaaatgtatgcatcgcatgttctgtggtaatcacatttttgtaaatgatcttaagttctgggaaattcagttatatttcttatagtgttttagtcctattatgactttgatgtacattgatttatagattcatcaaatcaacgtctccaactaaaacaataacaaagaattagttctacacacattagattaaaaatcacattaaacagtatggagagtggtagtgaaaaaattgttttcaattaaaaaggatcatttaaacaatgattatatacagtgttagaattcactaaggctgcttttctggaaagatatatttgaacagcagcagaataagcttcttctatgcttctagtctaagggctaacttacagtttggaaagactaccctcacttggaaaaacagaaaattattctatttttccaatctttagtctctgctaaagcagttagaaaaaggttttgattgaatgtcacaaaacaaaaacaaaaacaaaacaacacaactcttcagccagagtaagactcaagcaaaatggatgtattaacaacttatgccaggcgtggtggctcacgcctataatcctagtactttgggaggccgaggtggggtggtgggtggattgcctgagctcaggagttcgcaaccagcctgggcaacacagtgaaaccccatctctactaaaatacaaaaattcagcctggtgtggtggtgtgtgcctgtagtcccagctacttgggatgctgagtcaggagaatcgcttgaactcgggaggtagaggttgtagtgaaccgatatcatgccactgcctgggcgattccgtctccaaaaaacaaaacaaaacaaaacaacttatactttatgacatgaggagcgctgactcatttctaacctacttacaactagaaatgagagattcattgttttttttttttccccttttatttatttatttatttttattgatcattcttgggtgtttctcgcagagggggatttggcagggtcataggacaatagtggagggaaggtcagcagataaacaagtgaacaaaggtctctggttttcctaggcagaggaccctgcggccttccgcagtgtttgtgtccctgattacttgagattagggagtggtgatgactcttaatgagcatgctgccctcaagcatctgtttaacaaagcacatcttgcaccgcgcttaatccatttaaccccgagtggacacagcacatgtttcagagagcacagggttgggggtagggtcacagatcaacaggataagaatttttcttagtacagaacaaaatgaaaagtctcccatgtctacctctttctacacagacacggcaaccatcccatttctcagtcttttccccacctttcccccctttctattccacaaaaccgccattgtcatcatggcccattctcaatgagctgttgggtacacctcccagacggggtggtggccaggcagaggggctcctcacttcccagtaggggcggccgggcagaggtgcccctcacctcctggacggggcggctggccgggcgggggactgatccccccacctccctcccggacggggcgactggccgggctgggggctgacccccccccccacctccctcctggacggggtggctggctgggcggggggctgacccccccacctccttcccggacggggcagctgactgggcagaggggctcctcacttcccagtaggggcggccgggcagaggtgcccctcacctcccggacggggtggctggccaggcggggggctgactcccccacctccctcccggacggggtggctggccgggcgggggtctgaccccccccacctccctcccggacggggcagctggccgggcggggggctgaccccccccacctccctcccggatggggccgctggccgggcagaggggctcctcacttcccagtaggggcggccgggcagaggcgcccctcacctccccggacggggcggctggccgggcgggggggctgaccctcccacctccctcccggacggggtggctgccgggcggagacgctcctcacttcccagatggggtggctgccgggcgtaggggcttctcacttctcagacagggcggctgctgggcggagggtctcctcacttctcagatggggcggccaggcagagacgctcctcacctcccagacggggtcgtggccaggcagagacgctcctcacatcccagacggggcagcggggcagaggcgctccccacatctcagactatgggcggccgggcagagacactcctcacttcctagatgggatggcggccgggaagaggcgctcctcacttcctagatgggatggcggccgggcagagacgctcctcactttccagacggggtggcagccaggcagaggctgcaatctcggcactttgggaggccaaggcaggcggctgggaggtggaggctgcagcgagccgagatcacgccactgcactccagcctgggcaccattgagcactgaatgaaccagactccgtctgcaatcccggcacctcgggaggccgaggctggcggatcactcgcggttaggagctggagaccagcccggccaacacagcgaaaccccgtctccaccaaaaaaatacgaaaaccagtcaggcctggcggcgcgcgcctgcaatcgcaggcactccgcaggctgaggcaggagaatcaggcagggaggttgcagtgagctgagatggcagcagtacagtccagcttcggctcagcatcagagggagaccgtggggagagggagagggagagggagagggcgagagattcattgtttaggatcagatgagaattgaaattcatctttttactgagagttcacttgagtgactgttgtcacctgtagtctgaatttagtttaagatagcttaagtctggaagaataggcagttcacatatctaagatttttcatttgcaaaataaggattattcttgccattattgctcaataagccacagttgtggttatttccatttttagccatattttcatccatctcataggaagttctgagattcagatttctgcctctactagtttatgaatttggtagaggaccagaaagtattacaacttgaaaactatgtataaaaatgttgattgaattatatttacatttttgagttgaaatattcttgcttgatcaaaaaaacaataattattccatgatatttcattatggtacattatgatgaatccagttgagatggatatatttttaatataccatacttcctaattttgtaatcaagccataagtgtttgtattattgtatgtagcatccttcagcaaagcctagtccttagataattttaaaagtattcaaccaaatatcaattagtgttttgatgttcagtcatcttgcttgtagcacagtgctgttaattagataaactatggctattgaatgaaattttatgtttaagtattttcaatagttaagtaaatctcaagtaactggagggcttaggctactttgttcagttttgttactaagtaagagtttgttggagttttaaaaatattactaagtatattagtgttctttatgaatgaaagttaatttttctttgatttggtatctttcagtatatgtcaggatcatcatacagttggaaaaatttcctctggctacaccatattagtcttctcttgctagtctagttttgcattctctctgattgatgaaatgggttctgttaccatctatgtaacgttgatatagaatcggtattgccagcccggatttctctttccttctgagttcaaggcacacctcaaaatgcctgctagacccctttacttggacattccacgggcatttgaaattcaaactcaatatggccaaattaaacccaactctcttcccaaacctgctcttcctccagagacctctgtcttactcaatgcaccaccacctaaaggcagaaagcttggaatcttttctctcccctgtccctcaccaatcttttcagttgtattgtccatacctagttcaacagcagtttatttttcttagagagactgacttttatcgagtctttccaaggcatttgcttatagaaataacagttgtcttttttactttttttctgagacggagtgtcgctctgtcgcccaggctgtagtgcagtggcgcgatctcggctcactgcaagctccgcctcccgggttcccgccattctcctgcctcagcctctcgagtagctgggactacaggcgcccgccaccacgcctggctaattttttgtattttttagtagcgacggggtttcactgtgttagccaggttggtctccatctcctgaccttgtgatccgcctgcctcggcctccccaaagtgctgggattacaggcgtgagccaccgcgcctggccacgcctgcctaattttttgtatttttagtagagatggggtttcaccgtgttagccaggatggtctggatctcctgacctcgtaatccgcccgcctcagcctcccaaagtgctgggtgagccaccgcgcccagccctcttttttactttgatgtttggtttgtttaacgtttaattacagtatatatttatgataggagaataaggtttgtgaacacacagttaactgatgggagcagaggcgcttcgtgatcagcatgctgtagacatgagtcagtgtcgattaatctggcaagttggttagatggaggttggataagagagtttctactgtaattatttgtgttttttatctccctttgttagaatatgagctcttacaaggcaaggactatatattttttcatttttgtatacctaacctttacttatgcacagtgcctgctacttaatagatattcactatgtatttgttggatgaatgaacaaactcttacatagattatactgaatttgaataatcagaaatgacactggtttaggaattatctagtatagacagatcattggccttgaagccaaacaggggtttaaaatccttgcagtttatatgattttaattcaattgaacaaaggcatctagagtgtttactatgctaagcaccaaagatatagaaacgggaataaaaaaacaaaaacaagctgggcactgtggctcatgcctgtaatctcagcactctgggaagctgaggctggtggatcgcttgaggtcaagagtttaggaccagcctggccaacatggtggaacsctgtctttactaagaatacaaaaattagccagcgtggtggcttgcaactgtaatccccgctcctcgagaggctgaggtgggacaatcacttgaacctggaagatgaagattgcagtgagccgggatcatgccattgcactccagcctggatgacagagcgagtcttcatctcaaaaacaacaataacaacaacaacaaaaataaaaacaacaaaaaaatggggataggtgagaaagatagaaaaaacaaaaatacttttttattttttttgagatggggtatcactctgtcgcccaggctggagtagagtggcatgatcctagctaactgcagtcttgaactcctggtctcaagtgatcctcctgcctcagcctcctgagtagatgagacgacaggtgcacaccactatgcctggctaactgtattttagtttgtatatagacagagtcttgctgtgttgaccaggctggtctcgaactcctgggttcaagctgtcctcctgctttggcctcccaaattgctgggattacagatgtgagccaccacgcctggccaaaaccattttttagtggccttgaggccattctacatcccaaattttggtttattgacagaaataaatcarttggcagaattcctttcaatataattctaaagttgatgctaatacttagtttttgtattgcagttatcatttaacatggaagaagatgagttcattggagaaaaaacattccaacgttattgtgcagaattcattaaacattcacaacagataggtgatagttgggaatggagaccatcaaaggtaagaatggaartgtttgttttctgtctcaaaagaggaytttttgttttgttttgttttggtttgttgacaggtaaaacctccataattgaaattaaggtatgaaaactggtttgatttagtaaaagtcttaaattgaagaatgtcttacaacagatgtccwttttcttacttcaactatatatattgattattatcaggctaatgaagtattattttgaaaagtccttacgtaacctgcttaatttaatagataaaaattagcatattaattatctgaatgtaaacagatgtttctgtggtgcttcaaatcatcaatcctaagttaatattcttaggaaactactttcgtctggagagtaaaaagacaatcttgaaaccaaaccataaacaatcacaaattctgaaatattgaggactgtattaattgggaatttcctattaatataaacatatttcaaaatattttttcttttttgagatcatctcactctgtcccccacgctggagtgcagtggcatgatcttggctcactgcaacctctgcctttggggttcaagtgattcttgtgcctcagcctccctagtagctgggactacagatgtgcaccaccacacctgcctaaattttttgtatttttagtagagatggggttttgccatgttggccagggtggtctcgaactcctggcctcaagtgatccacccgcctcagcctcccaaagtcctgggattataggcgtgagccaccacacccagccccaaatttttttgtctttttgagatggattctagttctgttctggagtacagtggcgcaatctcggctcactgcaatctccacctcctgggttcaagcgattcttgtgcctcagcctcccgagtagctgggactataggcacacaccactgtacccggctaatttttgtattttgagtagagacggggtttcaccatgttggcctggctggtcttgaactactgacctcaagtgatctgcctgcctccacctcccaaagtgctgggattacaggcgtgaaccaccacgcctggcccaaagtatttttttctcttggttcgattcagtaataatgtaaaaggcctatgtacttatttccacacttagagttagttctctgtcaaaaactgtttttttgttttgttttgttttgagacagtcttgctttgtcacccaggctggagtgcagtggcatgatcttggctcactgcagtctctgcctcctggttcaagcaattctcatgcctcagcctcccaagtagtagctgggattttaggtgtccaccaccatgcctggctaatttttgtatttttagtagagacaaggtttggccatgttggccaggctggtcttgaactcctgacctyaagccaccctgcctcagcctcccaaagagctgggattacaagcatgagccaccacacttggcctctgtcaaaagctttttagagttccttgaaatcccttccttagagaataggtaaattttctctacttaacattttacccggttcccgaaaagtgatgaatcctgattctctgctggttggatatgtttcctgtatgcactctgaggaacgaacagtttgggttggatttcctatgattcagaactgggcctgggaggcgtaggttttgatcaggtccagagtgtcactggggaaacaagccatgatttcctcttgggtcatgtgcaggctgaactttgacagggtggtttatgcatagttcagagggagggtcgatgtgttgtggtagagtccagtcccactctctaaatagtgattagacagttgatcagccctcaggaagtctccctctccaggatgatgtgactgtgctagcaactttcattggttttgttcttgggtatattttatagttttgtttgctattatgtttcaattttttttttttttgagacgagtctcgctctgtcgcccaggctggagtgcagtggcacgatctcagctcactgcaagctccgcttcccgggttcagccattctcctgcctcagcctcttcgagtagctgggactacaggcgcccgccaccaggcctggctaatttttttttaatatttttagtagagacaggatttcaccatggtctcgatctcctgaccttgtgatctgcctgcctcggcctcccaaagtgctgggatcacaagcgtgagccactgtgccaagcctgtttcaatttttattcatcttattttttctatgattattgctgagttgaaacaactgtaattttgtatattaattttgtaaccattcagtcaccttattgaatttccgtatttgttttcatggcttttcagtggtttctcttgggtcttctaggaatgaggtcatctgcaaactaagaggtttattttttattgttttttaaattgacttctttgtgatagttctctctattattttatgcattgactagaaaaatgttaggtgatgatgataaatcttgccttgaacctgatttaatattaatgcttttgttataaaatgattaaataaaatattggttgtttattcattgaatgagtataggtttctgaccccttttgacctgtaataatttgtgtgattattccttggggactttgccttttcaccagttttttttctttaagaaatttttctttatcttaagctggaggcaagatgataaaaattcctgttaaccattccattacctggcagaatgtgggaggggaaggctagggaaggagctgggactgtgtatgcatttgtgtttgaagggtgaggaggctggtgctgagaaggatctttagtagggaaattctgtctgtcagaagcttctccactgaagttgtaaactaatgccccagaaccagttttcaggatttgtttctattattgacctttctctaaaaagggatgtgtaagtctagccttctgttggctgccactggttgcttaggtaggaaagttccttaccctttggagtgggagttacacccactgcaatgatgagcactgagatggtattgaaacattacaataaatgggtcaggcttccagggacagatcaataggaagactgagtctggaaatctgtggctgaccagagtgcatggcctattgctaggctggaaacaggagtccaagtgttaccagatcttttgatattttgagaaaggttaagcattcagatttgggtggagagatctctggatttttagatgttggcaactaattaaaaaagattatttttccaacagtgaggaccaaacgaaacatgtcagtgatgcccaatgggatggtcattttatgacctctgggattgggtgtctgtctggtatgactgtggtttctcttccagccctgcctcagcacatgctattgaactgaattagtgaaaggggctctaggcaaagcagattcctgtgttctcaatttgggcatattagtatttttgccacctaatttctgcaatcctgtgccatttttctaaagggaattgtgaatcagtcgcttggttatatccttaaacctttcattgtattatgtagcatctcaaatctttttctggtactgtttggagacagtattcttatactattgttttgcttttcaggcctcagaaatttatttttttttaaattgttgtattgatgtataattggcatacaataaactacatatatttaaagtgtgtaatttattaagttttgacgtatctatagacctgtgaacctttactaaaatcaagagtgaacatattcatcacccaataaagtttcctcatactcctgctttccaatgcctccctctgcccctttttgctcctgaaacttattcttaaaaaaagtcttgtttactttgggaggccaaggcaggttgattacctgaggtcaggagttcgagatcagcctggccaacatggtgaaaccctttctctactaaaaatacaaaaaattagccgagtgtggtggtgcatgcctaaaatcccagctacttgggaggctagggcaggagagtcgcttgaacctgggagacggaggttgcagtgagccaagatcatactattgcactccatcctggccaacaagagtgaaactccgtctcaaaaaaaaaaaaaacttatctatacctatgtatagggctcctttattttatttcatgtttttagagacagggtctctgccacccaggttggtgtgatcataggtcactgtagcctcaaccactacagctcaggtaatcctcccacctcagcctcctgagtagctgggaccacaaatgtgcatcaccatgcctggctaattttttttttaaatcgagacagggtctcgctctgttgtccasactggggtgcaatggcatgatcatggctcactgcagccttgatctcctgggcttaagtgatcctttcacctcagctctctaagtagctgggccacagacacatgctgccacacccagctaattttttaatttttgtagagatgggggtctcactatgttgcccaggctggkcttgaactcctgggctcaagctgtcctcctaccttggcctctgaaagtgttgggattacaggtgtgagccaccatgcctgaccaaggctcctttagagtgtatattgtccctcataccttcaggttttatggtcactcatacaatcactttggcaccatccattttatttttattttatttatttatttttaaaattaaattaaattttttttttttgagacgaagtctctgtcacccacgctggagtgcagtggtgcgttcctggctcgccacaacctctgcctcccaggttcaagcaattctcctgcctcagcctcctgagtagttggggttacaggcatgcgccaccaggcccagctaattctgttttatttttagtagagacagagtttcaccatgttggccaggctggtcttgaacacctgaccttaagtgatctacccgccttggcctcccaaagtgccgggattacaggtgtgagccaccgagcctggcccattttattttttttgaatttgaacagaatcctgacaatatttagagaactgctataatttaactttatagaaaggtgtaaaacattacttttcaggcaaagttgatgagaaaagcagtgcgaattaatgaaacataaattattaaaaagcttaaagtaggcaaaatatttttaatatttttaatttttatatctggagctatacagaataagaatactttaaatcaatatttttcagtgagggtggaatgctcttgacatctaggcaggataattcttgttcccctacctctaacctttccaaaatcctcaggaaggtggtacacttgttacacccattgtttaccatgatggtctgtcagatattaaagatagtggttaagagcatggtcttcacagtcagacagatccaggttcaaataccttctttaccatttactaactggattttggacatactacttaatgtctccaaactctattttctttatctgtaaagtaggaataacaataatacttactttatatggttgttgtatagattaaatgttattttgcattcaaagagtttagcctgatttctttccttctttctttcctttctttcctttctttctttctttccttccttccttctttctttctttctttctttccttcttttcttttcttttcttttcttttctttttttttcttttcttttcttttcttttcttttctttccttctttctttctttttttgaggcagagtctcgccctgttgcccaggctggagtgcaatggtgtgatcttggctcactgcaacctgtgcctcccgggttccagtgattctcctacctcagcctctgagtagctgggtttacaggtgcgcaccaccagtcctggctaatttttgtatttttagtagagatggggtttcacgatgttggtcaggctggtctcaaactcctgacctcgtgatccgcctgccttggcttcccaaagtactgggattacagacgtgagccaccgtgcccagccttagcctggtttctgacacatagaaagctgtgtcagaatttttagttagttgtttgaaaatttcagtgtcttttattatagaaataatgctataaatgaagttgtagtttggttttcagaaaactctgtaaaagtgtatttagcaccaaatacactgtactggttgatagtatattgtctgagtttctctaggattataagggggagccaaagaaggagaattctctcttcctttttcaagaggagccttgccaaaatgtttaccatcttttctttggcagcccataatctcagtgtttcatatcggctgcctctacactaattcaggaccatatagcttctcacctgaaccatttcaatggcctgacaactcttctccaattcattcaacacatttctgtcatggttaatcctttaagaagtatctttgtagaagtcccattttctatatgattttttttctttgtttcagtttgggctctctcttgtcacagaataatatagaaactccatcacagagtattccaggccccgcattgtggcttcctgctacctttctagcttcattgtctactctaattcatttcctttcacgctgtctccagagtcctaaaaatgaaggaaaagctattttgaagaataagtaagtaaacttttatcagcactagaaaacaaaaaaatgtatcatcaagggattataaagcttgatgaatttctgaaaggtagaaagaaggaaaaattggactgaagaaagaaaccagatcccaaagcagggtttagagaggactgtggtgaaaaagtggagggtaggggagcagaagggagggctccaagtgcagagattgtggatccaaatgcaattctgagttccttactctctgcttatataagttgtttagaagtaagcatattaagctaataagctttaattaaagcctcttttttacttaattttgggtaatcagttttacccttgatatctttatagtcactgcagtttttaagattctgtcttactctagccttcttagtttgcagaggtggttctttttatattaggaaaaatgtcaggagcaaatatgtgaattattaatgttctcctagagtcacactataatcacatggtcagtgcatgtttgtcatggtgaatcataaaaatacatctagaagccaaggtgttagagttgttttagttcatcaagactgacattgcataaatgagtccctaacattctttggacagaaagaatcccaggtggttctcctgcttttgtgccttcatggattcctagatctgctttctgttctagagagctgaaaaacattgtataatctcgaatttcaccttgtttttgagatgcaacctttgaggatatttttcagaaatttcatgtgtgtgtatgtgtgtgtgtgtgtgtgttttgagacagagtctcactctgtcacctaggctggagtacagtggcacgatctcgactcactgcaacctccggctcccaggttcaagtgattctcatgcctcagcctccccggtagctgggactacaggcatgcaccaccatgcctggctaacttttgcattattattattttttttggtagagagggggtgtcgccatgttggccaggctggtctcgaactcctgacctcaagcgatccgcccatctcagcctcccaaagtgttgggattacaggcgtgagccaccatgcccagcctgagtttttaatgttctttacctacacaactgaaaacagtagagaactttaagtctaatatatcaatcgaggcaaaagatttgcctgttttgtgctaccttatgatttctcactttgtattccctttgagccctatacttcttaagtgtcatcactttcatttcctgttttctactcattaaaaaaagggggaaaatrtgctaaagtattcacataattatataaacactaaagtacagacaaaaatggtggctgaggtgaaaatgatctgctggcaggcaatgccaccctgtagaagctcagaatgtcctgtcatcagctgatgaagaaatgtcctaaattggcaaagatagcaatttaagtatcttaatgtaacaattcataaatgtgtaggttatttaaaagtccagtgtataaaacttgagaattgcttgcatggattttatttctggagataatttgtgttgtggagaaattatatagacccagagaggtgtaattacagaagttgttttcataaatggagattttgatgcagatctagataactagttgcgattctgctgcgattgctaaatatttgatttttacttaaatttaattattcactttaaatttattttactaaatcaatttagtttaatttacttcactacttaatttttgcttaacttttattcttcttccactaatttacctttaaaatgtttacatctacttatgtttttaaagtcttcacaagacccactttaccagtttagttctcagtttctttgtttgtgatatgatggtgcagttactaaattgttaatggtgctaaggtcagtgcttaggtgctggagtgcagtgcagtggagtgatcatggctcactgcagccttgacttcctgggctgaagggatcttcctgtctcagcctccccgagtagttgggactacaggtatgtaccaccacacctggctatttttaaattttttttgtagagatggggtcacactatgttgcccaggctggtctcgaactcctggcctcaagcgatcctcccaccttggcttcccaaagtgctgggattacaggtgtgagctactgtgcctggctatgcctagttgtcattaattgccaggccatgctctagactccagggcccatggcctctagtggttgcttttcaaagaagcacatcaaaaggactatgcatcaatagcaaatggcaatcatatgctgaaggtaggttaagtttgcaactgaaagtaaaatttgtagacggaatatcatagtggttaagaccttggcctttggaactgtttagaactgggttaaatcctagatatgacttgtatcctcatgcaagttattttttctttcacatccttagtttttacatctagcaaatgtgaataataacagttaccatgtacatgattataaggataatgagaaaacaaatatgaaagtacttagcagagtacctgatatacaggaagcattcaatatatcttaacctataaaaagtaataagaagtgaatgtgcacatgaaggctgccagtctcgtgtctgccagcatccctctgacaccagtgctggtgcacacacacacatggatgccagtgaccctaccccctcaccctgtgccaccattgtgaacattcacatggaggccatcagccctgcaccctccagtccccagccacatctaacaagtatgcaccctgccacactgctgttgctactagtacgtgcaaatgaacacagatcccactgccaccgcccaacgaaggactttggttggcatcacccattggagtgttgtggccagtggtctgggaacaccttggctcctccagtgcagcaggttcataaccttgtggggccagagaacaaagctgagggcccaatacccaacccctcagaattagagcacacagctcaggagggctgaggtgagccttggccccctaaaatcttccagattgaaggaacatcaggccacacaggtgagaaagaactagtgtaagaactatggcaactcaaaaagccagagttgtcttcttacctccaaacaactgcactagttccccagcaatggttcttaactaggcttaaatgacagaaatataattcagaatacggataggaatgacgatcattgagattcagaaggaaattgaaacccaatttaaggattcttagaaacacaataaaataatacaggaggtgatagaagaaatggccatttttaagaaagaaccaaactgatctgatagagctaaagaactcacctcaaggatttcagaatacaattgtaagtattaacagcagaatcgaccaagctgaggaaagaatctaagagcttgaagactggttcttcaaaataactcaattagataaacaaaacaaaacaaaaataaagaagaatgtacaaaacctttgaaaaatatagagttatgtaaagagatcacccctgtgactcattggtatccctgaaagagagggagagaaagcaaacaacttggaaaacgtatttcaggatatcgtccatgcaaatttctccaaccttgctggagagaccaacactgtatttcaggaaatgcagagaacccctgcaaaatactacacaagaacaccatccccaacacatagtaatcagattccccaaggttgaaatgaaagacaatattttaaaggcagctagagagaaggggcagatcacctaaaaagggaaccccatcaggttaacagcagacctttcagcagaaaccctacaagccagaggagtttgagggcctatattcagcatttttgaagaaaagaatttataatcaagaatttcttattcagccaaactaagtttcataagtgaaggagaaataagatcctttccagacaagcaaatgctaagggaattcattaccaccaaacctgcattacaagaggtgctgaggaagggctaaatatggaaaggaaagactgttactggccactataaaaacacacttaagtacatagaccagtgacactataaagcaaccacacaaacaagtctgcataataaccagctaacaacatgataacattgatcaaatccacatatatcaatatgaaccatgaatgtagacaggctaaatgccccaattaaaaggcacagagtggcaagttgggtaaagaagcaagacccaactgtgtgctgtcttcaagagacccatctcacatgcagtgacatccataggctcaaagtaaagggatgaagaaaaatctaccgagaaaatggaaaacagaaaaaagcaggggttgctattctaatttcagacaaaactgactttaaaccaacaaagataaaaaatgacaaagaaggatattacataatggtaaagggcacagttcaacaagaggacctaaatatccaaaatatgtaagtacccacacaggagcacccagattcataaagcaagttcttaaagacctacaaagagacttagataaccacacaataatagcaggagactttaacaccccattgacagtattagattgttgaggcagaaamctaccaaatatttgggacctgaactcaacacttgacaaagcagaccaaaagacatctacagaatgctgtacccagaaacaacagactatacattcttctgcatatggcatatactctgaaattcaccacacactcagacataaaaaaatcctcagccaaaaaaaaaaaaaaaagcagaaacccacaaaatcataccaaccacactcttagactacagcataataaaaatagaaatcaatgccaagaatatcactaaaaaacatacaattaatggaaattaacctgctcctgaatgactgggtaaataatgaaattaaggcagaaatcaagacattctttgaaactattgagaacaaagatataacataccagaatatctgggacacagctaaagcagtgataagagggaagtttacagccctaaatgcccacatcaaaaagttagaaagatctcaaataaacaacctaacatcccaactagaggaactagagaaacaagagaagaccaaccccaaagctagcagaagatagaaataaccaaaatcagagctgaactgaaggaaattgagatgcaaaaaaagccatacaaaagatcagcaaatctaagaattggttttttgaaggaattaataagataggtagactgctagctagactaataaagaaaaaagagagaagatccaaataaacagagtcagaaatgacaaaggggacattaccattgaccacacagaaatacaaaaaaaaaatcccgcagacactactacaaacacctctgcacacaagctagaaaccctgcaagaaatggataaattcctggaaacatacgacttcccaagactgaaccaggaagaaattgaacagatcaataatgagttctgaaattgaatcagtaataaaaagtttaccaaccagtaaaagcccaggaccagatggattcacagctgaattctagatgtgtaaagaagaactggtactattcctcttgaaattattccaaaaacttgaggagaagagaacaacaaaaaaataaaacttccaggccaatatccttgatgaacattgatgtaaaaatcctcaacaaaatactggcaaaccacatccagcagcacatcaaaaagctaatctgccatgattaggtaggttttatccctaggatgcaaggttggttcagcatatgcaaatcaataaatgtgatttgacacacaaacaaactaaaaaaacccaaaaccacatgattatctcaatagatgcagaagaccttttgatacaattcaacatttcttcatattaaaaaccctcaacaaactaggcactgaaggaacatacttcaaaataatgagagccatctacgacaaacccacagccaacatcatactaaataggcacaagctgaaagcttccccttaaaaaccagaacaagggaaggatgccctctctcatcactcctattgaacatagtactggaagtcctggccagagcaatcaggtaagaaaaagaaagaaagagcatccagataggaagagaggaagttgaactattgctgtttgtagataatatgattctataccaagaaaaccctatggtctctgcccaaaagctcctagatctaataaacaacttcaccaaagtttcaggatacaaaatcaatgtacaaaaatcagtagcatttcttttttttgtttgtttttgagatggagtctctgtcgcccaggctggagtgcagtggcacaatctcggctcactgcaaccccgtcctcccaggttcaagtgattctcctgcctcagcctcctgcatagctgggattacaggcacctgccatcatgcccagctaatttttgtattttcagtagagatggggtttcaccatgttggctaccctggtcttgaactcgtgaccacaggtgatctgctcgccttggcctcccaaaatgctggaattacaggtgtgagccactgcacccggccaaaaatcagtagcatttctatgcaccaacaatatccaagctgagagccaaatcaagaatgcagtcccattcacaggagccacaaaaaagagtaaaatacctaggaatacagctaactagggaggtaaatgagctctaccatgagaattagaaaacactgttcaaataaatcagaaattacacaaacaaatggaaaaatattccatgctcatggataggaagaaataacattgttaaaatggccatactgcccaaagcaatgtacagattcaatactattcctgtcagtctactatcttcctatcaatctacaatgacattcttcagagaattagaaaaaacagttttaaaattcatatggaaccaaaaagagcccaaatagctaaggcaatactaagcaaaaagaacaaagctggaggcatcccattacccaacttcaaactatactatgaggctacagtaaccaaaatagcatggtactggtacaaaagcagacacaaagaccaatgaaacagaatggagaacccagaaacaaggccacacatatacaaccatctgatcttcaagaaagttgacaaaaacaagcaatagggaaaggactccctattcaataaatgatgtgggataactggcctgccatatgcagagaattgaaacaggaccccttacaccatataaaaaatcgactcaagatcgattaaagacttaaaagcaaaaactataaaaactctggatgatagcctaggaaatattattttggacgtagaactgggcaaagattttatgatgaagatgccaaaagcaattgcaacaaaaasaaaaattgacaaatgggaactaattaaacaagagtttctgtacagcaaaagaaactatcaacagagtaaacagacaatctacagaatgggagaaaatgtttgcaaactatgcatctgacaaaggtctaatatccggagtctataaggaatttaaacaaattaacaagcaaaaaacccaatcccattaaaaagtaggcaaaggacatgaacagacacttctcaaaagaagaagacatgcacatcgccaagaagcatatgaggaaacactcaacatcactaatcattagagaaatgtaaatcaaaaccacaatgagataccatctcccaccagtcagaatggctattattaaaaagtcaaaaaataacagatgctggtgaggttgaagagaaaagggaatacttatacactgctggtgggaatgtaaattagttcagccattgtggaaagcagtttggcaattttccaaagaactcaaagcagaattaccatttgacgcagcaatcccaatatcaggattccaaatatattccaaaggaatataaatcattctgccataaacacatgaatgcatatgttcatggcagcacttttcacaataacagagacatagaatcctaaatgcccatcaacagtagactggataaagaaagcatgatacacatacactatggaatacttatgtagccataaaaaaagaaaaagatcatgtcttttgcagcaacatggatggaactagagggcattatcctaagtgaagtaacacaggaacagaaaaccaaatactacatgttctcacttataagtaggggctaaacattgagtacatatggacacaaagagggcaacaacagacactgggttctatgtgaaggtggagggagagaggagggtgaggatccggaaaccactcattgggtactgtgcttataacctgggtgatgaaataatctgtgtaccaaacccctgtgacatgctatttacktatataaaaaaacctacacaggtacccctgaacctaaagtaaaagtatttttaaaaaagtaaaactacctatcggatactatgcttatcactttggtggcaaaataatgtgtacaccagacccctgtgacatgcagtttacctatacaacaaacctgctcttgtaccccgaacctaaaataaaagttcaaaaaaacgagaaaaaaattatttcacgtgacctaagaacacagtattttgactatccttaatgggatttaattgaaggataaatagtgctataaagaaattgtaagctttaaaaaataacctggttgttaatagtactctcaatatcttatgcttttgtgattgttttatacctattttacaaaaatgcaaataagtacttatgtatttatgttaaggtcatcaggagccaagatttacaatgtaagataaaagtgattagtagaaaatcaaagaaattaaagtaccgtaatattaatctgcactggaaatatcagtaggaatgcaaactacatattttctagctttgtctactgaagtgcccagattgtgatctataaataccatttcccacaaaaaggaggcagaatttcttgcaggaatggctgactccaggtctgagggaagaagtgtacaaactccaggtctgagggaagaagtgtacaaactgagcctgggttttcttattgactaaccagaatgcaaagaaatcaaagacaagttagctagtgtggtcttgttaaaaggacctaagaattaacattaagaggcttccattggtcaaagataagacaatttgagtaccataaataacaatggatgtaattgtttgaaacacatgtatcttaaaaaaccatgtattcataatgttagagagaaaaagagcagaatagccttccaatccaacccattgaacatcattggaagtttataggacatcaactccttggtatgaacattggtaatcaaatggaaagaaataagtattacctttttcttacatgacctatttcatggtaaccaaatagcctgatttgatgagggaaagtccttctcccacaattttatctaataaatataaaaggatagtagaggctgggaatggtggctcatgcctgtaatcgcagcactttgggaggccaaggcaggcggatcacttgaggtcaggagtttgagactagcctgaccaatatggtgaaatcccatctctactcaaaatacaaaaagtagctggtcattgtagtgggggcacctgtaatcccagctactgagacaggagaatcacttgaagccgggaggtggaggttgcagtgagccgagattgtgctactgcattccagcctgctctgtcgcccagaacaagactccgtctcaaaaaaaaaagtatggtaaaattaaaaaattatcactttaagcccctaatgaaatgaattaggcaacaataattggtggatgaaacagttagatgaaaggttgagggggaatttacaaaggagagattgagctattactacctgagcctagtgatcagtctttgcattactaaaaatgggggaaccagatatgatacactttctgaagttttataacatgaatcacagagtaccctgtatgaagtatttgcgtccccgaagttgaatctgaatagaatcagttataggaaatcaggagatggagaaccaaggtaattgacactatgggaagcaaacacaacaatccatgaatctaaaggacacctgaccctatttcttcaaaaagtcaatgttaggataaagaagtgaggagaaggactgtgtctcaaatttctaggattaaacactgggttttttgtttttgttgtttgtttgttttttaatatcctatccaggcagcaaccagtaagtggtcctagggtgcatgacgagtatgcagttcaggtcacgtgtgactcacggtgagtctgacgactgccagctggttcagtgagatgagtccactcatcatgcacttggatgtcttgacagtgtcaacttgctatgaacgtttctaagtgctcactttccttttctgtatttatcttgttgacccgtaacaaagagttgaggaccagtaaacagtttttggactggtaacaattaattctcaaaatggcaccaattgaaaaatcacacttgagtagcactaccctagattaaaagaaattcaagagatataccctaatgtaatatttgaacttatctggaccctgactcaaacaaatcaactgtaaaaggactttttttgagttgattagtgatatttgattatggactcatgtataaaatgataccaaggagtatagctaaataaaacaaaaacaaccaaataaatagggatagatgaagcaaatgtggcaaaatcttcaaatgtgttgaatatggatgatgtgtttatgggtttgattttggtactattctctttactttttttgtatgttacatatatgcttccttttgtctcacaacaatttactcatgttttctaaacttaatttataattattcttgttttcttttgttttgttttttgagatagagtctcactctttcgccgaggctggagtgcagtggcactgtgtcggctcactgcaacctctgtctcctaggttcaggcaattctcctgcctcagcctcccgagtagctgggattacaggcatccaccaccacgcccagctagtttttatatttttaatagagacggggtttcaccatgttggccaggctagtcttgaactcctgacctcgggtgatccgcctgcctgtgcctcccaaagtgctgggattacaggcgtgagccaccgcacatttataattattctttttgggatttgtgcaacattgaaactctaccttgctttctagaaattttgttttgtttgatttttgtgtttcagtttaggatctcagttttcagttctgtgattccacctttcataagtgattgataaaataatttcctatagattttcagcttccttctctcacttttgtatagcagaaacaggaagagagaacgttcagattgaaaacaaaatatcctactttcttgagattatattttatacaattaatactagatcattttgtgtgttagtctttcagaagaattaaagagcctcttctctctgttaatcccttgtctcttctaaacatacttgattataatttgaagtatacgtggcaacataccagaaatattttatctccattacagtttaggaaccgcttattgaaagggcttgtttgctaatttatatatagtaaaaattttaaatttcattttattctgagtataaatttaaactgatttttatgatttcttcttttcagtagcttttctctttcatattactttccttaaaaccctttgccattatgctaatacattaaattcatatttttaaaatggattctaaaaatctccatattttactgtatttcatctctgagtacaaagcccaccatggaccttcccatcatttttgttgtcctgctgaatttcttactttgtttatttgcacagcagatctttatttttaaatgtcttattatgaaacatttcaagcatacaaaagtaaagagaatagtataatgaattcccgcatacccatcacctagcttccacaattatcgactcacagccagagatggtgtttcaaagcatctgtggcatatatgaagtgatgtaatatatttcaacctaattaacttagctttctttattttccccatatgtattcaaattataggctgttcatgtgtgctctgtacgtttataattatatattaaaattaatgaatgaattcaagaaaagactctaaagccatgaaatattgtttctataaatttttatatagttttaaaaattgtggtaaaatgcacataatgtaaatttaccatcttaaccactttaagtatacagtacggtagtgttaagtgcattcatattgttgtgcaaccaaactccagaatccccacagcccctggcaactccccttctactttctatctttatgaatttgattactctagttatctcaggtaagtagaatcatacagtatttgtatttattttattttattttttgagacagagtctcgctctgtcaccaggctggaatgcggtggcatgatctcggctcactgcaacctctgcctcctaggttcaagtgattctcctgcctcagcctcccgagtagctggggctacaggtgcgtgccaccatgcccagctaatttttgtatttttagtagagatggggttttaccatgttggccaaggtggtcttgatctcttgacctcgtgatctgcccacctcagcctcccacagtatttgtcttttaatgactggcttatttcatttagcataatgtcctcaaggttcattcattatttctacaaattttgatttacaattttatgaaggaaacagctaaagagagaatttggagtgaatttctattagatgatgacttcttgaattacatagcctcgttctattaggagattacatttttatttctgaaatacattattaaacagtattaaaaatgctttccatgtgtatttgacaagagtagttttcaccatgtctcacatttgctaatataaacccaactgaatatttctatcagaatataatcaaattagagagtaagtaatagaattcatattttattttatttgagacagggccttgctctgtcacccaggctggagtgcaacagtgcaatttcggttcactgcagtctccgcctactgggctcaagtgatcttcccacctcagccgcctgtgtagctgggactataggtgtataccaccacagttggctaattttgtaatttttttgtagagatgaggtctcactgtattgcccatgctggtatcaaactcctgggctcaagtgatcctcctgcctgggcctcccaaagtgttaacgattacagccatgaaccactgtgacaggctggaattcatatttttaaatacaattactttactttgcctacccatttacttttgtgtcatatatatatatgcacacacatatatatatttgttggaaataattatttatttttacttcaaaggtgaaatattaagtatccacttaaaattttaatctttataaagacaatatgcttatatagattctttcctaaaatttagttacaattttaaggttcactaaaagaaatagatatttctcacaggttttttaagaataatattgctttatttgagtgacaaataaatacatttgttgttgtgaaatactttttgactaacatttattcttccagtttaccttatagatctttccatatctccttattaatcctttttaggggggtcatgagcatgttactgctgtggttttagtgtaatactgtatttgtttaagtcatctgctgtgagttaatgaaatatcatttctagctccagatgtcactagataaagattaaatatattgcattcatataatctcttgatgaagctagagtagatttttttttctttaccttaggagattaggagaaaaatgcacttggagcagtaggctgtgtttttgtaataaacactaaatcctagtcagttatactagatttttccattcataatttattgagtgttatgatttgtcacttaagcatatgcaaatcttaagcaataatttcaagaagaacaggttgtatcacttgtgaattaaatacctttgaatactatttttaaagattatcaaaactatctgagaaggaaagctataatacttcacaaatttataaatgaaaaattttaaaatgatagtaattgtgcaagtttaacaaataagagcacatgcctggttaacagtgatgttttagttcagctgtatttcaaaaagccttgtaggaagttatctttacactggtgagtttatcaagcccaggatctgaccctcagctttttgggttcagatggaatggaatggagctgtctcccaaaaacagactcacattaaacagtgtcaaaggacagattatgtctatatctaatctgacttatatatactagacatatatattttatttgtttattacatttatatatgattggatgtatatcagaatcaaatgtattaatttataataagtagaattgtcaaatgaactgaaatcaccatctcagcatgatagctcatttttgttttgtaggtgaacaaaaccataatcgtatgaacctagaatgagttcaaattttttctcatagttgcataaatggaatatttaatggcataatctaaacgtggcattagtacatcttgctccacagtatgggtagtcttaccattgaggccaaattgtttaaagggtgtacggttaaaagactctttctcctgaacagtgtagtggacactgctgatgtttgtttcactgatctaattttttaaagtattaattactgattaattgctcttttggttgccattgagttccagttaaatcttgcaggctagggaaccattttttttctcgttaaggtaatttgcctatatcctctgatctatgatgagttaatttcatctttaactcagaaagagttttcttatatatatatattttttgttatttagtttttatttcataatcataaacttaactctgcaatccagctaggcatgggagggaacaaggaaaacatggaacccaaagggaactgcagcgagagcacaaagattctaggatactgcgagcaaatgggatggaggggtgctctcctgagctacagaaggaatggtctggtggttaagataaaacacaagtcaaacttattcgagttgtccacagtcagcaatggtgatcttcttgctggtcttgccattcctggacccaaagcactccatgacctccacaatattcatgccttctttcactttgccacagatcacatgcatgccatccaaccactcagtcttggcagtgcagatgaaaaactgggagccatttgtgttgggtccagcatttgccatggacaagatgccaggacctgtatgctttaggatgaagttctcatcttcaaatttctccccatagatggacttgccactagtgccattatggcgtgtgaagtcaccaccctgacacataaaccctggaataattctgtgaaagcaggaacccttataaccaaatcctttctctccagtgctcagagcatgaaaattttctgctgtctttgggaccttgtcagctaacagctcaaaggagacgcggcccaagggctcgccatcgacggcaatgtcgaagaacacggtggggttgaccatggctaatagyacacagttttcctcggcggcgtcatctgcaaagccgctttcttatatttcttgtcctcaaggtcttggagaatgtttccaagtacagacaaaattctgattatgaatatctgtaaaaatggaggggaaaaataaccaattatttcacttccttaatacaattgtgattattttggctaattcccctcatatgtggggaatttcgttttggtacctgtactcttaattagataaataagtgttgctatgttttccaattgggattttgatggctgtccttttaaatttataaatttggagtgaaattatgtatctataatgttgtcttcccttttaggaacatgctaggtgttcactttttaaagtcttcagtgaagtttgaaattcacggtttgaatggggctttaattaattaattaactaatttctttaagtcgatccatgataggataaaatagcgatagatttagctttatttagagagactgggttttccccattttaaggtctaaggttattgctgatatgcaggtaagatattgattttactaggtatattttgtaactggttaccttactgaactaacactaggtctaatagtataaaaagtaattctttggtgctttccatgtcatctgatataatgaaaatatggtttcttttccaatatttatggcttcattttggtcatattgtattaaagcttccagaacaagttgtgcactatagcagcaattgcttgtgttctagttttacagcattctttttatgcacacagtgttcctgtgagtgtataggacagtcttattttctttattttacataaagatagtttaagtaaataaataaacttagcaccaaggtaacaattgacttgtccaacttggagctaaaactgaaatagaaacccaggtctttggaccactgcgttcccatatttctgtatgctacttatcgttttctaagtaataaattttatacaaagtttaattatgtaagcagtctcatggattaaagttctataaatctcaaactcaacatgattaaaactgagctgatcattttttgccctcaatatccactgctccttctgaattctttttttttctagatggctccaccaacctccgactcaggccatgaccctgaaggttttacattcctctgcctcaatacatatactgaatggatcattacatcaatttattccatctttaaaaatctctcaagttggcttacctctgccctccttgcccatcaccattctttttgttcaggctatcattatttctgctctttgtctctaatcttgccctctgccaacctgcctctaagcctgccaaggtgatcttataaaatgcaattccactccattactctctggttaaaatcctttagtgattcttcattattcaggatatagttcagtctccttagctaagcacgcaaaactcttgcttaaaaaagattattcttttgagcctggctttgttctctcaacgttacatttgtgcatagcttaattgctgatgattggtcagaggttatgctcaaacacctggagccagtaggcttctccacttcctgatggttctgtgtgggttggggagcacattcgaagtttaggcagtgttcaagtctgccctgtcttttagtttcaaccatgtcctctgcgtctacacaaagcctcctcatcagccaggatgtgtggacagcttgggtccccttagcttcccctacacatgtgagtggaaggctgccagggttgtgtgtagtttctcaagcttctctgtaatccttcatttccagaatctccctattactattcctattatggtgctggttggttggttgcttgtgccaactgggatgactactacctcaggcttgctacagagattgctacttttactgatgatgctgctggatggcatattttcattttcagcttcagatcagttgagcctctctggcagtaaggctgctggtttcacagcctgtggtcctggtagaaccaccatactgaccctctgggagggatgggagcaacctcagggaggaatgccacagactcccactgttcttgcctgaatttcaacagtttttcatgaataagtgcttcttaatatgttatttgcctttggttgattcccagttccctgaaatggttgtttttaacaattttgttcagtttcaaagttgttttttgaaggggatttgtagtcctgcctcccgaggccacatggttttaatttgcattttctaaaaactagctcatttgagcatcttttcatatgtttattagttatttggtactttcttttgtgatttttatggctgtcttttgcccataataactacatatttttttagattgaatctatgcatcacttaacttcacataggcaaccctgacctcccaagtttggcttagatccactcctctgtgtttccatacaattggtgtacaattctgtatggtggtcatctatatacttggctaattccccatagtagtctgagagctccttgacagcaagcactatgtttttgtttttactgtttttttttgagacagggtctcactgtgtcatccaggctggatgcagtagtgcagtctcggttcattgcaacctccacctccgaggttaaagtgattctcccacctcagcctctcgagtagctagaattacagtcatgtgccaccatgcctggttaatttttgtattctttaattagagacagggtttcaccatgatggccaagctggtcttgaactcctgacctcaagcgatcygccttccgtggcttcccatagtgttaggattacaggggtgatccattgtatcattctttcattcttttttttttttttttgagatggagtctcgccctgttgccaggctggagtgcagtggcacaatcttggctcactgcaacctgcacctcccgggttccagtgattctcctgcctcagcctcccgagtagttgggactacaggcacacaccaccacgcccggccaatttttgtgttttttagtaaagacgggttttcaccatattggccaggctggtcttgggtgtgatctgcccgccttggcctcccaaagtgytgggagtacatgggtgagccaccgcatccggcccattgtatcattcttatgcctttgactcctcataccttakctcccacttgtgagtgagaacatacgatgtttggttttgcatttctgagttacttcacttataataatggtctccaattccacccagcttgctgcaaatgccattattttgttcctttttatgactgagtagtatttgggctggtttcatatttttgcaattgcaaattgtgctgctttgagggtgtgtgcgagtatctttttcatagaatgacttcttttcctctgagtagatacccaggttgctgcatcaaatggtagatctacttttagttctttaaggaatccccacacgttttccatagtggttgtactatcttaaattcccatcaacagtgtaaaagtgttcccttttcaccacatccacaccaacatctatttttttttgattttttgattatggccattttgcaggagtgaggtggtattgcattgtggttttgatttacatttccctgataactagtgatgtagagcattttttcatatgtttgttggccatttgtatatcttcttttgagaattgtctattcatgtccttagcccactttttgatgggattgtttttttttcttgctgatttgtttgagttccttgtagattctggatattagtcatttgtcatatttacagattgtgaattttagatctatcctgctttctcttgcgggcatttagtgctataaatttctctctacacactgctttaaatgtgtcccagagattctggtatgttgtgtctttgttcttgttggtttcaaagaacatctttatttctgccttcatttagttatgtacccagtagtcattcaggagcaggttgttcagtttccatgtagttgagcagttttgagtgagtttcttaatcctgagttctagtttgattgcactgtggtctgagagacagtttgttataatttgtgttcttttacatttgctgaggagtgctttacttccaactatgtggtcaattttggaataagtgcgatgtggtgctgagaagaatgtatattctgttgatttggggtggagagttctgtagatgtctattaggtccacttggtgcagagctgagttcaattcctgggtatccttgttaactttctgtctcgttgatctgtctaatgttgacagtggagtgttaaagtctcccattattattgtgtgggagtctaagtctctttgtaggtctctaaggacttgctttatgaatctgggtgctcctgtattgggtgcctatatatttaggatagatagctcttcttgttgaattgatccctttaccattatgtaatgtccttctttgtctcttttgatctttgttggtttaaagtctgttttatccgagactaggattgcaatccctgcctgtttttgttttccattttcttggtagatcttcctccatccctttattttgagcctatgtgtgtctctgcacgtgagatgggtctcctgaatacagcacactgatgggccttgactctatccaatttgccagtctgtgtcttttaattggagcatttagcccatttacatttaaggttaatactgttatgtgtgaatttgatcctgtcattatgatgttagctggtgattttgctcgttagttgatgcagtttcttcctagccttgacggtctttacaatttggcaagtttttgcagcagctggtaccggttgttcctttccatgtttagtgcttccttcaggagctcttttagggcaggcctggtggtgacaaaatctctcagcatttgcttgtctgtaargtatttatttctccttcacttatgaagcttagtttggctggatatgtgattctgggttggaaattctcttctttaagaatgttgaatattggcctccactctctcctggcttgtagagtttctgctgagagatccactgttagtctgatgggcttccctttgtgggtaacccgacctttctgtctggctgcccttaatattttttccttcatttcaactttggtgaatctgacaatgatgtgttgtggagttgctcttctcgaggagtatctttgtggcattctctgtatttcctgaatttgaatattggcctgccttgctaggttggggaagttctcctggataatatcctgaagagtgttttccagcttggttccattctccccgtcactttcaggtacacctatcagacgtagatttggtcttttcacatagtcccatatttcttggaggctttgttcgtgtctttttattcttttttctctaaacttctcttctcgcttcaattcattcatttgatcttccatcactgataccctttcttccagttgatcgaatcagctactgaagcttgtgcattcatcatatagttctcatgccatggttttcagctccattaggccatttaagtacttctctacattggttattccagttagccattcatctaatctgttttcaaggtttttagcttctttgtgatgggttcgaacttcctcctttagctcagagaagtttgatcatctgaagacttcttctctcaacttgtcaaagtcattctccgtctagctttgttccattgctggtgaggagctgcgttcctttggaggagaggcactctgattttcagaattttcagtttttctgtgctgttttttccccatcttcatggttttatctacctttggtctttgatgatggtgacgtacagatggggttttggatagattgtgaagattttctcccagtctgtgggttgtctgtttactctgctgattatttcttttgctgtgcataagctttttaaattgtctcgtctatttatctttgtttttgatgcattttcttttgggttcttggtcattaaatctttgtctaaggcattgtctagaagggtttttccaatgttctggaattttttatggtttcaggtcttgaatttaagtctttgatccatctttagttgatttttgtataaggtgagagagaggcgaggatccactttgattcttttacatgtggcttgccgattatcccagcaccatttgttgaatagggtgtcctttccccactttattttgtttgctttgttggagatcagttgactctaagtatttggctttatttctgggttctctgtgctgttctgttggtctrtaggcttattttttacgagttccatgctgttttggtgactrtggctttatagtatagtttgaagtcaagaaatgtaatgcctccagatttgttctttctgtttagtcttgctttagctatgtaggctcttttttggttccatatgaattttaggattgttattttccagttctgtaaagaatgatggtggtattttgatgggaattgcactgaatttgtagattgcttttggcagtgtggtcattttctttctttctttttttttttttgagatggagtcttgctctgttgcccaggctggagtgcagtggcatgatctcagctcaccgcaagctctgcctcccaggttcacaccattctcctgcctcagcctcccaagtagctgggactgtaggcgcctgccaccacgcctggctaattttttgtatttttttagtagagacagggtttcaccgtgttagccaggatggtctcgagctcctgacctcgtgatccgcgcaccttagcctcccacagtgcctggattacaggcgtgagccactgcgcccagccccagcagtttggtcatttttataatatcaattcaacccctccaagagcgtgggatgtgtttctacttgtttgtgttgtctatgatttatctcagcagtgttttatagttttccttgtagagatctttcacctccttggttaagcatattcctaagtattttatctctttttttttttttgcggctattgtaaaaggggttgagttcttgatttgattctcagcttggctgctgttggtgtatagcagggctgttgatttgcgtatgttgattttgtatcctgaaactttgctgaattcatttaccagttctaggagctttttggatgagtctttagggtatacgataatgtccttagcaaacagtgacagtttgatgtcctctttactgatttggatgccctttatttctttctcttgtctgattgctctgactaggactttcagtactatgttaaatagaagtgatgaaagtgggcatccttgtcttgttccaattctcagggggaatgctttcaacttttccttattcagtataatgttggctgtgggtttgtcatagatggcttttttaccttaagatatgtcccttctatgctggttttgctgagggttttaatcataaagggatgctggattctgtcaaatgcttaacaaaaactatttgttttagaagaatttaagtagtaaaatttcttttcttatggaatgatccattgggtccaatattattattaatgttaccagtgatatctaggctgctaaactcacaggtaaattatttgatcttctagcatcacttgacaggattgatcattctttcctccttgatatactttcttcaattggtgtccttactctcttagttcaccttctatattactctttattccttttcagtctcctttgctgtttctttattttttccccacagtctcataatattagtgcccatgagcagtcctatgtcttattctcatctctagctagtctcatgaccatggaggtctcatcatttaaattccatccaaatgctaattactcctaaatgtatatcctctgcccagatgtctctcccttaaggccaacttcttgacacttctactttgatggattcacttagatcccgaagctaacatgtccagaattaaactcctagtctccccgctcccaaacttgttcacctactaccacccaaaccagccctctttgaattgatgacaactccatccttccagttgctcaagctactggaactatctttaactcctttattttttttacaccccacatctaatccattaggaaatcctgcttgttcccttttcataatatccagaatcataccatctgtcatcatcttccctgctaccaccctggtataaactatcgtcaactcttactaggattaccttcctaatgatctgactgttttcactcttgccttcctatgacataactcttaaaatacaagtcagattgtgtcacttctcaactcagattaaaagccaaaatatttacaatacaccataaactgtgcagtttgcttccttctccactttcttactcccctgatttcacctcctatttttctttctttcatcacaactgtccaggcacgctgaccttgctgttctttaaacactccagacaaacactgccaccctggggcctctgaactgactggcccctctgtctagaacactcttcttccagatatagctaagtcatccaggtcctttgtgtggttgctcacatgccacctccttaatgaggcctccctgcctgccctgtgcaacatttcaaaccatctgctagccactggcttgcctatctgacagcctcactctggcactcctgcttcccttttcctactctgctttttttcatactgctattttcgtcttcttacatactatttaatgtacttatttattatgtttattgtttaatatctctctttctttgcccagtctgtgaaggtaggaatctttgtttaatttgttgatatgcccaaagcaactagaatatctctgagtatatagtaagcacaaaaacaaagttttgttaaatgagtgagtgagtatctgattttccagaaaaaaataaaattcacaatttgtctgaagaattttattagacaaaagttttatttgaaaaattttgagaaattaaaaaacaagtcagtattccttttttatcccttaattgatgaattaggatccatgaaaacaccataacatttacataaaaagttaataaatataattcaaataacctcttcagggcagtctttttaataaaaccagcatttcagtaaaaatggatttttttctataatgatatgcagcatagtagaatttaatgcatattttagatttaaaaataaccatgtaacagtgtgttgagtgggacctttttatcttgttccagaattgcagctaaagcctcaagctgaagacaaaagactctaagtaactaattttctatatttggattgctatgaataatctactagccactggggccagaaatctgcctacagagactgccctggggaaccattcctgaagaactgagaacctccaccccgatatgagaatgagtttcggcaaagggggagtgcagtgttcttaatgaaaaaccactctctcctctcccagtgcctctcttccctcttcaaataaccacttgtaatgagtttggggtacctacagatggggagggagggaggagtggtcatttcattgcttagttgggtgtttgcttagctgctgatttgctcatctgctcttttctgcctgagcagaggtacagggagttgagaacaatagtggggctatggaggggttagtgttcaacctgtttaatatgatcacttcaaagagtagccaggcttgacctattttatctcttgtcctgttctagaaggctgatagtcaggtaaagggacctcagcagttgtagaagggggatggtgactgcctggattagggaagtgtgccaggggttggtctccctgcaggcgcctctgaagcgcccatgcagtcaccccatgggggagttagcagctgtgtgtctgccacgtggagagatattgacaaccagggagtgtcacagaagcaacagcaaacaagaagaggactgtgactgcatccagttaaaccagtcgatgtccctccttccagtttttaagccatgggctcctagaagtagtgaggggcaggaggcttttctgagtaagagcatgcttcattttgagaagcttattcaagctgctgaggttatgggttgaactacagggagaaaagggcttcaaattgattttgagacaagtcttcagagtaacaaaactaatagtaggattgagtcttaattatctggagaaggatagagttctaataattggaagcatctaaaaagttacggactgggaccaagttgtttttaagcatccctaatatatcggtgagatattgctacataataaaccattccaaacgtagtgacttaaaacaaccatttattatttctcggaagtctgcaaattgactggacagttttgctgatctgtgacaagttcagctgatgtgcacagggcttgcttatgcatgtgctgtcaactgagggttggctgggggctggcctaggatggcctcagttgggatgattctgcttggttccatgttctggcaggccagcctgagcttgttctcatggtggtggtaagggtctgaagagagaaagtagaaatactcaagtacttttttagacctctacttgagcttttcaaagaggccacattcagagttattgcgagaaggcaataccaaaggacatggatatagggagagaaaaattgaggtcattaatgaaatcagtctgccacaattaccaggtacaaaaggggattccacataggaatgttaaggacaattactggaaaaaataaaaccatttcatgtttgtactctgaggagtagaggtcccttataaacaccttacaattgatttgtatcacttaggttcctaaaacagagattacttcttttatagatgtattctttccaatgtatgagtttaacagaagtcattttttttaataaccctggttttaaaattcaggggtcatgctgaattcaaatatatataatctccacaataactcagtaggtaatgtgtaaatttgttgtatcagaaaaaagatatagataaaatgtatggaatttggtattgaatagtagaagaaacaaggaaggttgcaagtggttgcatctggataggctgaccagggtatgtggaggggtgaaagaggggctgctgacttttattatatagtcatccctcagtatccctggggggattggatccaggactaccttcccataccaaaatctgcagatactaaagtccctgatataaaatggtttagtagttgcatataacccatgcacatcctcctgtatactttaaatcatctctagattacttacaatacctgatacagtgtaaatgctatgtaaataattgttatactgtattgtttagggaataatgacaagaaaaaaagtctgtacatgttcaaagcagatgtagtttaaaaatattttatcagccgggcgtggtggctcaaacctgtaatcccagcactttgggaagctggggcgggtggatcatgaggtcaggagtttgagaccagcctggccaacatggtgaaaccctgtctctactaaaaatacaaaattagctgggcgtggctgggcacagtggctcacgcctgtaatcccagcactttgggaggccgaggcgggcggatcacaaggtcaagagattgagaccatcctggccaacatgttgagacccagtctctattaaaaatataaaaattagccaggcgtggtggcgggcacctgtagtcccagctactcaggaggctgaggcaggagaatcgcttgaactcaggaggcagaggttgcagtgaaccgagatcacgccattacactccagcctgggcgacagagtgagacgctgtctcaaaaaaaaaaaaaaaaattagctgggcgtggtggcgcatgcctgtaatcccagctgcagnnnnnnnnnnnnnnnnnnnnnnnnnnnnnnnnnnnnnnnnnnnnnnnnnnnnnnnnnnnnnnnnnnnnnnnnnnnnnnnnnnnnnnnnnnnnnnnnnnnnnnnnnnnnnnnnnnnnnnnnnnnnnnnntccgtggatgcataccttgctgatgcagaagactggatgtatatacgtattttaatgcatgtttagtttttaaaatatgtggtgtattactttgattaaaatgagtacttttttttttttttttgagacggagtctcgctctgtcacccaggctagagtgcagtggcatgatttcagctcactgcagcctccacctcccaggttcaagcaattctcctgcctcagcctcccgagtagctgggattacaggtacccacaatgcccgtctagtttttgtattttgagtagagatgaagtttcaccatgttgcccaggctggtcagctcctgacatgaggtgatcctcctgcctcagcatcccaaagtgctgggattacaggtgtgaatcaccatgcccagccagtactcttttttttttttttttttaaagaggaaagtccattttcaaagcaccattaactgkgctgttatttacatatatctcatttaatttaaccccacaatatctctgtgagttagccattattatttctactttagacaggcatataggcttagagaaagtaaatgatttgtccaggttacatagtatttatgttcgaggcagggtcaagactggaaccaaggtgtgtctgcctccaaagattattgtcttaactcctaacctatagtttaatatttgaatattcattaactaagttagaagctgaagttttatctattccataccaccattatgtagccaacacaatggatctggaatatgtatatatacacacacataaaatatatatatatatatgtatgtatatatatttatttttcttctcaatgctccccccctgccccagcaaactttagttgcctcttatcaatgtgtagaattgaaacaagaaagtagcaattgggcagattcttccagtgggaatatgatgactatccagcatgactaaatttgttctaaggaaaaaagaatacttttatttaatactttgtgtattatattaggcgcttagatttgagatactagattatagtagcacatatatttagatttttttaagtttgcttgtattttttaaaaacacatgtaatcatgagtgtttcaagttatcaatatccagctgcattatcctactttaggtgttaaatttgatacagatttatatagtaattgtctttaacagatgctgtagatatttattgcaaaatgtcattgaaaagacagatttaatatattagtttagtacacatggtgatttaaagtttagaatacattaaataaactgtgtcagaaattataaataaactaaaatgagtaaaattattcttaaattgctagacaagtcttcacatttaatgttacattaatgagttttgtacagagactgtttggaataaaatcctttttcatcagatgttgcacatatgctttcactgtttgtttttcttcaaagtaaaacttaatgaaacagctaataaaacccagttttgctcctgattcttgaaagaaacaagcccttgaagtgcacccgctgtttattcttttgcactggtttttgctacttttcagcatgtaaattttccagtaatggaaaacagtcaaagccgtaaaccttttcttccaagtcttataaacccagtgtttatttcttatttgtagagcgattgcacaatggagacatgctttgcacacatacagagaagtttggtctcagatcttcatgtgcacctcctgctgacttcaccagggtgtagtgcatgtgcatttaaatggctgtttattatgtaaatgaccaagaaccagaataggggttttaactaacctaaaaaactgagaggtttcaaagtaaaagacatatatgagactgcagccctattactctcataaacctcaaagtgtgttagactggtgagtagtttatgaaaaaggatcagcttctatgcattagaagtgtatagatggcagatgtgtatgtatcccaagtggctctttcactaaccatagagtatactattctgtcttccagcttctttccgagatggattgttcgactctcttgacagggtagaggtagatatttgggttgggatgagagactgtattctaaggcagcattactcaaagcgtggcctacactggtaacagtgcaaggacatcagtacagaaatggaaaattagtgactaaaaacttttaagcagtttgacagagtaatttctatgtctgtttaataaaagaattgaggcttgtaatttgtatgttttggattttttaatttcatttttttctagtaattcagttttagtgtttttcacaaaaatatgtctatgacagattggaaataaaatcctgatctttcaccacagatggtttgaaaagcatttggtctaggataagattttcaaatgttgatttttgtccctttgccctataacataacattatgtattgaagtttgactaaagaaaaaaggccatgatttataattccagtaccctgagaaaacagcctgatgaccctgaatggttaataagctaagggctgggtggcagaacctcaagtagagatattctgtgttttctgttaagggcaggtccatatgctgtagtgaccactgagtggagttggtgttgacattctcgtatgaaaattagcaagtctaagcaggatttatgtctgaaggaggtgagctgttgccaaattgagattttaaaaactgggacaggtttttaggtggaggaaaggaaagaacagagaaaattgagttgtgtactttttgaaaggtaatgtaagatagtcaggaactttggactgccatggggcattatgtgggtcttgacaaaaagtgaagataggaatgggaaagcatgaatgacaagtttcatttacttctcagttttacctcggatagcttagtgctactaaaaatcatgaggcatgcctttttgctatgtattttattcattgctgatacccggacaagcaatcataatataaagctgagattaatgtgttatataacatagggtcataaaaatgtacataagtcatagaaatagaggtttagagttagaaggtcatataattcaccttgttccagatattgcttctgttaaggctgcttatgatgcattagcttttttgtagctactctatgggttctgcttatgagggtggggtgtgctagaagggaaatgtccttcagtatagcattcaagaaacagaggtcccaatccatggttgaactaggatgagatttacccagatgattgtctaagaatgtgctgagcctgggggagataggaggctgataagggagaaagctgaaagttgggratgagatcagagcttcttaattactgtgccgtgacatgttactgtgccacaaataggctataggtggactcagtatgccggtagtcataattaacagtgttttgtacagaaacttatagcagttgaaatatttgagtagtatttgaaggacttcctatgtaaacaccctagattcactaattattttggactaaaaagctttaggtgtagcacctgtgccctgaaaattctctgtagtagcagtaccaggtattacctgcccctgaccttgaactttgaatcatcccagtacatttgattacacatttctgataaacttgtcatcatcagtaattttattttttaagattatggtaaaatatatataacttaaaactcaccattgtaaccacttaaaatttaaagaaaaattttaattttggtaaaaaacatgacaactcactgtcttaacaatttttaaatgtatacagctcagtggcattaagtacattcacattgctatgtaaccatcagcaccatccttttccagaactttccattttccccactgaaactttgtacctatgaaacaactactcctcattcccatttcctccagcccctggcaaccaccattctactttatgtctctgtgaatttgactactttcggtaactcatataaatggattcatatatttgtccttttgtgactggcttgtttcacttagcataatgccttcagggttcattcatgttgcagcgtgtatcagaatttccttcttttttaagatcgaataatattgtatatacgtgccgcattttgtttatccattcttctgttaatggatattggggttgctttcatcttttaaaattttgttttttaatgcatgtacaatatttgtattttatttctattttgtttcctattattattttatagttttgctgacttagaacatatgtataattatttttattgcttttattaccactttctgatactaggtgttgctaagtaaaacattgattttgttacttcttgactgacttagtttttgcctttggtgttaataattagccaaagttacattcttgatagaatttcataatggtttattatttgtttttgggaattaaaaaatacttttatttctaaaaatcatgtaataattcaatgaaatttaattaagctgattcattaaaaggccttttacgttagaaaataaatttactggtgctgggtgcggtagctcacgcctgtagtcccagcactttgggaggccaaggtgggtggatcatgaggtcaggagttcgagaccaccctggccaagatggtgaaaccctgtccctactaaaaatacaaaaattagccgagcatggtggtgggtacctgtaattccagctactygagaggctgaggcaggagaatcgcttgaacccaggaggcggagtttgcagtgagccgagatcacaccactgcactctagcctgggcaacagagcaagactccatctcagaaaaatgaataaataaaataaataaataaataaataaataaataaatttattggcagggcatggtggttcatgcatgtaatcccagcactgtgggaggtcaaggtgggaggatcacttgagcccaggaatttcagaccagcctgggcaacgtagtgtgacctcttctctacaaaaaaattaaaaattacctgagcatggtggtgcatgcctgtagccctagttactcaaaaggctgaggtgggaggatggcttgagcttaggatgttgaggctgtggtaagctatgattgcgccgctgcactctagctggggtgacagagtgagaccctgtctcaaaaaaaagagaaaatcaattaatcaaaatattttaaatcacacatgagtatatgtattgtacatatttttgaatatttcaaagttttaatttttgaagtaaacagatataaatgattacttttatgaattttgatgaagtttgttttaaaaacattttaatgaatgcagaaagttccctaactctataaatagattttatgtagttgaaaaagcctatagtccccattagttccttacacttaaaaaatacttatttttttacagatattgttcttacttttcaatcttattgaataacttttcattaaagctacaaagccagcatattcacaaaacaaacacagtatcaaaaaagttagtcactagttaggtaatgaaatgacaatcgtctcaaatttggatgtatgtgctcagtagctctttttttttcctcagcctaaatgccttactggcaaggaaaagttacgagttgaagacaaggtgccaagcaaactgcactggcacctcactacaaaaactcagcaggaaaagatttgaacattttaaggttctgcaaagcaacaagaaaaaccaaagctctttttgagattggttccaacaatgttagattaagctaaataaaccagttacaaggtcacaccattaaaagctaaagccaaactgtctcaaacaaggatagaagccctcattttaccacctagtgtgaaaattgtttgaggccaataaagaaaaggaagaagtggtactctcaatactagtgaatgtattgacgttatattggatgggataaagatagcattaatccagattattatcaaatgagtcaggttttatttcagattgatgaatctatacacattagaaaatgctgaattgctgtatgagttatgattcctaaagagaaattcttggaaaaatatcagttctttgtaaagaagtaccaaaacaaattactggggatgaaatattgaaggtggtaaattcatactttgaaacaaataaagtatggaaccaggcttgagtttgtacactgatgggtgactgcaaaaaaaggcataatggcttcacatcaagggtattgtgaagacattgaataggattcaaataattcaatgttttattgacagagaaactcttgtgtaatatacttttcctgtgtaagagttccacactctgatgtgtctaaatggagaatctactgcaactgaggctgcttcacttatgtctgttttcagttttatgtatacaactttgcactgtttcatactaaagtgcagtagatgtccgaggaaaagttttgtcaaaagtttgggaactagaaggagaactggaacttttttggtagacagttcttactttgagtatttgttgaaaggtagttcttggcttgaaaattagtttaattagatgaataaataaacctaatagaaaatcaccaggacctttcaataatatattcatatgtattgataaagtttatggattcagaaattaaggcaaacatttgatcttggaaatgtgaggttaaaaatgatacaattgtggttaggctgtgtcactgaatagaaaagaataattattaagacaagtagagcaacatttgtatacgtaaggaagagatacattattggtttgaaatgtatgatttcaattgtattcacaatttattcatattgtcataagaaattttcaaatcacatttgtccatgaaaataaaggaagatctatttgatttactgaatgatggcacttgtagagtacaatttaagtttgaattatccaaattctggttaatgatgagaaaggcatttccatcatttggagaaaagtgataaatattctctacagagacagaaagtagattagtggttgcctagagctgagataggaatggggattgaatgtaataattatacaatataaagaatgtatttaaggttttatacaaagtttcatataaacaccacaaaatcccctccagtttaccctattattcaaatatgaatttctatgtatgtcatgatgggaaaagggttagaaaacattggactgaatcatatgacaaccagaaggctgagtcaagaatgtcaattatgacaggtcccaaattcagcagcttaagaaaattcagagaatggaataaaaaacaaggactgggagagtataacttgtctgtgtcttatgacttactgatgtgggggataagggtcagcagtagtggcatgatgggtagatgttgcagcatgacgaaccagactaagctggactaagccaatagctgttcagatggcttctgaattatgtggaagaataaaggcctggaaggagaaataaattatactaacattttatatctcactcatgggtatasatcaaagtaagttaactcttggaacctattttttgtgaaaaaatactcactagcaattactttgtactaggatctatttgcctatattctctgagcttatcttcaccttggttagtaatagtaccaattataattcacattggttagtaatagtaccaatttatagatgaggaaactaaggtcacatgtattggtggcagagttggatatcaactcaggcagtttgtccttagagtctgtgaagtctgtagtgacactaaccaccagtctccttctaaattcccaccactggtctcaaggcaggctgttcttatggcstgaggcttcttctgtgtaggatgtggcctacaatggatgctacatacagtagggcctcctcacggactgtgacttgggtgtttctgggcttcatcgcagttgtttgtgggaaagctgaagaatatggtctgatcttaaaatgttctgggagaatatttagtctgcagcagcccatcatctatgtagctgtgcttaagaatatggtagccactagccacatgtggttattcaaactgaaatttaaattaagtaaaataaaataaaataaaaaattttgctccctagttggattagccacatttcaagtggctactacctacattttggacagcacaaagaacagttctatcattgcaaatgattttattgaacaataacattcttacttgtccgcttctccatgtctgccacatcaaaagtgggaactcatttcctagtaacttcttactcctcagttttgctaacttctcattggccccactgattctgtctttcctcatatggcaaaagatagtgataccagaaaataatatattattttggtgatcattagttgctggttcatacaagatttcctttcttaaaacagttctgcagtactattgaccttgctctccttaccttttcctgcaagtataacaattaccaactaaattctatataatccctacgtgacagcctgtcacatttgggctcttcttgaacttgatagcatctgtagctcttgtgtcttaaaattgtgtgttactgttaagcaagagctcctgtttttgtgtagttggatattttttagcctacatttaggtttttatttttattcatgataggtatcatctcatttttgcttgtgactttttaaaaaattaaatcttaaattgtttacctcacaatcattattattattattatcatcatcgttttatacccagctttgataaacaacattcctttgtaggttggtcaaaactaacttcttattttatttttattttttgagagaattaccagatgggcagcatgctatagaagtggtgagtttgatctcaaccaaatcatttagaatgctttcagaggtgggcagtcatgtgagtaaggactccagaaatcatatcaaatttgaagaacctgacartattgaatgtggagaaaaatagactattttagatattcgaaggactgtgttgaatgagcagtgttgatcagaaggaaaatttattatattgggagcaaatttatcaaggttaattataaaaaaaaatgtgttgctagtgtatccagagcaacacacataggttatcaagaccttggagcaacaccagataagaagggtaactgtaggatgtttccattcttggggccacagaggtgaagtgagccaaaaaaacacagtgggaattaaacaaagtagggttaagttttcattaaaggctgtgcctgcattcaccactcctggttgccctggcaacggggctcccttgcatgctaatgacattataatgtgaaaaaacacatgcaaatgcagtaaatagtaattagagtcagaggcatacatggagtagtgagctccaccttgggaaggtctgcgaagagctggtgatggatttgtactgaagacaaagaaagaggtggtaaaagaagggctttgagttacacataaaagggttaagttgagtctgcataaagcacactcttgcatttgtgtcctgctgatgatacctgttgtttctccagcagaatgtagtcagtcagaagtcatgctacttgtacctccaaattgtgctaactattctacctgttggcaacactgtatggaaagaatctgagctgtattttggcttagatttggagcaactatagcagcctgctgcttggaatgctctctttgcctacgctggcagggctgggcctgcccagacaaggtagtgggaccagagtatgtagccaaaagtctgtcttggtgaagaaagagaagacttaattctatgttgcttcagatgagacaagtaggaccaatgagagactctggttagtataaggtgtaactgacaaatatatgctgtttgcccctggaaacgtgtaaggagatgatggttgactgcctgtctcaggtgtgatagatatggtttttgatttgcctgaatggttagactcagagtttatatatctgtgctcagtttcattcttccctttctttcattttattcaggctcttttctgtcttttctatttttattgttatatatctgtgtgtttttcttgaaattgctagaaaatgttatattgcctgcttcacaatattccaattctttgattgatctttttggtgtcagttgaactataggtcattgactaaaaattgccatgaatagccattcaaatccataaacttttactgttctttttcctctctcaattaaaaaaaggttaaaaatttcataaggaaagcacatatgcttttacaaaaatttgcattcatatattattaaaaattcaagcaatatagaaatatatatgataaactgtttaagtatctttctgtcacctttcaccctgtctgctaactcccaatctcaaactcctcctcagagattaccagtgttaacagtttgggatttgacttcaaaacttcttcctatgcctttatatatattgttattatatattataatatatactattaagacattattaatggctaatacttatttagtgattgctatgtgccagacattgttcacacctttttaatatattaattcatctaatccctttgagggattttgagaaaggaaggccaagaggagtttagaaacttgtccaaagtggcacgcgaaatttatatgccaggaaatctgtttgggatggagctcatgcattttctaaccatactatcctgcctgctttagtggtaacatatacatatagaatgatcattcttcaagtagccttttttcatttaatatttaagaagtcattctatatcagcaactttcttctaccagctttttaaaattgttgtattttattctcttgttcagatgcaccataatataaacattcccttattgatgggcatttaatttgctattacaaaagataatttaataaatatcaatgcaatacaatttttatatgtacatatatatttctaggggagtagacggttcaaaatagaattgctgaatgatagtttacattttgatagataatgcaaaattggcacaattattgctcctttcttcttcttctttttttttttttttgagtcagagttttgctcttattgcccaagctggagtgcagtggcacgatctcggttcactgcaacctccaccttctgggttcaagtgattctcctgcctcagcctcctgagtagctgggattacaggtgcacaccaccacacctggctatattgctcccttcttgaagcacccttcgcttggcatctgggatgctgccctcttggttttccgcctgccccagtgactgtccctttttggcttcctctgctggttctcttcatcttccaacaactagacattggagtgcatcactgctcaatttttgaacttctcttctccaattagactcaccttgtagatcttattcagttacttggctgtaaatactatacaaacacacacacacacacacacacacacacacatatgtgtgtatatatacgtgtatgtttgtactatatgtgtatagatacacatatgtatatatctgtactatatgtatatctatacataggtatagatgtactatatatgtgtatctataaacatatttatagatgtatatatgtactatgtatatatactatatgtgtatatgtatgtgtactatgtatatgtatatatacatatatagtatatatacatacatgtatatagtatatatgtatatatgtactatatatatacatatataaaatatacactatatatattgtgtgtatatatgtgtatattgtatgtgtatatatatatcatatcatgataggcactggcattttagtgcctatcatgaacttcaggcttttgtatccaacaaccaaattgacattccatttgaatgtctgccagtcatcacaaatttaactcatttttactacccagcccccaacctgtatcttccacatacttccctatgtcagtaatcattagcttccaattgctcaagacaaaaacccagtgttaccctggaccactctttttctcttacattccatgtttgatccattagcaaatcctaataactctatcttccacatatattcatactcgaccacttttaacaccttcattgtaccaccttagcgcaggctgtcatcttttttcacctggcttcctaattaatgccctcttagaatctggtctctaaacaatagctagagttatccttttaaaatgtgagttcagtcatataactcttttactaaaaaccttccggtgacttcctatttagtctgagtgaaaatcaaagctttaaccatggcttccaaggccttcagtggttcctctcgtctttcttctctaatctttgtcttctatcattctcccactcctttattctgctccagccatcctaatatccctgctgtttctgtggcgcctckgcccttcctgttcccactatctgttgtgttcttcccctagatagctttatgacttgcccccttactttcttcatatctgtgctcaaatggcaccttatcagtgagatcacacctgcccaccctacgtaaaatagcatcttctcaacactatcatttttaatctttcttactcggatttattcatttatttgtttatctattattattatttttttatctgagatggagtctctctctgtcacttaggctggagtgcaatggtgtgacctcggctcactcagcctcccaggttcaagcgatacccctgcttcagcctcctgagtagctgagattacaggcatctgccaccatgcctgaccaatttttgcatttttagtagagacagggtttcaccatgttggccagggtggtctcaaactcctgacctcaggtaatccgcctgcctcagcctcccaaagcgctgggattacaggcatgagctgctgcacctggccaatttatttagttttattgcacttaaaaccacttgttctacatatttagttgtttgttgtttatcttcttcatcctgcactctaccctgccctccagaatgtaagctccatgaaggcaagaacttgtctgttttgttcactgctgtattcttaggacctagcacagcacattgcatgaagtaagtgctcaataatatttattgaatgagtgaatgaacgagtgagaaattggagagcatttccctccaaacagactgtactaatttatactcctatcaaaaataaatgaatatgctcatttttctcatatgctctataaaattggatattgctgatttctaaatttttttattctaaaagatgaaaagttacatatttttagatttgcattttccttattaatactaatgttgagcatatttttatatgcgtattggtcattggtatttcttttaggcatttattgtttatgtcctttgttttattgtgagtttatttttaaatattgatttgtaaaaataacatatatgattatatattatataataatataaaaatatataatcctatataataatatataaaagagtaaaatatattattatagtattcttcattttctataggtattgcaaatattttccccagtctgtcacttttcttttaacattgttaacagtatcatttgtcatatagaagtttttaagttttaataaatcttccagtcttttgctcagtggctttgggttggtgttttgctcaggaaatcttttacaacttcaaaattggaaaatattcttttgtattttcccctacacctttataattttaatttttgtatttagggtttcaacccacttggaacttattttggggggttttgtgatgtggtagtgtagcttatttattttatttaatggtgagccaaatgacttcatactgattactgacccatctgtttgttcatctctgaccccaaatccccaatttatcatatattaacttctaacatatatggccctgttttctagagtctgttttctaatttcctgatctgttttcttctctgtcacaataacatgttttaatttttatgaatgagtcaggcacagtggcgcatgcatgtaatcctagaactttgggaggctgaggcgggcagatcacctgatgtcaggagttcgagattagcctggccaacatgatgaaaccccatctctactaaaaatacaaaaattagccgggcatagtggcaggcacctgtaatcccagctactcgggaggctgaggcaggagaattgcttgaacccaggaggcggaggttgcagtgagctgagattgtgccattgcactctggcctgggtgacaagagtcagactccatttcaaaaaagaaatttttttttacaaatgcactttagttgatttttatatctgttaattctacatttttaaattgtctttactcctgtgcattttctttttcagatacattttagaattactttacaagttttataaaaaacttgttgggattttttccgtattctacagtaaagttgtgcagttttcttgatattaggtattttcctggatatttgacatataactctcttaattattctattaatttttcaattgaaggccaggtgtggtggctcacatctgtaatcccagcactatggaaggcagaggccggcacatcacacggtcaagagatcgagaccatcctggccaacatggtgaaaccccgtctgtactaaaaatacaaaaattagctgggcgtggtggtgtgtgcctgtaattccagctgctcgggaggctgaggcgggagaatcacttgaaccagggagtcggaggttccagtgagccgagatcatgtcactgcactccagcctggcaacagaatgagactctgtctcaaaaaaaaaaaaaaaaaaaaaaaaaattcagttgagtcccttagattatttaggtgaataaatcatctgcagttttatcactttttgtaataagatctcatttacttttttttttttttttnnnnnnnnnnnnnnnnnnnnnnnnnnnnnnnnnnnnnnnnnnnnnnnnnnnnnnnnnnnnnnnnnnnnnnnnnnnnnnnnnnnnnnnnnnnnnnnnnnnccgggatggtctcgatctcctgacctcgtgatccgcccgcctcggcctcccaaagtgctgggattacaggcgtgagccaccgcgcccggccccatttactttttatgtctaatgttgaactgtagtcatgatagtgagcattcttctatttttctttgctttaatggaaatgtttataatatttaatcattaagtatgtatttttattagattcttttcatcagattaagagaaatgtcttataggttttttcagagcttcaaaaatttgagattgagtgttgaattctattcaaagttttaacatctatcagtgtaattatatggactttttcttttaattcattaatgtagtgattacattgacagattttctaatgttgaaccatccttgcatttctattgtaactctttcttgataatgaatgcattattcatttgtggattcaacttgatattatctcatttaagattttttctgctacatttctcttatttttaaatatagtttttatttttctttctttttagtctttatttagtaagattgcttttgattgccaaagcaatagattctggctaacctaagtaacaacagtgatgtattttcaagataaagattgtcttagcctgagtttcctctagagcctgagataaaggttagtgtgatgatatttattttggaaaataatttcatgagccaagaatacaagacagggagagtaaagcagaggaggaagagtcacttataaatatgtgttattgagtccctactggtgcctggttcttaattcttctagaatcttctgaggagactcatgaaataaggcagtccattcatgagatgaaagggagagagcatttatccattggtttcctttgcttatagatcaaaggtggccccatagtgtttactacctgcagttccagattatgcacatgtactgtatgagtgcggagttaagtgtggaattccacagccagaatggcagggtcacagtgtgagggttgaccagttgcacatgtgtgaagctggttaaagcctccatggaatggtagtgggagctgtggctagagtaaaaggtagaattgaaaggttttggaatggtgctcaagaggtgtccaatacactgggattcttcacactcttgatatgcgctcccctggccagttctctctttctaagctcttccgagcagaagctatattctaacattgtagcaagcttttgttgttgctcccatactgtctctcaaagttgtgagagcctaggtccttcacaaaaagctttctaatgtcttaagtagagcctaatgtcatgttaaaatatgtttgactggatttttagctttttatttcaattatgatgtactctcttcctatataagtgatattgtttaattaattaatttagactgaatcttgctctgtcgcccaggctggagtgctgtggcatgatcatagctcactgtaacctcagactcttgggcttaagtgatcctcctacctcagcctcgtgagtagctgggactatggcatgtgccactatgcctggctgatttttaaattttttgtagagatggagtctcactatttgcccaggcttgtcttgaactcctggcctcaagcagtcctcccaccttggcctcccaaagtgctaggattacaggcatgagccaccgtgcctggcccccttttagttcccaggaaacaaacacccttcaagctttgggaaaaagttagtcatactcagaaaaggggacatttatttctttgtatttagggatagaatgttacatagattagcaatatcattcattccatgagtcactttatttctgctttgtcataaaaataggagagaagcagggaattaagaagagagaagttggaaatattgataagattttttttctctgataaactataagcaaaattcattcaaaatggattaaagtttaatccatttatacagatttattatacatttcagaaatactataagaaaatagaaatgaatattattgtctttgaagaagattttcttaaactttgaaatgaaatggtaaaaatcacttaaaatgtagcatacaattacggttgtaatcaaactgtaataaaaattaaaggggaaatacgcattaggaaatacttgttaaaaagtatgcaagataaagattagtgtctttattctatagaaacttaaatatattagtaaaaaacattaacacccaagtgtattgcaaagcagataattcacagaagaaagtatgcaattcatgtttcagctatgtcttgctttgtaacaaactatcccaaaactagcctcatgaaacaacaattaaattagttatatctcatgatttttttggtcaggacttcagccagggctttgctgggcaattcttctgctttatgtagtgttacctgggatcacttggtagtgttcacttggcagctgggctggtttggagggcctaagatggcttcactaacatgcctggtgcttgacaggacaactgttaagggtatactgggatcttatggggtcgtggggcctgtttatgtggtctcttcagcaggagagttggacttcctacatagcttctcagggctccaaacacgaatccagaaacatctggtcctctttaaggctaggcctggaactggcagagggtcattcccctgggattagctgaagtagtcacaggctagcccattttcagggggaggggaaataaaaccctctcctcttgatgggaggagtgtcacagaacttgttgccatctttaatttgctacagttattaataacagaaatacaaaataaaggcaacattgaaatacagcttttgatacatcaaattagcaaagaataaaaacaaactgtatagatttataaaacaaccagaatgataaaaaccagtcctggcataggtgcagtgaaacaggcattctcatgcattactggtggcattgaaaggcagattttgaaaagatcttggcactataaatcataaatgttaaaaatatcaatatttgactaaaaattgtactgtttgaattctcaggggaaaaactattggcaaggatacacattatttgtgaaaaacttattttaaaaaaatagattacaaagttgtatttatagtatgacttaaacaattcctaagaattaaaaatgcactagaggaaaatacattacagtttaatcaggcttctctttgtgtgattaaattacagatttttttccactgtgattttacttgttgaagaaaaaagcaataagtgttttatgacctagtattctaatttagaataatttcagcataaatcattacaatcaaatggatagaaatataaaccccttgtcatggccaacaagtccctagatgatctggctctattggcttttttgttcttcatgtacaccaaactcattcctgccacaggacctttgcaaagttattttctgtccagaattcctttctcttagatcgtggtgttgcttgcatttttactttatttagatgcctttgttttattcaaatgtcaagacttatgagagggtttttcaggttatttatatgaaaagactgctttctatacctttccagtagctattctattttaatcttcagtgcacttatcactatgacataatattatataacttcaactttacttattatctatcttccttcattcctctcatgttttatgagggcagagactatgttctgttcgtgttgttttcattgtaaaagttactatagtttaaatatgttttattgtttatgtatttatttgctgtttcccatatcagaatataatcttgccagggcagagattttatgtatcttgctcactagtggtttcactagtacataaaacataataagcattcaataagtatttttggataaatgaatgggtttaggattcatataaaataactaggtttttgagatatttgtgacatatttacctcttgtcaaaacagtgatacctgaaaattgggaacaaactttggtatatttcaagtataaaagaccttagagtacttaggtaataagagcgttaaatgctcaaaattaagaaaatagaaaaaggctcctaaaaagatacagaaatagatctaaacatatagtatgtaaaacacatttatttttatgaatacttattacaaatatgaaaatacagctgaattgcttcaggtaaatgagctctagaaatctttgatgtgcttaaagtttgataaaataagaaatgatacttagaactccaattacatgtttttttaggccacttatgtctcacagctcactatgctctattgattttttcagttttttttttggtctgtttcatttcggatagtttctattgctgaattcactaagtttaccttctgcagtccctaatctcctgttaattatatccagtatatttttcagtttagatattgtatttttttttatctttagaagtttgattagggtctttttaatatcttctatttttctgctcattattctcatgctttcttctactttctggaacatgtaagagtatatttatgatagctattttcatgtcctggtctgtattagtccattcatcacactgctgtaaagaactacctgagactgggtaatttataaagaaaagaggtttaattgactcacagttctgcaggcttatcaagaagcatgactgggaggcctcaggaaactgacagtcatggcagaaggtgagggggaagcatgcacatcttcacaatagtgcagcaggagagagagagagagcaagagtaaagggggaactgccacacacttttaaaccatcagattttgtgagaattcactcactatcacaagaaaagcaatggagagatctgccttcatgatctaatcacctcttaccaggcccctcctacaattcgacatgagatttgggcggggatacaaatctaaaccgtatcattccaccttggcccctctcaaatctcatgtccttctcacattgcaaaataccattatctcttttcaacagtccccaagtcttaattcatttcaacattaattcaaaagtccagagtccaaagtctcatctgagacaaggtaagtcccttctgcctatgagcttgtaaaataaaaaactaattacttctaagatgcaatgggtatacaggcattgggtaaatgctcccattctaaatgggagacattggccaaaacaaaggggctacagtccccatgcaagtctgaaacccagcagggcagtcattaaatcttaaagctccaaaataatctcctttgactccatgtctcatatcctgggcatgctgatgcaaggggtgggctcccatgggtttgggcagctccgcctctgtggctctgcaggatacagctcccatggctgctttccccggctggttttgagtgcctacagcttttccaggtgcatggtgcaagctcttggtggatctacctttctgatgtatggaggacagtggcccttttctcacaggtccacttgacagtgctccagtggggactctgtgtaggggctccaaccccacattttccctctgcactgccctagtagaggctctccatgagggctccacccctgcagcagacttctgcctggacatataggcatttccatacatcctctgaaatctaggtgtaggttcccaaacctcaattcttgccttctgcrcacctgcaggcccaataccacatggaagctgccaaggcttgggatttgcaccctctgaagccgtggccctagctgtaccatggccccttttagccacagctggagcagctgggacacagggtgccatgtcctgaggctggacagagcagtggggccctgggcctggcccacagaaccatttttccttcctagggctccagggctgtcatgggacgggctgccctgaagatctctaaaataccctggagacatttttccccattgtcttggttattaacattcagcttctcattacttatgcaaatttctgcagctggcttgaattcttccgtggaaaatgggtttttcttttctactgcaatggttgggctgcaaattttccaaatttttatgctctgcttcccttttaaatataagttttaatttcagaccatctcttccttcatgcatatgagcatagaattttagaaacagccaagttacctcttgaatactttgctgcttagaaacttctcttgccagataccctaaataatctctagggcacgggcaaaatgctgccagtctctttgctaaagcatagcaagagtgatctttactctggttcccagtaagtacctcatctccagctgagaacacctcagcctggacttcattgtccatatcaccatcaccattttattcaaaaaccattcaacaagtctctaggaagttccaaactttctcacatcttcctatcttcttctgagccctccaaactgttccaacttctgcttgttattcagttccaaagttgcttcctcattttcagatatctttatagcagtgccccactctcctggtaccaattttctatattagtctgttctcacactgctataaagaactacctgagactgggtaatttataaagaaatgaggcttaattgactcacagtttgcaggcttaccaggaagcatgactggaaggcctgaggaaacttacagtcatgggggaaggtgaaagggaagcaggcacatcttcacaatgacagagcaggagagagagcgagcaaagggggaagtgccacacacttctaaaccatcacatcttatgagaactcactcactattatgagaacagcaaggggaaaatccaaccccatgatccgtttacctcccaccaggcccctcctctaattcaacatgagatttgggtggagacacaaatccaaactatatcatggtctctaattctatcacctgcatatttatgggtccaattctattggctgatttttccttcctgtttcagtcatatttacctatttcttctcatgcttggtaattttttaattgaaagccagacattgtgagtgctggattttttttttcatttagatattttcagactttttctggaatgcaattaagatccttggaattggtttgattctttcaagggttgaattgcgacggcaagtcctgaacagcgtttagactaggtctgatttggaccacagctaaggcatttactttctgaggatactactcattgctgtgcatgttaggatggttttctattctcactggtgggaatatgaactattcctagccctatgtgcattctgaggattgtgctgcatacttatttttactgtttcttgctaggtatcagtagtttcttcacgtccatgtgcagtttactacttagtgaaagactcacaaaaggctcctctgaggatcttgagaattatttctttcagtgcctcccttgtactctgctgcacagattcttgtcaatctgtttctccaaagtctgaactctgtctccccaagttagtaatactcggggctctgtttggatatcctatccctgtagtgtggcctagaaactttctctagcggggatacttatcaggctcaccttgtttatttctcttctctcagagatcactgttctgcgctgcctgtgttcagtgtttgaaaactccaattttatattttatgtttggttttctagttgtttaatgtgggagggtatgtctattttgttattctattatggttagttggccaaagaaacacttaatacagaagtatttgaaggataccccatttatgtgatgtgtaaaatcaacaaatacaattttaggttaagacattatatatgtgatcatatatatatatgatcatcagtttaaggtcgccagttttcaaccttaaaattaggaacacagcagtgggagaacatgatcaactcatggaactgaaggagaggagatatttaaggaagattccctaaggtgtgtatgcctttggggtggagtgaggtgatgtgcttctcctccttctgctgttctgttgtatgcttctgtcttgatgcagaggcaacagcttttctcctttttctgagacattaatgccaagctatgggaagcaggagttctgatagatgacacagagaaggagggaattcagtataagagctttaaaccttcacagacttggagtggaaaggactaggagggcagagattgtgactcattctgggaaatatgtcaagaaacttttgttacattaataaaaaaggctgagtggattctatcctccctctttccttccttgtcttcccttcttgtccctcctctctgctaactatgtgagtttgccgtgtgtctggtactgatccaagaagtgaatatygaatattctttttggcaagcagaatgacctcagtaaagttttcaatctcaccatatccaggctccatggataaaaagcagtgattgtactaccgtgcagccttctctcaaagctgttagtaccctctgcctcattcttgggtaaagcccttttggcttccagcagtagccctgagaatctggcctattgtccccaggttggaacagcttctaaatcactggccatcagctctgtcctacctcagctgttctcctgtgtgagctgtcttcaggttagatgagacagctgtggggctgcgtttctcctacctcttcctgcttctccaactgtattgagttgaataatgtctccccaaattcatgtccacctggaacctgtgaatgcaaccttatttggaaatgggatctttgcagatgtagtcaaattaagatgaagtcatgctggattagggtgagtcctaaatccaatacgactggtatctttataagaagagggaaatttggccacagagacccagacacacaggggagaaggctgtgtaaagacagaagcagagactggagtaataagtttccaagttggcaacaaccagaatctaggaggaggcaacagcctaaagagagagcacggctctgccaactccttgatttccaatttctagcctccagagctgtgagaaagcaaatgtttgttgttttaagccaccagtttgtggtactttgtacagcccatcccagggaggcctttgtcacttcccctgttctcttgaccctacagcaggatccttttctgaggagttaaactgcttaagctcaggtatccttcatttcactaaaaactgggaaagttaattaattatttgtactgctttgcaaggatagtgctttgaaatcaaagtgacaacttgctaccctgataatttttctaccatcagtactatcaaatttctttccatttaataaaatataaaattactttaatctcttaattctcttgagtaattttcataaaatagccaatggttcaaaaagcaataatttatgaaaggaataagattgggagtaactttaaatccagaaatcaagatgaagaaggccaacatttaggtcatctgtgtttttttttttttttaaattttatctacagtattggaaaagcaaaactaagcctttaagaataattcagtgagcaaacaaacataatatggcaaaatgtctccaaacttaaattggaagcaggaacaaagagagaaaaaaaataactttcgatagcaggccccccatgtcccctccgatcagttataatatccgttggccattcccctggcacaaataagcaggagcattctcagagccaaaaccaaattgtttaataaaaagtatgagggcacatatgaaggtctcacgtctatgaactgaaaattgagaactcaaaatgggcaagttggaaaacccgacaacaaactattattaaaaaatgaaagagggaaaagaaaatgcttaatagtgaaacctaacattgtggagataactgttaaaagtaattaataaggaaaacggaactagtgtgtttaaacttacttttgatgctttggctctaagaaggggaagagacttagcattatttaaactgtaataattctttaaaaacttgcgtttgataaacaggctgtggaagaatatataaacacatatgcatgtgtgcttctccccacatcaggtcaccaaattcccacctgtaaccttttctagcctgacaagtggctaattttttctgccacttattcctcggggcctctgtccttgctgtgctctgacctgcattacagggatggggaagcagtgttatactactcataggaagtcaggaaggtgctggaggtgaaaagaagggggacttggtaggttcgagagcttccaggaaaagggagtaggaatattgtaagaaaactaacttcttttcttctagggtttttatggttttaggtctaacattaaagtctttaatccaccttgaattgatttttgtgtaaggtgtaaggaagagatccagtttcagctttctacatatggctagccagttttcccagcaccgtttattaaatagggaatcctttccccattgcttgtttttctcaggtttgtcaaagatcagatagttgtagatatgcggcattatttctgagggctctgttctgttccattgatctatatctctgttttggtaccagtaccatgctgttttggttactgtagccttgtagtatagtttgaagtcaggtagtgtgatgcctccagctttgttcttttggcttaggattgacttggcgatgcgggctcttttttggttccatatgaactttaaagtagttttttccaattctgtgaagaaagtcattggtagcttgatggggatggtattgaatctgtaaattaccttgggcagtatggccattttcacgatattgattcttcctacccatgagcatggaatgttcttccatttgtttgtatcctcttttatttccttgagcagtggtttgtagttctccttgaagaggtccttcacatcccttgtaagttggattcctaggtatttttaccattcaggacataggcatgggcaaggacttcaggtctaaaacaccaaaagcaatggcaacaaaagccaaaattgacaaatgggatctaattcaactaaagagcttctgcacagcaaaagaaactaccattagagtgaacaggcaacctacaaaatgggagaaaattttcacaacctactcatctgacagagggctaatatccagaatctacaatggactcaaacaaatttacaagaaaaaaacaaacaaccccatcaaaaagtgggcgaaggacatgaacagacacttctcaaaagaagacatttatgcarccaaaagcacatgaaacaatgctcaccatcactggccatcagagaaatgcaaatcaaaaccacagtgagataccatctcacaccagttagaatggcaatcattaaaaagtcaggagacaacaggtgctggagaggatgtggagaaataggaacacttttacactgttggtgggactgtaaactagttcaaccattgtggaagtcagtgtggcgattcctcagggatctagaactagaaataccatttgacccagccatcccattactgggtatatacccaaaggactataaatcatgctgctataaagacacatgcacacgtatgtttcttgcggcattattcacaatagcaaagacttggaaccaacccaaatgtccaacaatgatagactggattaagaaaatgtggcacatatacaccatggaatactatgcagccataaaaaatgatgagttcatgtcctttgtagggacgcggatgaaattggaaatcatcattctcagtaaaccatcgcaagaacaaaaaaccaaacactgcatattctcactcataggtgggaattgaacaatgagaacacatggacacaggaaggggaacatcacactctggggactgttgtgggggtggggggagggggggagggaaagcactgggagatatacgtaatgctagatgacgagttagtgggtgcagcgcaccagcatggcacatgtatgcatatgtaaccaacctgcacattgtgcacatgtaccctaaaacttaaagtataataataataaataaaaaaaaaaagaaaactaacttcttatacaagtgagcacagttgtggcattattgaatggcattgaaaattgaaagccctaagtgacatcaaaaaatgtttacttgaaaaacagagtgaaggtatggtgtaattaggtagtaacctaagaaagaagtattggccccattttgggttagtaactagagagtgagttcaaaaaggtaagaaaataaaaacaaaaattagtttaacacttcatggttcttagaatcatatttatcacagagtgaaaggaaagttttaatgaagttttcttactcctgatttagatctcagtctccctagtgaactgttactttttctttcatggattgggtttttattttatttctacaagaaaaaataacacatgatttcatttaaaaatgtttaataatacatagagatataaagtaaagatgaaaatctttccctccttctcctctgacccaattttgtaatttgttttctatgcacatataaatatatttatacacatttatatatgggtttatataaatggcattgttgttctataacttacttttccacctaacatatcagtgacatctttctttgtaagcatatacagaattaccttattatttataatagctatgtagtattccattgtatggatgattttaatttgcttaatggaacccctattgatgatgaataatcccttagttattctcatggttacccctgtaactttaagtaatatatttctccttcctgatttctcatctttggacaataactattgattcctgctataatagatgaagaatttagtttattacttctacctcccacattccttcctattcttctttctgatttttgattatattattatttttacatcatcaagattcataatatttagattctattcagtaactataatttagtcctctgtgctttgtttataggttgattcgaaatttgaacctaataaaagtatataatgagtctgtttaaataaacagattcattgcagaagtaagtagtataatagggggtataattctctgtactataatagatgatataatcctttgaaggtggtataatcctctgtcacactgctgattgatagagactatttcaagtcaaaatcctacaaattcttggctgggtgtggtggcttacacctgtaatcccaacactttgggaagttgaggcaggaggattgtttgaggccaggagtttgagaccagcctaggcaacatagcaagaccccatctctaccaaaaaaaaaaaaaaaaaaaaaaaaaaaaattcagccagatgtggcagtgtagtcctagttacttaaaaaactgaggcaggaggatggcctgggcccaggaattaaaagctgcaatgagctgtgatcatgccactgctctctaacctgggtgacagagtaaaaccctatctgttaaaaaaacaattctacaaactctcttttagtttcataccatgaccgcattaaaaaagctcttttaaactgtgcacgggcagaaaaccaccaatcaaggatcaagtgtcacagtgtttttctgtggtttaattcccagctagagaacaaatgtgttcagtagggattcacaaattaggtcacagaaatgaaagcaataattgtggattataccatggagatggtgaatcgagggggtgctagcctctattgggctgaatgcatccagaaggcttaattctttcccagaaggacaggctcagcttccttaagtggaatttagtatctgagatgtaactccagccctttcccccaagaagttctgaggtatgggtggactatttaattaatgaggtgtcatgtttaataaatcccaaaatactgcaggaccaagggaaaattaaagacgtgcaaatttctttatcaaagatgaaatgtattatctccttattttctttcattcttgagtttttgtctaaatgagccagaggctagcagtactgatgaatcactttgactagagctggtcactctttatacaaagttacctttgtatataacataaccagaggcatcagagttcaccctggccaggatcctctcatgcatctggaaggtgtaacactatgagaaattgaagtcagtgttactgggattgggtggatatttggggtatggggaggagtcgtattaacacattcagcattgtgttctggaggatcttctacatccataacagttccttgcctacattacttacctttaactttaaaaaatggatggatattggtttaatgtccgacctacctagtataaacttttctacttagcagtagtttctagtttcttcttwttaccccaaggttaatcagttttgaacagctactgatagtattggtttgatcttctacagcagcaaagaacagtcacttgagatctgtggcctaggtttgacctattcctcagggctccactgaccttgaaggccttgtttgatcagtgctggcattgacctagaaacttcagttgtcttcctcctttatggacttgtcaagcccttcctgcagttgatcattctgggcagttaacttgagttgaagtcgtatataaaatgccttattctgaagtagagcttagacccttagataaccacccattttcttttagatgtgtctagagaagatcttgttaaactcagcaacaaaagccctataattattttgttagctggattccagcaggcataacatagcttgctgggtggcatagccctatgacagcttgtactaaaacagacccaaacgtgttctatcaggaaatccttagatctccatccaaaatgcaatcggcactacactagaaaacttgcttgtctctcttggattctataagacctataggacattttctccttagaagtttaagattggaatctactctggcaatgtggtggcctggaggcatatgtgcaaagggcaattaattatttgtttaaaatgaagtgccatgtatttataggcacaaaagaggttttacattaaaaagttaagtctcctttctaacccttctactttccttactcaaacctttagaggttgccagtgataccatggtcttgggtatctttccggatatattcagtgtacacatagcctgtacagttacatttaaacatatggtagcatgcatatattcatactgttctgcgctttaaaaaataacttaatggtcagccttggtcattactcaatatttacagaactcattcattatttttgtggttacatactatcccattatttggacataaaataatttatttagccaatcytcactgatggaaatttaggttgtttccaaccttatactattaaaataatatgttaataatcatttgtatgaattttatttactacatatgtgactatatccataaggtaaattattagaagtaacatttctggatccaaggtgtgtgcattttaaattttgatagtttttgccaacctgctcttcagggatcttatgctaattttaactcccctgccccagcaatgtatgagagtgcctgcttgttttatccatgtctttgtctatacattccctttcatactttttgatctttgccaatctgataggtaaaaaatgttatcacagtttttaatttgcatttttcttatggctaacattgaacatatttttatctacatgtatttcctctttagtaaactatctgtgtatcctttgctcattttcttattgggctattggaccccttcctgttgatttggtggaactatttatattttgaggaaattaaagctattttatattgaaaaaattagttcttttctatgatatgagctacaaatgctttttcacattttgatatgtcttttgactttatggtgttaagaattcgtttgcatgccgtagaatttaccagtcttttatgacttctgggtttttatcatattaaaaaatatgtgttctcctatattttcatctagcatatttggggtttttttctcatttaaatatttcttattttggtcttaggtgaagggcattctatttagataactggaagagttttggctgtgaaggaagtattctctttataatgaaagttgtttgggttataacagctggacatttcttattaattattcttctacagtgacagagtgaagcatcatgctttgtggtgaatggacagcaaggagacctaatagctgaagtgtagttggacttggagcaattttaagttacaagactactggcagtttcagagggccaggtcaagactggccaagttgccagaaattagtttttcgggcagtagtaaagaccacttcaaaggcagtctcagcatggtcaaagctccaagaagagagcattaacagaggtgattttagcatttggagaactccagatgagctatggtgttcatgaagatcttgagttgtttgtggacttctctcctgaggtagctgcagattacctgattgactctgttcattgagttcaaaagagggtctccaaggaattgagtgcagtggttctcaactctggctgctgtgctggaatctgctaggtagattctgacttaattggtctgaggtgagacaccagcaacagtttgaaaactccacaggtggttctaatgtgcagcttggattgagaaccattgttaatgtagtcagtttgctgtctctttgagtcagggattgcagtacatgcctcagtgcttccaaaatgtgcatacatatcacctggggattatgttttaaatgcagaatcaggaggtctggggtgaggcttgagattctgcctgtctgtcttaatgagctcgcagcttatgctgtggctggtccccagaccacacttgagtggcttgagtttgttacttgaagtgcaaagcactggcccacaccagtccacgagagtcaataagccatggtcctgctctcttgcagaatttgcttagtgtactacaaagaatactcaggtcaagagatccgctttccacttcctgctctgcctccaactaattagtgtaagacaagtttcttagaagtgctttagtccttcaccctcttatctctaaaatgagaggcttgaattggataaacttgaaggttccctttgtttttaaatcctctcatgcttgtccaggatgttttcagactctttctggatcaggttgttrtgtgggatggaatctggatcctgtaaagaccttgtcatcccttagaggatggaggcctaggccctgagcttatgatctagtgggagaaataaaactaacaaatgttaaaaaattaaagaagagttaaatgttcaagtgtaagctatgataagtacaaaaagaatgcagggaagctagagaggagtgttaattggaatggtcaggaaaacttcattgccaagggggaatttgagttgacatcgttttttcctgggctgggtggactgcagggctgacaagagtggtggttctcctgcttttgagtttgcttgtctctaaaaaagcatccttcaacagtgaagcacaaaacatatttttctgccttaaattaaaacaaagtagaagaaacatctagttctgtggaagtctttaaagggaaatcaaaatccaaaaaactctatatttaatttttcaaggctaatcttgactgagaagattgatactgaaaaaaaatcaccactaccaaatatagagcaaaaaacccagcgtacttccgtatcgataataaaaaaatggtattagaaattacctaaaatgtaagtaaattcctcaaattataagtattattgaaagtgacatatctctttatcttaactaattgggaaagagaccagataatttatttagattttataacataggtgcacacgaatttttgactcacctcttttaatgtcaaaggagatgtattttgcattgttattagaattttactaaattttatgttcccttaagaggaggttatgtgaccagggctcaggtattgaaaaatacaaaatagagcagttaccctcatttaatgagctatatttagtacacacagtgcagctccgtgttctctgaatatcctgagagttttggtttttatctctatggctagatcattttgaaattgcagactttgggtaatttttctctcaaacacatgctattatagttttaccgtatagtcatgctgcataatgacatttcggtcaagaacagaccacatgtacagtgttcccatgagattataatactgtatttttgctgtacattttctttgtttagatatgcttagatacacaaatacttacaaattttacacaaattttgttacaattgcctgcaattaatacagtaacatgctgtacaggtttgcagcctaggagcaagcaactatgtctatagcctacgtatgtaggaggccataccatttgggtytgtgtaagcacagtctatgatgtttgtacaatgacagaatagcccaatgacgtgtttctcagaaggtattcctgccgttaagtgatgcatgacygtatatggtaaatcttttatataatcaactattgattatctatctcaagattgacaatacaatagaaatcttctatttttaaactaataaacacaaatttatgttacttaatagcaaaattattttggttgcaagtgacagaaaacccaacccattgggtgaagcaaagaagggactttttggggccatgtaattgaaaaatctgagatagaactagtttcagatatggttggtgtaaataatgtagtcagaatgtggtttctctgtatctcatggtcttgctttcctctgagttgcagagccaacttcgtttaattacatgatggctgccaggttttttttttttttttttttgtggtctgtctggctcaaacctagtggagaagagaacagccacctttcccaaccccccaaaaccaaatcctgaatttcatcccattggctgtgatgtagatcatttgtcctccagagtctctggggccggcagtactgatgggcaggatcagagatctgtgtctatccctggagctgtaatcatttgtcctccagagtctctggggccggcagtactgatgggcaggatcagagatctgtgtctatccctggagctgtaattagtgtaacagtagccaatgctcctctaaggaaccattcccttctcaatcaggagaattgaggagcaattgttccttagaggagcaatgactactgctccaaaagaaggaagaatggatgtttkatgtgaaacagtggcaatgacaacagtcattacatatatctttctcagtttaagccaatgttaaatttacatttttctaaatacgaaggtttcaatggtagaagaccattacaggatctgctttgtggtcagatagtgtagagctggaatttaaaacagtaattccatctacaaaatggatatccttaatgaaataattaaaaatgacagtattggatatctgatggcctactttccaggcaggaatgatattaaaaatatttagcaacctgtgacagaggcatcaaccaatcagaatgagttggatctaaccaatcaacaactaaccagtgcagccccctgagtgagagctggctgtttgtcagcacaacttactgggaggcattcttaaggtgctgtcaagtgtcttaaaaaatagagttactgtattagtttcctaggaatgttataacaaggaaccacaaactgggtgacttaaagtaacagaaatttattctctcacagttctggaggttagaagtctgaaatcaagatgttggcagggtcctgctcccaccagaggctttagggaaggaccattccttactgcttctagcttccagtggctgatggcaatctttagctcctagatgcaccgctccagtcttcatcttcacatggctttcttccctgtttgtgtcactgcatccaaatttccctcttcttataggaagattaaccccttagtccttattattttaattctattaaaatgtaaatgttggtatgacaatgtggtggggaattaatatttattggcatgtatgtttgttcttggggaggtattatattcttacacatgactttattgaattcaaaaaagtgttaccttaaaaaaatggaactggccacaattagatgaacatcattcattagtgtatttaagagcaagtacaagaaacaggagacaaatactggtaaagggctcagaaaccatattttgtaaggagtatttgcaaatggtggtcatttcttcagcgcttggaagaacagctgtgtggaaaagggattagacttcagagggcagaactaagtaagttaaaggatgtgaaatacaggacaaaactttcttaatgtacaatgcactaaaatggaaatgaccgctgtgtaagggagtaacaagggccagttcctggaggtactcaggcagttgctgagatgcataagtacctttctgggacattttcatagagatcttgccttgagaaagaaattgaaatggaagctttcttgcagcttcaagatctatttcaagtcctaaaattgttctctatgtgtatgccatgaaaatcaatattaattatgtgacaagctatttctataagcttaagttttgttctgtgatcttggtgctatggactagtcaggaaaaaagggaaaggtttaatctaggagggtggaaacatcattaataaataagagaggtaggagaataaaacttgcatttattgagtacttactacgtacagggtgttggactagtctctttatccatatagtctcatttagtacatttagtttttcactgatcagtttggaacttatgggaagtggttcttaaaatgatgaattcttaaaataattggcattttcttatatattttttggtgatgaaacacaggactgttctgatggctacatgtgcaaaatacactttcaaattaagaatgggtctgtgatgtcacatctaggagcayctacccatggacagacatgtcttcccatggaggtgagtagtttaatgcatcatgttcttttcagtctccgtaaagtatacatttaaaaatgtatactttaatgactccatcgcattccatcctatggaagcaccacaattatatggcactcatattgaaataaaatactttaattctgttaagtaaatattttaaaaacttcaaacttcttcccactggagagagatccaattgccattggatcctgggcctgttgtagggggagaaggaggtattttcctttgtaatactgaaagcaagaattgtggtaaagttatataagatccactctgactccagattgtagtgagccgtcatacttttggtttctcttggacctgaataccacagatgccttctgttgtctattgatttttttttccaagtaaaattccctgaatatagccctagccccaggctgcttaatacttgattggagacctctttgcctgctctgcctttagccccttttcccttgaaaatatgctggatctgggtcttattccttaggggactttaaccttgacttgaaaatcttgctgaaccaaattttattatggtactaatgactgagtggttttctgagatattttcatttttctttttatcgaaatgcaaatagccttattgtatttcttgtgaaaaaaattgtatatacccattgtaaaaataaataatagagaaatatataaaaaggatttaaaaatatcccatatgtccttcagtagtttaccactggtaacattttagtaagtatcctttcacatatttctatcatatacacacacacacacacttttttttttttttgcaatgaacaagtatatcatggacatctttccatgtcagtaaatgcagatttccatagttctctttaatgcctccattgcattccatcctatggaagcaccacaattatatggcactcattgaaataaaatacttgaattttgaaagaggattggtgaggacctaattatttcagcacaaaagaagaaatcactagtgtttgaattctgagcatcctggggaaatgaaagaggtgamtttttttgtgtgtgtgcaggaagaactgtttctcagaacatgttaaatcaggcccatttgccaatcagacatcagcccccttgcctgtatatgatgctggcctgcaagtaactttcacctatttataattaggtttgcaagttattcttgagagtattgtgcttggtaataagctaagtgcccccagatgggtgcttgaatcttgattactgcttcatggttccaataaccaacatcaaatttgaagccaagcatattaggaagcttttcaattcattatatattaacttaaaaaaagttttaaaaattaacatagaaatggtgattttaaaaatgaattactagtttttgcctaacaagttggcagagatttgaaaagcactaaaaagtggtgttgacagtgtgagggaactgacactttctggttgatgttttaacttcacaaagtttaaagatgtgcacatactatgaataatctagtccaattctaggaatttagcctcataaaatataatttttttcaacatttttcatttccaacattttccaataaatttgaaacatatggaaaaattgaaakaattttgcagtgaatatctatatacttaccacctaaagtctaccattaacattttgctgtgcttgctttattatatgttgatccctctgtctattaatacatcttattttttgatgcaataattttaataaaagtaaattgcacacaaatactcataaaatatttgagtacacaaagatttacctgcaagtatatgagcccttatttataataggaaaaatgaaaacaatggaaatatacaatagtaatggattggttaattatggcacatctctagatggatacagtcattagaaatgatattctaggtgactgtttaattacgcaggttaaaggttcatgtcggccgggtgcggtggctcaacgcctgtaataccagtactttgaaaggccgaggcaggcggatcacctgagcttaggagttcaagaccagcctggtcaacatggtgaaacccccatctctactaaaaatacaaaatttagccaggtgtgggggcttgcgcctatggtcctagctactcgggaggctgagacaggagaattgagcctgggaggtggaggttgcagtgagctgagattacatcattggtgggtgacagagtgagaccttgtctgggaaaaaaaaaaaagttcatgttaagtgaaaaaaaggtagattatgtggtataaacaatagaatccgagtatggttaacattcttcaaactacattgactattacaattttaaattatgattctttttaaaatttatctcttcaaagagtgaaacctataactcttttctctcactcccttgaaatccctaaggttatttttgcttggtccagtgatttcatttggagtcactatccatccttgtaagcttccattactgctgtagctctggtaggcatccttctctttttttcccaggtaagagcagaagattttaacagcagaagtttagaacaagacagcccagtaccccatctttgtgtgtctcccagcttccccacctctctatagcagaaacagtaattggaagattacatatacatatacaaacatgtaatattcacataaggcctagaaataatttccccccttccaatcacataagattttcttagaatgtttttttttttctttttctttacatttattcttactctttctcttcaggaatttgctttaaaagtatatgtcctttatctctccttcttggtactcctcagacttatgcttagtgttttaaaagccagattgcttccttagactgtaaaccccatggaggtaagatgactcaatgagtatctgttatttgactaaaccttcaggtttaattacccatagaactagctcacttaacaaatcagatgcctstgtattttgatataaactggataatctagtgaattacttagaattgattaattatatgtgtattatacatatatactacatatacataatgtattatatataatatatgtaatatagtatattataaaaaagtatgggtgtatgtgtatatatgtgtatatacatatatatacatgtacacatatatatatacgtatacatacatatacacacataccttttttttttttttttttttttttacaggcagggtcttgctctgtctcgcaggctggagtgcagtggcacagtcagtcatagctcactgaatcatctaattcctgggctcaagtgatcctctcacctctgcctcccaagtagctgggactgcaggcatgcaccaccatgcctagctgatttaaraatttttttagagatgtggatcttgctctgttgcccgggcttgtctcaaagtcctggcctcaagtgttcctctctcctcagcttcccaaagtgctgagattataggcatgagccactgtgtccaggctgaattctaaaagagtttattttctactagaataacatattttttttcaacaatcaatttacatagaaaaatcaacaatgtttaaaaagagaggtttgcagggagtttttagtagtttgtgtttctgagttgtcacgggaatggaatcggatgataaacccttcatcttccagtcaactccagtgttttatttttaatatttggcaactcatagtaaatttaggctgcctaatttactcagattataacaacagcacaagtagaagaaagagtgctagacttggagatagaaattgttttgtagttctcttcgccatttactagtattgtaaccttgagtaaacttcagtgttctcattcaaactgtgggcccttcttacttcctgttttggttggatataacaagcgtacagtgctattattaatactaataatgtcacacttataattatctttttatggttatctcataattatgcaagaagaagcaggatgtgaatggagaaacatgaaggagcaggaagagagcagagaatgtaacacttcctttctttccatattctattcttacctttagacgttgggaataatgagtagcctccaagttggaaactaacccttattcagccaccaccaccagttatctcagagagtggtacagagacaagtgagagtgactctcactaaaaaacagtggtagactaattagagcatttaaagcattccatttgaactacatatataatgtcttactttcctagatcaacattagacagagatgtattttcctcttaagttctctctttcttcatcatagatttgtttataacttttatttagtcaatagtataattagaggtatggcaatttgaatttttttagtttttcattttaaaatacctcagatggccaggtatggtggctcacacctgtaatcccagtgcttcgttatgccaagaggggaggattgcttgaggccaggagtttgagatcagcctggacagtatagtgagactccatcactacaaaaacaagaaaaattagttgggcctggtggcatgcacctgtagtcctagctactctggaggctgggacagacggattgcataagcctgggtgtttgaggttacagtgagctatgatcacagcactgcgctctatctaatatgggcaacagaacaagactctgtctcaaaataaaaacaaaaaaaccaaaaacaaaatacctcagaattaatgttttatcttaatagatagtacatttgtgataccagtagaagatactatgacaatttaagtggaatgtaattagataaggaacagccatctactgtttgtttaaaaaatgcaatgaactgctaacaattttttttttttttttgaaatagagtctcactctgttgcccaggctggactgcagtggtgtgatcttggctcactgcaacctctgcctcccaggttcaggtgattctcccgcctcagcctcccgagtagctgggattacaggcacccatcatcatgcctggctaatttttgtatttttgtagagacgggatttcaccatgttggccaggctggtctcgaactcctgatctgaggtgatctgcccaccttggcctcccaaagtgctgggattacaggcgttgagccaccatgcccggctgaactgctaacattttaaaaactgagacctatcagagggtagagggtcaaaagagggagaggatcaagaaaaataactaatgggtaataggcttaatatctgggtgatgaaataatctgcacaacagactcccatgacacaaatttacctgtgtaacaaacctgaacatgtaccctgaactgaaaagttaaaaaaattgaataagcaaatttcatgaaagggattgattgtgctcatgatagatgaactcaaagaataatcctaatttgtacaaattatcaaatttagctgtaagtgattttacagactagattatctatcatgaaaaattattggtagttttgtgataattaataagttttataatcttgtaagcaactgcataaaacaacattatttttcatttcaaccatcgctgatcaaaagatacttcaactctgcactgaagagtgataaattcttattttactatggtccttgggattccaaaacagggtttaggtaaaatacatcatcttttgatcctaaatatatgatgatcaaaagtctaaatttttttttttttacatttttcttctaaattagttgtatttgtagatagttgaacaaccatacsaaagatatgtagatatgtgaatggatatcaaacttgagggaagggtttttgtggagttagagagtactatttgcttagctcccgatgtttttattggatgaaatattagattaattttttttatcaatgactttaacaggttctctttcaacacacatttatgccagcattaatgccttcatgtattaacattttaattcccccaaaataatacttatcatggtcaattacttctattacataccagttcatcttactagttgctttattatcttatttaatcttcagaaaactcttatgacaatagatattaatattaatatggcaaataaatggataagattagtgaaggtggataaaaacagttataataataataacaataacaatattataataaagacagcagcctaagtttatggaggactaactataggtactgcactaagtgatttgcatatattaattcatttcaactcatgatattgatatctttattctcttcactttattatgaggaaactgagacatgacacaaaggttaaacttgcctaaggacaatagctaggaagtgattatgttctggcttttgttaagttctggctttgggaaacagtagttcttaaaagttagtcatattaattaagacatttattgagagtaggtagtatgattttgcatgtgacatttctgaatttgtgagatgaaagtgagatgcagtttttgaacaagatattttctttaccagtgaccaacagaagtatgttgcatcaatttaaaatcctctaaatatagggccgggcgcagtgactcacgcctgtaatcccagcactttgggaggccgagtcggggcggatcacttgaggctgtgagtttgagaccagcctggccaacatggtgaaacaccatctctactaaaaaaatacaaaaattagctgggcgtggtggcaggtgcctgtaatcctagggaggctgaggcaggagaattgcttgaacccaggaggcggaggttgtagtgagccgagattgcaccactgcactccagcctgggcgagagagcaagacattgtctcaaaaaaaaaaaaaatcctaaaaatataaatgaataatttcaacagaagcaaacataatcgatgctggcttgggatatcttattttatgtgacacttattttcataaatgggtattgatactaccatatcactttatcaatttatgattttttttgtatttaattgaagacttttcttagagaaattgagatatcatttaatagtagtgaaaaacgtgatttaacaattgatctactttaataaacaggagcatattgtccttattgaagccttatttctatacatgaaacgataatttacaaatagaagtgggaaccaagccctatacttcaattagacaatttttgacgaaaattaaccattattaactcttaaaatttttgtggatatattattgcaaaatagctgctaaacttaagttttttttttaaggttctaaattaacttactggctaatgaagactagagagactagagttgagaaataaggtgtaagttttttttaaaaaaatcgtgtccagcactcatccactcagtaaaaggaaacagtatctagttaacttagatactgatttttaataataagtagtaaaaattattaatgaatgctcagaaaggggaaatatctgaaagtatttcctatgtaactcgtgttctagccaacattgctttgtatttttttgtctctaatgtcttcatttatgaagttttgagtcattttccatagaatagagataacctagattttgtcttttgattcacacaattcagctacctatacacactgactttaagttggtcagtaatttttatattattgaagtttgtgttctgcttgaagttcgattactgtagttcctcatccttttgcagaggtatcagaggtgggtaccaagcatattttatttatccatttactatccttattacttcagagcctcaggttgcaccttcagattacatttttaaaaactatgaaaatgatagagtcataaaaatggcaataatatactagtggaagaaaagatttttgtcttagggccttgtagttcactaactgggattttccttagaccagggcaggtagaatattatagaaagtgaggccctcgacaaaaaacaacctatcataaatttcctgaagcataaaactgagaatcagtaacaggagatgatctcmattgccaaggaacatattcaaagaatgatgatcttctgaggtaaccaggccttgaaatacactcatttgccctaaggattttattaggtggcttctaggatgagttctattttatatgtccaaaatagactcatatgtcagaatattttttttataatggaataaatggtgagccacagttctcagtaagcattaacaatttatctgtaaagcaactgctatttttggactgaactatagatgtattgatagatgtaaatgatgactaagaagcatgattacctctgtatttgggaatgtaattttaaagcagtgttaaaattccaggaagtctgttatgtttaatgtgcatagatgcaaatggaagcatgtggagtagtcagtatttatttattgaatgaatgaatctaatgctgacagataaatggatttttaaaggaaataactgtgaatgtagcagaccccaatcccacttttgtgttttacttaagatattattaaagggttcaaagacaaattaaaatgtaatttaatttaaagtgtaagtgtatgctatatagtagtgtggtctgtgagaggggagagtatggaatattctgaaaaccagtcatgtcagattaggatctttaattccagtaaaactggggattattgcactaaatatactatttattatacaaactatatttttttaactagtatataacaaaagtgtttgtttactcattcttgaaactaatcagaaagcaacatgtagagatgcggcactgaaactatttgaaccatctaatgaaatttgtgacttaggggatcttaaagcagtttagtgttctgctataaagccaggagtcttagatagaggcagggccttgcttcatattctgctgaatcttctttttactttaagcccttggtacctgagtaatagcactttgcaaaattcagagtgtgttaggttcagtaagagtctgtaacctaaatggcttcttaaggttacttctatctttgaaattgtctgtgctatattctccttggcaaagcaaaaagaaaatctactttttgaaataaatcaagttgactaaatatacataggtaactaattctctttttatgtattaagctagtagaaaagcctttgtaaagatacgtgccacagccattgtattttaactcagcagtaagttatatcagaaagttttctttacatatagttgtaattttgaggtatttttttaaaaatcaaaagtaagatcatttctagcagcagctgtatacttaagaggatactgagctgatgtttctgtacaaaaatcggacaggctttcattgtggagcatttatgtccaattgtaaaggtctaacttaggaagcagttgtttcagaggagggccatttaatacattattttaattgccctaattatacatttttcccatttcttttaatgaatttgggatgcttttcatagcaaagacttggaaccaacctaaatgcccatcaacgatagactggataaagaaaatgtggcacatatataccatggaatactatgcagccataaaaaggatgagttcatgtcctttgcagggacacggacgaagctggaaaccatcattctcagcaaactaacacagaaacagaaaaccaaacaccaaatgttctcactcataaatgggagttgaacaatgagaatacatggacacagggaggggaacataacacaccggggcctgtcataggattgggggagaggggaaggatagcattaggagaaatacctaatgtagatgacaggttgatgggtgcagcaaaccaccatttcacatgtataactgtgtaacaaacctgcacattctgcattctgcacatgtatcccagaacttaaagtatatatataattcttatctgaaaaaaaaaaagacacttaatarattgttgggggtttcaaactttaggtggctcttttttcatgaagaatttctgaggaagatatgttgactttataaccgaatctaaacttaaatatatatatatatcttatatatatatcaagtatatatatatataatcaaatttcaacttaaagtatatatatatataattcttatctgaaaaaaaagacaataggttgttgggggtttcaaactttaggtggctcttttttcatgaaraatttctgaggaagatatgttgactttataatcgaatctaaaataaatgaaagtgaaaccactacttaraactcttttctgcccctttgatttttttttttttgaagccagtagaaactccatatgtggagggagatacgttacttagaacatattacagtaagatttgatctcacaaaagattaagtagaatctaaaatttgagttttcaaaattattttattaagtatatttacaattttattccttagttaaaaagattaatttaaaaatactttatggaatgaagggaattcccattagcataattttctatggagggctcaaaaacaatcttctcatatatcctaaaggaattcattgttgaagtagcaatgtagaatctcatgatatgaatggcaagcttcagatattaaaatgattgttgaatttttttggtagcttgaatgagattgactacttgtctggatttttttttaactgttgggtaaagactaaccattgcatagagtatcatttttacataaaatcattggccagaacaatggcttatatagcccctgatatttcatccactaatacctgaaatgctcactatgaaagagactttattaaaaatgcagatgaattattttgggaaaagggaacaaaacattttcaaactggaatagtggttctgaaccctgtgactggactctaagctctgacttggttagatcacttccatcacaactgtgtccttagcatttagcacagtgcctggcacataaatgccagaaactgatatcgcttgtctcttgatttttctgggttagaactatmtagaatttyttctctcctcaatatacygcgaacttaamtaaaagtcagcaatattagtataaatattttgtcattatcagtttattatmtattttattaaaggatacttattaaataaagtggccaggaataatttgttaaagtttatttctgaatttatgtgcttaagggcaaataataattttaccttaaagcaaaaggaaataaccaaggattgcattgttaaaggttttcaaaagggagacatcaaagtgttttaacaatattgtttttgattgcataaatgtgatatgggaacttcaataatgctcttccatatggtgcctgcgaatttgctgttttggattgtttgctcttakcaagtataagtcttacgtatttgtgataagcattgagagaagcttcatgcagttcaagctaacctcataggagccttaggatakagattacatgtttgtctcagctacagttcagaatgcattgaaaagacccaggaaggctgtcaagttggcaatggcacctaaaggctgtcccgatggatgcctgagaaaatgcattttttggtcagtgaatgggagggtacaacagcctggcagactaaatctcgtctctatgctccaattgctcaactttagcttattttgaaggaaaagaaaagtagtaatctggaagggacaagatatttttagataagattattaaaatgactattggctattctgaaataacattattaattgttctctttccaataagtatttgtgaagcatttcaccctcagccttcctttaagttttttagatatgaaaaagaaggggaaaaatatcaatgtaacaattatcttaaactctgaaattcttctctctgtccacaacttccttattttcaactgtatttatgcttctctctgaacattctttgtatattctttttgtctcaaggtcctcaatgacatcagtcctcttttatttctcttgctttcttacttagtcttgaccttggctacttcagcaatgcccacaacagtacctaggttccatgtcccttggctgtatgcttcatgttacacctctattgccacttcccaatcctcttttacaatcccctctgtcttctttctttcactcccaggttttgtgaataagtaatctatagtacctggactttttcgttatttgttccaacttcaactctttttcttttggcttctaccaaaatcaagctatggaaattgcttccttctaagttactagttaccttacaatcaccacatctaatgscttcatctttcttgaccacgttgtaacatttgacactactgactaagccccttcctcttgaaattatctcatttttgtctctgtgacactggtgacaaggaatatattttttattcccccctttctaataggtcatttaactgttgttctatggcagtagtttgaacatctcccctaactcagagtccttgcaggagggttggaggtcaacctatgtaaatcaagatgaatccagagaggaggcatggggctgaaaatgagaatctgaatcaagagtcatgaatatagagctgatcgtaggggatcttgggaaattacctccaataaagcagaagtgcccccagctttccattttgacagcaggcatcctgataagtcagactgacttaaaaacacatggttggaatctggcaacaagaaacttggaggctgaggatggattccatgtctccctctgtctaccttatgaacctatcaaccgatcctggcttccataatcactcagcagttgggagagaggctgcaggagcacaccttgggtgtttctgaggtgggatgccaacttcgaaaaatgtttcttcaaatcatacttctttgatcacgcagggtattggaattaaccttactgccagaggtatctagtaccttttcctccatgtattataccttgggtccttggggatggctgagagaggtgcacatggtgatacgtgtagagggtagtggtgggaagcaagaggggctctgcactaaggaaagtaattgtcagtagaaggtgaagaatgttaagttgtgactttagattgggctgtgaaatagtcagcgtttttagcagtttgtctgaatctcccctccagaggggtattaggctagctgtgctaggatattagccaggttgcttgtgtgctgttaggttcctgaatctgggattcctgttcaagttagcagggagtactcaaaatcagagagatagaacaagtcagaatccattaaggaaagctgagttttaaacaccaggaagtgtccaaagaattggagggagtgatggtgtcaagagtttgaagttaggcagaagtaagactgcagtgagattaggtggggataaagtgaggaggatcctaagcgattaccctcactaatttcaagtatgctggaacttctttgcagttgatggatggatggtatttgactgtgtcaagaggtttgaggggttaggcaaagctaagaggtagtatgaacatgtaggtagaagaaccagatggaatctgtaattttcatgctttcttctggcctttgtccttgtctatgtattctttgtgctagtctcttgcttgctagaggttatctgctgagtcttcctggatggtatatagctgttgcagggattgtttggtagctacgggtgacagctctgcccagaggttctgggaagcagctgagtggaagctgtagtgtctagggttatatctctcctaatcagctgctcgttccttcagtgtaagatccatagcttatttatctttgcagcactttcccaggggatgattttgaatgaatgacatactggaaggtgtattataaagaacaatgaaattttactctgtagaaaggctttttgtgaacataaccaatgtgacattattgctctacaatgggcattttatgaaataatgaagaaaaaattcagaatatacatacatgcatctgctccaaggtatattaaaaatgaaattttaattgccgtttatcccaaaggaccaaaagtgtcttattggacacaagatctttttaaataaaagtcgatccaccttccatactggaacttttacatataagatgatgtagtttagtgttcttttaaaaaataataaacgaatgtttcaggaaacctgtgatagactgaatcaggtggaactgatttaatgttatggataattacataattagtgatgtaaaaaataaaccatactatctacttgatggactggagctgctgtgaaggaggtacataattatataatcagcatcctcctcctgtgctgattctaggtaatactttttctgacttgtctgagaagggatctcctgtcttatatttcttgatgttatttaagtgaagagagctgagtgttcagtaattctcaattcatgagctaggtctatgtgagagcatccactgaacccaatgactttcaaactttttaaatataaacccataataagaaatacattttacattaagacctagaacactccacacatgcatacctgaaaccaaggttcatgaaacaattcttactctttctgatctattctactcaatctaccctgcgctattttgttttttaaaaatgctggtcaaggcccagcaattgatttcagaacttactaatggctcatgagtcacattttgaaaatacaacctttgacccttagtggttgctaacatcagcagaagggatttggaaggtaacatatgggtctgccaggggctttgtgtagcaggtggtgtggcatggttgaaagaacaagggctttaaaattagggaaatttggttttacatccctgctttccctccttctgtgtgactttgaaaatattactgaacctcttaaagccacaaatctcttatctagaaaatgggatcccaaatacaggagttgggaggttgggaactgggagctgtatgtaagcatgtatgggtgtggatgtgtgtattaaatatcatgaagtaaaacagttggctaatgctgtgaaagtaaaacacatatgtggtaggtgcttcattaagtttaatttgctctccacatctttctcaactacagacacctcaattggagaaagatgtcattacaatccctacctcgcagggtggctatgaggatcaaataagatggtgggagccaaaggtttacaaatgttcacttttattagagtaaccttaaggcagctttactgtttcagaataaatctttgtgtgagtagaatggtgagtcctgcaaatggtaagtgacaaaactagaaaacaaaactggttttgaaattctgtatcataactgttagtagcaagacttgtttggagatacagtggtactatgtgttgacactgaaatgctgctcccaaaactgttgaaggatgatttatagtgtttatagtgcctattataaatcacaatatacatttgaagttccatattccattctatataaaattattccacaaagaactttgcttcatcaagacctggaaaatgaacacgaagacaactaattacccttttgtataaaatttctgtcaatttttctttacccaaagtagaatacagtataataatttaattgtaagacttagaaaaacgtaaacgccatctcacaatgtgaaaacttgggatggtgggggagctttctattgtacttttttatatttttataaaaccccttttttctttaaatatgttatagtttttacaacttctgcaatagtttatgactttgaaatgctagttcctttctagttttaattttggactttttttgcctgaaaggacattttttggttttgttactatctgtgctcctttctttcattcatcttttctttggtattctactgagattgtgattatttagtggtaacctgggctttgttggttatgtggaagggacataaatcagccaaggcaggtatgaggcaatgacagctacaaagcatcttctccatatctcttattctccacggtacctaatctctggttgctccaaaatgattcattctcactttaagcatatgttggttgattgcacttaatttttatgccatttctaagtttccagtcccttaacttgaattagaaaatcacctaacactttatgttaagtttgagtcacacttagcgatagtcaggagaaaggacctggctcctttaagacagaagcaccttttttctctgccagaaagctcattgtaaaactgaaggacttaaccaaaaagggtttcaatgtaaattgaatattgatagagaagggaggttaattggccttagttacttggttgctaaggtagcattttcctgattgggaggagaaaccctcctgggtgttgcacagcttcttgtggacctaagatgctttgttttatctcttgctttctgtttctgagttggaagaggaaagagcagaaagatatcataggaatgaaaagctgcatgaagcagatggttaggctctctcttcgttacagaaagagagagagctaaatactgactagcaacaagccagtgccagcaaggactctttgtttaaggcagacggttggaaaataccataagggcaagatataaagagcttgctgggaggacatagagaggttagaccagagtgttttcagtgcctgaaacatgtaggcaagagaaatcaaaggctattttgaatggcatccaacatctgtgtgaaatcatggggttaaaatgttttcaatatggttagatttattaagaaaaattatttagtttgtatttagttgtttgtgttttgcaggttttatactatattgtatgtttagctaatttagaatttgttaatctataactatttcaacaaaatgttataaatatctcatgttattgcatagttcatcacttaataatgaaagtaactttggagtaaataaattacaaatttttattgaaatattttttcaaagcaaaaatgtctgtgtaggtcaggtgcgctggctcatgcctgtaatcccagcactttggcaggctgaggcaggtagatcacttgaggttaggaattcgaggccagcctggccaacatagtgatatgctgtctcactaaaaatacaaaaattagccaggtgtggtggtgtgcaccagtaatttcagctactcgggaggctgaggcaggagaatcacttgaacctgggaagcagacattgcagtgagctgagatcacaycactggactccagcctggacgacagagcaagactccatgtccaacaataacaacaacaacaacaacaaaacaacagcaacaacaaaaagtctttatagattgtctattcatatatgctaggctctctgattatacttaagtagtttgtaaagttagtatttccacatactgaatgatactccattaaccctaggagttagtgccgatacttatattttgcttaatttcatttttttccttactgattccttcaacaaacatgtttttggctatcttttgagcatcgggtaccgtgctgaaggatacaggcataaaacactaggaaatagtgrcacacttctcaggagagtttggaaaatacaagtatttttactggtattttctgatttgtaataagtttcttaggtcttcttcattatgggtattgaatgttattatttgtactgaatcttatttaaaattttaatggcaattttaattgtaaaatcttttcaacagtattattatttttgtggacatatacttaaagagaagactagaatttcttgactcctcctaaaaccttggaatgtcataggagaatacagaaatcctccttggtaacttttcttcaatttaccttaggtttcatggccatgtagttcttgtgttgtgagtgtagcaggaggatctcagacaaaaagcaaatgtggtaatacttttgagggcctctgattatagtaatattctcaggaaagctagtttaacatggaattatttaagtgtagccagagagcttagtaaatgtaatgatggtcatcagtgatatactagaagtcagataatattatcaagtaaaaaaattcatagaatagtagactaaattggactccctcaattgtatagtagtaggataatatgttaaatatgtgaagagtactcagtggtcctttttccttataaatattgagatacaggtacattctggttgtttaaaaaaattgtatgctaaatccacattttcagatcgcctaattctaatcttgctttacaatccattggtttaggcttttggtagccattgtaatttggattgcctttcaaagatttgaggtttggtaaatgataggtgtcttcagggagaagggagaacaataattttgagatccagctgggcatggtggctcacgcctgtaattccagcactttgggagttcgaggcaggcgacgcttcagctcaggagttcgagaccagcctgggcaacatggcaaaaccccatctctattttaaaaatacaaaactagccaggcatagtggcgtacgcctgtagtcccagctacacgagagggtgaggtaggaggatcacttggatccaggaggcagagattgcagtgagcagtgcagtgagatcataccattgcactccaagccttggtgacagagcaagaccatctcaaaaaaacttcactgaaaaacaaaaaaatagactaacaaaatataagattcagtgttaaaaggtaaatattttatagagattttgagcagaatcatgaataaatgagagaaactagcatttgtaataataatattttgtgggtttttggatgtcctgtttaactcagtatccattactttataagtgtattgcttatttttttgtagctgtaaaagagactatgctgagctcagattaaaaawttttttttttttcagaactcaactgcttctattaagatatgaagctcagctagtaaactcattaagtaaagaccctaggcagttctccagtgctgagcctgaaagcgcggtagtgcagacgtctttgcatcaccgtcatgaatgaccttgaagaaagccagcactttataaagcaaaatcctgtctgtggcacttcgttctgatttgattgatgctttagaaaaagctgtaagattttcttttctttataatgtggggtatatattctttatacttcatagattttgcacttgtctggagtattttgttggcaggttcttataggttctgatctttcactgactgtagtacaagtaagggatgaaatcactctcgtttgatcaattattattagggagtaaggtcttagtgcattgggatcatggtttttaacgatggaaaaatactgactttctaacttaagtgtaatatggtcatttttcttcgattataatttttcagacatctcagttgattgaaggttctttaatactgagattctatgatttatattttacagaggatatacattcttgtctggccactatcccacgtactttcttggatggttagttcccctctttttagttttttcctttcatatgcagtaaaggcttttagtacacatttttgtatccaaagaagacaccagaagtctgagaagataaaatgattattttacctgattggagttacttgggcatttcctgcaaaagaagctatcagacaaaggcrcaatcattcctatgactgctgtaacactcctataggaaaagtggggaaagcttcagcattttggctctggaaaatgtgtgtgccaggtgtggtggcacgcgcctatagtcccagctactcaggaggctgaggcaggaggattgataagtctaggagttctggaatgtagtgcactatgtcaactgggtgtctttgctaagtttggcatcaatatggtgacctctcgggagcaggggaccactaggttacataaggaggggtgaactggcccagattggaaatggagcaggtcaaaactcccatgctaaccagtagtgagatggagcctgtgaatggccactgcattccagcctgggtgacatagtgagacccttcctctaaaaaagaaaaaagaaacttttaataaacaaaccaaaaaaagaaagtgtgtatgagctgtattgggccactggggctaggtgtttagggattaacacaggcattgcagtgaggtaaaggtggagtgcatatcaattgtaacctggtgaattgcagaggctatttagagtcccccctctaccaaggagctgtggcagccagtgaattcaaactccagtatcatacctccattgttcaggatctgaacttattgcttctgatctatgcatgctaatgggactctgaattttgcttcttgtttagccctcttttctgcttttatgtgtactttgtctagtctgagtctccatgtgtttctaacctcattcttgtagtttcattcagattcttcatctgtctcccttggtgtcattatttggtttgatgctctttggttatatctgggcaaagccaattgtattagtccattttcatgctgctgatagagatatacccgagactaggaaggaaaagaggtttaatgcacttacaattccacatggctagggaggcctcacaatcatggcagaaggcaaggggaacaagtcacatcttacatggatggcagcaggcaaagagagagagagcacttgttcagggaaacttttttttttttttatatactttaagttctagggtacatgtgcacaacatgcaggtttgttacatatgtatacatatgccatgttggtgtgctgcacccattaactcatcatttacattaggtatatctcctagtgctatccctccccaatcccccaccccacgacaggccccagtgtgtgatgttccccttcctgtgtccaagtgttctcattgttcaattcccacctatgagtgagaacatgcggtgtttgtttttttttccctgtgatagtttgctgagaatgatggtttccagtttcatccatgtccctacaaaggacgtgaactcatccttttttatggctgcatactaatccatggtgtatatgtgccacattttcttaatccagtctatcactgatagacatttgggttggttccaagtctttgctattgtgaatagtgccgtaataaacatatgtgtgcatgtgtctttatagcagcatgatttataatcctttgggtatatacccagtaatgggatagctgggtcaaatggtatttctagttctagatccttgaggaatcgccacactgtcttccacaatggttgaaccagtttacagtcccaccaacagtgtaaaagcattcctaattctccatatcctctccagcacctgttgtttcctgactttttaatgattaccattctaactggtgtgagatggtatctcattgtggttttgatttgcatttatctgatggccagtgatgatgarcattttttcatgtgtctgttggctgcataaatgtcttcttttgagaagcatctgttcatacccttctcccactttttgatggggttgtttttttcttgtaaatttgtttgagttctttgtagattctggatattagccctttgtcagatgagtagattgcaaaaattttctcccattttgtaggttgcctgttgactccgatggtagtttcttttgttgtgcagaagctctttagttgaattagatcccatttgtctattttggcttttgttgccattgcttttggtgttttagacatgaagtccttgcccatgcctatgtcctgaatagtattgcctaggttttcttctagggtttttatggttttaggtctaacatttaagtctttaatccatcttgaattactttttgtataaggtgtaaggaagggatccactttcagctttccatatatggctagccagttttcccagcaccatttattaaataggaaatcctttccccattgcttgtttttctcaggtttgtcaaagatcagatggttgtagatgtgtggcattatttctgagggctctattctgttccattggtctatatctctgttttggtaccagtaccatgctgttttggttactgtagccttgtagtatagtttgaagtcaggtagcatgatgccttcagctttgtccttttggcttaggattgtcttggcagtgtgggctcttttttgttccgtatgaactttaaggtagttttttccaattctgtgaagaaagtcattggtagcttgatggggatggcactgaatctataaattaccttgggcagtatggccattgtcacaatattgattcttcctgtccatgagcatggagtgttcttccacttgtttgtgtcctctcttacttccttgagcagtggtttgtagttctccttgaagaggtccttcacatcccttgtaagttggattcctaggtattttattctctttgaagcaattgtgaatgggagttcactcatgatttggctgattgtctgttgttggtgtataagaatgcttgtgatttttgcacattgattttgtatcctgagactttgctgaagttgcttatcagcttaaggagattttgggctgagatgatgaggttttctaaatatacaatcatgttatctgcaaacagggacaatttgacttcctcttttcctaattgaataccctttatttctttctcttgcctgattgccctggccagaacttccaacactgtgttgaataggagtggtgagagagggcatccctgtcttgtgccagttttcaaagggaatgcttccagtttttgcccatccagtatgatattggctgtgggtttgtcataaatagctcttattattttgcaatatgtcccatgaatacctaatttattgagagtttttagcatgaaggctgttgaattttgtcaaaggccttttctgcatctattgagataatcatgtggtttttgtctttggttctgtttatatgctggattacgtttattgatttgcgtatgttgaaccagccttacataccagggatgaaacccacttgatcatggtggataagcttttggatgtgctgctggattcggtttgccagtattttattaaggatttttgcatcgatgttcatcagggatattggtctaaaattctctttttttgttgtgtctctgccaggccttggtatcaggatgatgttggcctcataaaatgagttagggaggattctgtctttttctgttgattggaatagtttcagaaggaatggtaccagttcctccttgtacctctggtagaattcagctgtgaatccatctggtcctggacttggaaacttctgtttttaaaaccatcaggtctcatgagactctttcattatcacaagaacagtgcaggaaagacctgcctccataattcagttaccttccactgggttcctcccatgacacatgggaattgtgggagttacaattccagatgagatttgggsggggggacacagccaaaccatttcagcaatcattcagttttcttgatagactttagctcctgccctctaaacatctgtcatatgaagataaaagggtaaaatcagactggcttttttcctagacaccttggccacaatgatttataacaattcatatattctggagttcagtgtgagaaagttgttgaaatatgagaagagtaattcagaaatacctaaacacctactttcttatatcttcaaaatttgttaaacccagaaatatctcagtaaataggcacttaggctcagtttctttttctttcaattacttgattaacgtaatgtctcatgggcagcttcattttaaagaccctcttgagagtctttgaacttggttaatttattctaaatccttcttatattttgtggctgatggactttgagatttttttccctttttaaagtatactacaaatacattgacactaaaacaaattctcagacatttatccaactgttagtaatgtttctttttttttttaactgaactaaaatggttagaaattcattcactttcatgaaatagaaaccatatcaggaaatatggaagactggtgttttagtaaatagagatatatttataatttttccagataattccaatcatggttgtcttagaaactatgtttgtaaactagataaacaactatagtagaaaattaaaaaatactggggggaaggttccaacatggccgaataggagcagctccaktctgcagctcccagcgtgagcgacacagaagatgggtgatttctgcatttccaactgaggtacygggttcatctcactggggcttgtcagacagtgggtgcagcccatggagcagggcgaggcatcgcctcacccgggaagcacaaggggttggggaattccctttcctagcaaagggaagctgtgacagatggtacctggaaaaatgggagactccaaccctaatactgtgcttttccaagggtcttagcaaacggcacaccaggagattatatcctgtgcctggctcgtagaatcccacccctacggagcctcactcactgctagcacagtagtctgagatcaaactgcaaggcagcagtgaggctgggggaggggcatccaccattgctgaggcttgcgtaggtaaacaaagtggccgggaagctcgaactgggtggagcccactgcagctcaaggaggcctgcctgcctctgtagactccacttctgggggaagggcatagctgaacaaaaggtagcagaaacttgtgcagacttaaacatgcctgtctgacagctttgaagagagtagtggtcctcccagcacagagtttgagatctgagaacggacagactgcctcctcaagtgggtccctgacccctgagtagcctaactgggagacacctcccagtaggggccaactgacccctcatacaactgggtgcccctctgacacgaagcttccagaggaaggatcaggcagcaacgtctgccgttctgcaatatttgctgttctgcagcctccactgccaggccaacagggtctggagtggacctccagaaaactccaacagacctgcagttgagggtcctgactgttagaaggaaaatgaacaaacagaaaggacatccacaccaaaaccccatctgtatgtcaccatcatcaaagaccaaaggtagataaaaccacaaagatgcagagaaacaagagcagaaaagctgaaaattctaaaaatcagaacacctcttctcctccaaaggaatgcagctccttgccagcaacggaacaaagctggatggagaatgactatgacgcgttgagagaagaaggcttcagacgatcggtaataacagacttctctgagctaaaagaggatgttcgaacccatcacaaagaagctaaaaacctggaaaaaagattagacgaatggctaactagaataaacagtgtagagaaatccttaaatgacctgatggacctgaaaaccatggcacgagagctacgtgatgcatgcacaagcttcagtagccaatctgatcaagtggaagaaagggtatcagtgattgaagatcaaatgaattaaatgaagcaagaagagaagtttagagtaaaaagagtaaaaagaaacaaacaaagcctccaagaaatatggaactatgtgaaaataccaaatctacgtctgattggtgtacctgaaagtgacagggagaatggaaccaagttgggaaacactcttcaggatattatccaggagaacttccccaacctagcaaggcaggccaacattcaaattgaggaaatacaaagaacgccacaaagatactcatcaagaagagcaactccaagacacatcattgtcagattcaccaaagttgaaatgaaggaaaaaatgttaagggcagccagagagaaaggtcgggttacccacaaagggaagcccatcagactaacagcggatctctcggcagaaactctacaagccagaagagagtgggggacggtattcaacattcttaaagaaaagaattttcaacccagaatttcatatccagccaaactaagcttcataagtgaaggagaaataaaatccattacagacaagcaaatgttgagagattttgtcaccaccaggcctgccttacaagagcccctgaaggaagcattaaacatggaaaggaacaacggtaccagccactgccaaaacatgccaaattgtaaagaccatcaatgctaggaagaaactgcatcaactaacgagcaaaataaccagctaacatcataatgacaggatcaaattcacacagaacaatattaaccttaaatgtaaatgggctaaatgctccaattaaaagacacagactggcaaattggataaagaatcaagacccattagtgtgctgtattcaggagacccatctcacgtgcagagacacacataggctcaaaataaagggatggaggcagatctaccaagcaaatggaaaacaaaaaaaagcaggggttgcaatcctagtctctgataaaacagactttgaactaacaaagatcaaaagagacaaagaaggccattacttaatggtaaagggatcaattcaacaagaagagctaacactcctatatatatatgcacccaatacaggagcacccagattcataaagcaagttcttagagacctacaaagagacttagactcccacacaataataatgggagactttaacaccccactgtcaacattagacagatcaatgagacagaaagtcaacaaggatatccttgttgaacaatatccttgatgaacatggaggcctgtcatgggatcgggggaggggggagggatagcattaggagatatacctaatgtaaatgacaacataacgggtgcagcacaccaacatggcacgtgtatacatatgtaacaaacctgcaccttgtgtccatgtaccctagaacttaaagtataacaaaaaaaaaagaaaattaaaaaatactaatgatacatgtagaatatagaattgcaataggtactcactaaatttacaaaagtgttattctattaagttagtaaaaaatgggtatttgcacacactaggtacaaagtttaaacaaggcttttagaggaggtttttctatttttattgaaaagctgtattaaaggactattttacttatttctaattatcccctattagaccctcaaaatacatttaaaagtcaagttattttatttttatttgtgaattgattgtgggtttattacagtatacattttggaataataatggattacaatagataatattgaattaaaacaagaacttaagaattttaaataaacatgtcagtagatgtcaaatttaaagtcttgtatttaaaaaattcttaactgggtcaatgatagattcagtaaaaggtgtttgattgactttttcaccaaattaccatttcccattatttactaattaaattctcaacctttattgaataaatactgtattcttagtwtagagaaaaaataatcaagacattatccttactttcaaaaaatgttttaaaagctacatattttaataaacaattgagtggattctacaaagagaaaatgttttctggttactgttattaataagccaatcataatttataatgaaataatggaataaaatttaaaattacaataaaattaacaaaataataccatgaaaacaataacaatagccaagtaaattagtatagtaatagctttagggatatatttggcacctcagttgggatgagtggactagttgggactgacagggcatctctctttctctctacccctacatggcctctctacatggctatcttaactttcttccagccagtttgagaatatggctttttcaggatagttggacttcttagctgtggtcttcattctctagagcacatagttcaagagaccaacatggcagctgaagggcttcttataacctstccttggaaatcatgcattctcttggtcaaagtgagtctcaggaccagccaagattcaaaggcaggaaaccacacaagtgcatgtgtatctggtttgttggtagaagtgggggagagaatgaggggaggcatcttaagaaattagctatcacagtgtataatattccttcataagtacataatcatttcactggatatttcgtaaacatcagtgtacttctaaaattaaaattcacattaattttatgagtaaaaatattttatagccaaaatatgctttcatctgtatatttgtaagagttttagagtctagatcgtattttgttacaatgagaaaaatgtcttttcaaaataattgccttaatgttttcatttgagttcatgttgagtatccactgggtgcaggatattgtccaagtcattagaggaaagattcagggaattataagagcttttgacctggaactcaataaaatgttagtgttttagacagggtttatgcatcaaaagtcaaatggcaattcacagcaatgacataaattttcaaggaaaggagaaataaacatggtttgaaataatttaggaaggctttgtaatagaattgaaactaagctaaagactgaaggatgggttatattttgagtgatgcaacttgagtatattgagtagaagtactcaatatattgaaaagtgctatgtaataatggaaattattattaattgggcttaggggaattattattaattgggcttaggggatctgtctgaatggaacagatccacataagctatggctagatggtggagagcttttgtaggtggcatctgtggcttttccctgtgtagcactcattttctacttttctgactgtgtatttctatattgtcacttattaattcagcaaatattactgacttcatataatactctagatactgttctatgtgctggtgatatagtggtgaacctgactgtcaaagccctgctctcagaatcttcccctatccaccccaactggacactagtttgataggacagttaatcaaaatactttgccttcctctggcccagggtgagcacatgactaactttagagtggtacagggctgatatccttaaaaatttgctgagagggtagatcwtatgttaaggatgatgataatgatatcatcattataaataaagagggcaggaagaaacttttgcaggtgatagataggtttgtgacatagattgtggtgatggttttatgggtgtatacttatttccaaacttatcaagttgtaaaatatgtacagctttttgtwtaccaattataccttaagaaagtgatttagaaacaaaaataaggaagcaaagagataaataaataaaaagaaagaaaatggttggtgttgactcatttcagtggtgttgccctgaagagtatattagctttttccactcactttcccagagctaacatggttccttcttcgggcatacttttttagtttttctttaaattttgggatctaccactcatcttttaaataaacttttttttttctgcttaagttagccccagaatcagtttctattgcttatagacaataagccttaatatggtattatatgactatttcttcttctgggagatatgaactatattaggtaatcagtaagactcttcacagattttggatacagagagagttattttaaagaagacttggatatgtattgataggttagagaagggaaaaattgcaattagactgacaaattagaaaattgttgaaatacccaggtataaatagtaataaataattgaattaaggtgattgcaggggaagaaagaagtgatgaggaaaagcagagctgggactagggtgaggcaagagagacacactcaactagagtgcgttcctccttacatattgtgctgtaggtgagtctcttacctcatcctagtcccagccctggagatgacatttaaagaaaaaattgaaaggcttcgtgtgactgattggatatagaaagtaatcgtaattataatgagacctaacacaatgtgtaagtactattctcagcacctctgccttcaactcaaaatacccatgtggggtaagctttcttctctccattgtcctgttgagtaccctaagggaagcacagttagagggctaggtcacttaggtagtaagggaaagagctggagtacaagaaattagatagacggatttaatgtaattcctatcaaagtctaataaaattcattgtagatgtaaacaatattgtcctaaaatttatatgaaaaggcaaaggaaccagawtatttagaaccttttttaaagaaagaataaaatgggaggaattagtttacctgattccaagacttactatatagctacagtaataaagattgtgtggtattggctgggcctggtggctcacgcctgtaatcccagcactttgggagactgaggtgtgcagatcaccttaggtcgggagttcgagacacacatggagaaaccccgtctctactaaaaatacaaaattagctgggcatggtggtgcatgcctgaaatcccagctactcaggaggctaaggtaggagaatcacttgaacccaggaggcggaggttgtggtgagccgatattgcaccattgcactctagcctggacaacaagagtgaaactctgtctcaaaaaaaaaaaagattgcatggtattagtggagggatagacacatacagcaatgggacagaatagagaacccagaagtaaagccacataaatgtgtccaaatgatttttaacaaaagtgcaaaaacaatttaattgtgaaaagagagccatttcaataaatggtgctgagcaattggacatccctaggcaaacaaacacaaacaaagaaacaaacataccctgacctcagtctyacacattttacaaaaattatctcaaagtggattgtggatttaaaggtaaaatataaaactgtaaaacttttaggaagagaaaaaaatagagaaccttgggatctaggattagccaaagaatttttggatttgagaccaacagcatgatccataaaaagaaaaactgataaattgaaatccctcaaacttaaaaacttgtgctctaagatcctattaaaaggatgaaaagaaaagccacagaataggagaacatagttacaaaccacatatccaaaaaaaggactagtactgagagtatataaagaactcccagaacttaacattataaaaacagtccaatagaaaaatgagcaaaagactcaaagagtcactgaagggaatatatagatgacaagcacatgaaaagatgtttaacattattagcttttagagaaatgcaaattaaaacaacaatgagatatcactacacacctatccaaatgccttaaaaaaaaaaaaacccaaaaccaaaccaaacaaaaacagttataacaccagatgctggcaaggatgcagagaaactgaatcactcaaacattgcttttgggaatgtaaaatgatatagccactctggaaaacaatttggctgttttttagaaaacgaaacatacaattaccatatgacccagcaattatgcttctgggcatctatccccgagaaattaaaacttatgttcactcaaaaacctgtacacaaatttttatagtagttttatttgtaatagcccaaacttagaaacaacccacatgtcctttaatgggtgaatggttaaacaaactgtggcacatctattccattattctattcagcaatgaaaaagaacaaattattcatactgcaatttgaatcaatggccagagaatgatgctgaatgaatagagtcagtcttacaaggtcatgtagtgaatgattccatttatataacatttttaacattataaaacaataaattggagaacagattcctggttgtctaaataaggggtggggataggagggtggtgggtgtggctgtaaatgggcaacaagtgggatccttgtgatggtggaaatgctctgtatcttcactgtatcagtgtatcagtgcactgcactgtatcagtgcaaatcatccttgtaattttgcagtataattttgcgagatgttgccattgggagaaattgagtaaaggacataccatatctttatgtattatttcttacaacacatgtatatcttacctgtgtaagtataatctcaagattaaaagtttaattagaaaatgattttaaagctgataactaggaggatgaaggtgctttttaatataattaggaaaatktccctccttcaatgcaggtgattttaataatccattgaaaaaatccaatgaaataattaattcacacaaccatgatggtgtttgataagcttctacacatcttaaagatatttgtaattttacagagagcttactgacagaaatgaatttctacttgatgtgatttcaggcaacatgaccaaattggtagaacagtataagagatattttggggaaggaataatgcttaggcagcctctcttttcttgggaccccatctaggagtcagctctgttctgctatttctgcctttaaaaaatttgctttcttttttcaagagatggtatctttctgtgttgtccaggctggactccaattcctggcttcaagcaatcctcctgcctcagcctccttaatagctgggattacaggcatgagccaccatgcctgacttatttctgccttttttttagcttttttcctctccaattcagtggcttcatgatactcataggggaaattttgacaatggagtagagctaaaaggaggcaattcaactgtgatcatttgagtatatactttgcttgaaagttaggaactggggttctcttttaacagagatcttcttaaacactgttaatttgcttttttggtagcgagatcagatttaatcttactattatagtgatttccataraatatcctcttgcagatttcactgtaaaggaccaaaactcccaggagacctgtatgttgacaaagtcatacctggaatttaatgagatctatttttccccatatttttacaatgtggaaaaaattgacttgaatcttatctcatatttgtagattgcagtgaagacttctcaagaagcattttcagttggataaatgctgacttaaggtcgtttggttaatacatagtcagggagctgtagaaaccatattacaagaccagggttaattactaccagtaaaatcatattacagtgaacacaatactgaaaaagttttctgaataataagactatttccacatcaaaatgttggaaaacacatgtttctgattttcttcttgaaacatagaagaatatttataataaagtatgcatatacttcaaatggatatatggagttttttatatgaacactaccaatttagtttaatagcttttgtatttgaaggtgggtttgaacatttttcttttggattgtcccattaaagtattctcaaaatttagtatatggtaaaagtactactcaaatcaaggggaaagaatggttatttattaaatgttattaggataactatttggataaacaagattgaatactacattcatatcatatgccaatataaattaaactgctaaatatacagaattaaaatataaaagcaccagaggaaaatataggtttacattttatagtatgaaatgacaaaggcttttaaaacatgatattgataaccaaaaatagatatttctggtatctactggtatataacaaaccatctcaaagcttaatggcttgcagcaacgtggtttactatttctcaagagtctgtagactggttaagcagttctgtaggtctcacctggagtcaattctgaggctgctttcacctggtgagtggccagaggtaaagggactaagaggctgctacctctctctccctgcagtgtcttaccattcaactgggtagcccaagcttctttactcagtgactgggtcccatgagactgaaggcagaaactgtgagactcctggaagcttatgctccagagctcatgctcacatctgtcacatcttattggtcaaaagaagctgcaagctcagccagatattagggtgtgaataaatagaccctacctcttgagcagcaatatcacattgcaaagggaatacaaacatggtgaggcataatttactggaagccattatcatcattacctcctttaatatctcttgatatccaaatgttctacctgaaaacaagaatgagtaggtttagacaaatattttagataaattctttactatctgaccttttgctacttgctaccagaaactcaagatcccgataaattaggattatgttgtaagcttgctatgtaaatttggygactatacttgcactatcctaactcagaaatacaatagctttatcactgactttaagcaatttgattatgcttggtgtagttttcttcatrtttcttgttcttgaggttcattgaacttgttacatatgtggttttataattttaaacatatttatctctctccccatttctcttctttggggactccaattacacatatattaggccactggagattgccacatagctcactgatgctctgttcatttctttagtattttttctctaacatttcattttggatcgtttctattgttatgtcttcaagttcactaagcttttcttctgcagtgtctaatttttctttattcccttctcagtcattatagttttcatgtctagaagtttcatttggctcttttgaaaaatatcttcagtgtctctgcttaacatgttcaaaccttcctctagctcaggggatgacaaatggcagcccatgagtcaaatctggtctaccacctgtttttgtaaatagttttattggaacacaactatgcccatttgtttatgtatttctgagtcagtttcaattgattaatttttatcttcattatagctcatattcttttgcttctttgcatgtatggtaattttttatcagatgccagacatggtgtattttttcttgttggatgttggatatttttgtcttcctataaacattttttgaactttgttttggggtacagttatgttatttggaaatagtttgatcctttcaagttgtgctgttaagtttttgttaggagggacccagcagccattagtctaggggttattttgccccattacagaggcaaagctcttctgaggactttgctcagtgccccatgacttacgactggtgagaacccaaatgattcccagccttggtaagtgtcagatattgtttcctctaattgttttgtatgattcttttcttgacctgggttctttccttatacacatgagccgatctgtacttagctgaagatttgagggacttatttttctatgctgctctctccagtttcagcacctcatcgcgggaagccttatggactttgccycggttataccttcttgcactgtggcctgaaaactgtccaggcaataatctggataatttgggcttgccttgcttttttctcatatctcaggaatcactgcccatttgttgcttgatgttttgaaaaattattctttcatatattttgtacagttttttagttgtttcaggtagcaagataaatctagttcttgttactccttggctcaaagtagaaatcttcagaagcctaattacttcagatggcaagtgatatttgcattttaccatattactaataaataacaaataataatgatatatataggtgacaaaacgggtactaatacattctgttgagaataaaaattgttacaatctttctggaatgctatctggtaatatgtatcacaatttaaaatagttatttgatgttgcagttccaaatctagaaatacatcctaagcaaatacgctcataagttttaaaaagtattttttaaataaaaatatttaaaaagtgtttaaaaagtagaattattgataaaaccaggaaataacttgaatgtcaattattagttaatttttgcatatgcaaatatttattacttaaaaatcctaaaataattacctttgcatgtttttgtaattatttccttagttgttaaatatatgcatgcatatacattgagtataccactattttactattacaaatattgaagtggatgtttattaacatgaaaagatgtcatcaacatattaagtgaaacagcaagttacgaactagtattatagatgatacagtggaaaatatacaaacacacgaacacatgcacacatacatatacacatataatattcctctgggaagtagaattagaggtgattttcattttctagtttctgttcttatatatagaatattaatagtgagcatgtatagcttttatagtcagctaaaaattaaataaataaagcttttactacatttttaaaatgaagataacagaaaagaaatctgtatatagaagggttgcaaagttcttagaaactagattataaaatggagataaaacctgtaatttgttagttgggaagtctgagtggtgggaagctggatctgagtctgagccctcacttttgcctttgtaggtagggtgatcctaggcaaattatgtaatacctttcactttaatagttttaaagtaattatttgcaaattataatacctcctattattgttatatttatgtcacaggtaatataaacacttggcaaaaaatagggtatttaaaaaaattgttttacatgggggaataagaatagtttttaccaggcataaaatccacttggattatgggatgagtttattattatcatggtgcaattagcaaatactaattatctctgtatgcacgctgccatctttaatttcaattaagctcaatttttgtctaaaatctgatcttcaattaagggaatcacagagtattttgtttcatttaattttaaccgggagtggtgtgtatacttgcagctggtagttcttcttggccgctcttccttcagtgtgtcttagcccaccattgttctgcttgactgccccattctggctggggaggtgcacaggcctattatattactactgcagaagtcacagtgacattgtggccttcctcatatttctctctttcttaccacccctttactcctagggataagctggctctgaagaacaagagcaactgtgtttttcttaaaacaagttgttattagtaggaaaattaacaggcattaatgatgaactcttccagtgaaagcattttttaactcttttacacccctgtgatggtccagctctggagacttcacagaggcaggcagtctatcagcttctttcctttgcattaaatataattgcgtgccactaatactgtaggctagaaactagcatttattaccaaatacatcactaatctttcaaataaaaacactggcacatcagctatcacatggataccgttttatagtcaaataaagactcaaagcatcagtgctacagtctgtctgggtttggaatatttttatgcactgctgtgagaaaagcaggtgcactcacacatctatttctaagatttgtctattttgtcagatgatttgggtttaaaatttctgcagatgtcaatttaagccatttttgctattagtagaacagtttagaagttagctcttgtaagtctcacagatatatatttcctgtggaatgacttaaatccaaagttagctcaaaatgaaaccctccccctctgaatattgctgtttcagcctcacaatcttttccagtcatagtatcaatactcctttgcaatttcttttgctgccctctagcccttggcttcaccttccattactgtatttccttgatgagagcatggaccaggctctgaggtatagaaagaaggagtccatagattgtggactaggtgggccagctttgtcattgaagtcttgagagtgcataatggggcccatctgtctataatagtcagtgtctgttcactgatattggcatcctggtgagaagtgtgagctagattggtaatttagcatttcatcctaaagcgaaagtttctatgaaccaacatcatgtagactaatgcccttgcttaacaaaagaagtcatcaactagtaattccatatcctttcatactgtgctctgccacctctccactgccccaatcctttttttgtaaaatcatctgatcaaataatatctcctgtctttcaattactttcatattattatatttatttttcttaaattacctacaaggaaatgtcttctcagttacctcaaggttaaggtcaattagctccatttgcttagtagtgtgtgcattgtgaagcaataatatatctaaattaagcaaaatttaatctcccataaaattatggttcgttatatctaaaatatcttttgttatatgttttgtagaacagagtttttagtcaaccttgatttttttgttaaagaaggaattttctttcttaaggaagaatgctgtctaaatacaaattattgttattgtggatactaatgacctttattaaaaattaaatttttttgtattgaaatttaaaatttaaaaacaccttccttttgccagaacccaaatattcctgataaagatcaaaggtcacagaattaaattaaaatgatccagtagtaaaatagcaaagtatttaataaattcttttcacaattgcttaaattatgtgaaaaggtttatcaaaacatctaggaccatcttaaattacaacacagtatttactcaaagaagtctcaggagaagtcacaatagatccatctggaaggatttcaacctccgcaaaaagatagccatgtttaaaaacgaaacccaaactagaaacacaaatcattttcctcatttaatttttaaatatatttaagtcattttccattgtattataggtattaaaagtaatggcagaaacagcaattacttttgcactggcctaatagctcaattttaataatcaaagatgctagccattagggtacaaataatgggcatatttctactctagtagaatgtttttaactattgtttgtattggtcaaaaaaccaaagcaatattgtaaaattggggtgtcatttaccgtaccccaaaagcaatgtgtctgaaagaaataattcactatggtgtgtgcttcagagggawctggaatatggagcttgaaaactagaaggaagagaatggacatcttaaaactattttaacaacaacaaaaaacgagcaataaacatgacattttaaaaaaaggatagactgtaactcctaaggaaatcttgtttccccctgtgacgttgagtctgtattctgctgcagtcttaaccatctcattcaacagtggccgcttgaccatctcattcaacagtgcccaagacagtcatttttcagccaaggctctcaaaagctaaagccaggtaaaggtgttaggtacttttaatttagattaattaatcaattttgatacataggaatgaaacatttaagtctttccttaagtttattattttaatacctaaagagatagactatatggcaatagtgaacttaattatttaattgaacttagctttaaacattttattgttaatattgttgttgggtttttttttttttttttttttgagactgagtctcgctctgtcactcaggctggggtacagtggtgctatctcrgctcactgcaacctccgcctcctgggttcaagcagttctctgcctcagcctcccgagtagctgggattgcaggcgcccaccaccacgccctgctaatttttgtttttttagtagagatgcggtttcaccatcttggccaggctggtcttgaactcctgacctcgtgattcacccgcctcgggcctcccaaagtgctgggattacaggcgtgagccactgtgcctggccatgttggttttaactaccactgcaaacaaaggggttatcgtttatagacttccatacttgatttgacttggaagacaaaaccattagctaaatgggactggtaaagaattttcaggtcattcagaattgactaagatttggagaaacagtcatagctgctggaacaatgtgagttcacaagtgctgctgaatagatagttctttaagtgatccacaacaagtcagcctgacccaattacatgggtctttgtccaactcacccacaacatttagacttgttggcagcattgaagtaaaatagaaatatgaactttataagatcaataaaatggcattacatcttgaatttaatttagatttaaccagggacttgaactgacatgaaccatgaaccaaaagctagacaaaactgtactaatttgccaatctttcttttcctaccaaaaggaagagaaaaagctatcagagtggttcacactgcaacctcacctagatttatattttctcagattattcattgtaaaagatactagatatttgtcagccaaacttgaatataatatttagttggaaaaaactttacctctataaaggaaagaatggatgtggtttgtccctatttcatggtagcctgataaatttttaaaaagtacatcgattggataaaagattgataaacatattgaataattaaaaggaatgataatttaattattgaataattttagttatgatgtaacttaagggatattggtataattattgagaaaatatttactttatcttttaatcagaaataaatacattaatatatgtatatttaaatatttctgtatattattttttaatcaatagaattacatttatagacacatagaactcttatagtgactgaacctacaggaaatgaatagtgacaatgaaggtaatatccaatgtttggcattgtgtatattagactgcaccttttgttcagaaaatagttacatagctcttttaaagtcaataataataatcataaacaagataatcccatcagcacaagtcagtcttactctgtatattaatttagcatagtattacacttaatgaattatcattaatcataaatatgtttttacatgtgcatatttaaggtctttaacatttgcagtcttggtttttctgaaggcctaagctaaaagacattcatttcaaatctgaaaagcagcataatcagtcttytgaacctactgcaatcaatatctatgcaaatggggtggttatggaatttacactgctttgtcaatcaatcactagtcaagttcccaccttacactcaatgtactaatagatttttttttctttttaaagagacagtgatttctgatttctttctttctttttctgtgttttttttttttttttttttttttttgagctggagtctcgctctgttgcccaggctggagtgcagtggtgtgatctcggcttactgtaacctctgcctcttgggttcaagcaattctcctgcttcagactcctgagtagctgggattacaggtgcctgccaccacacccagctaatttttgtatttttagtagggagggtttcaccatgttggccaggctggtctcgaactcgtgatctcaggtgatccacctgcctcggcctcccaaagtgctgggattataggcgtgagccaccgcacctggcccagtgatttcttttttctaagtatttgttatataaatgggtggtggtgttttgactgcctccccatccccacgttttccctgcatacgtacccatcttcactgtgtcagctcatactgccagtctctctctaggtggtagtagttggggaaggtggcttcctgagctccacctgctgggcttcccatggcccagtagttggcccctgaattcttagaaagagaaaaagatctttgggaattcagaggtggttgaactagcatccccagagcattcatcatttgcttcttgcccactaggagagagatcttcagtgtagatctgggcaaaagaagggctctgtcttttgccttgatcatcacctaaagttctatacttatgttaaagagaaaaaagactgaaatatacaaggcagggaaagtctggtgtaacagcacttccaatacacaaaacaaaacaagaactakttttttttttttttttttttttggctgcctgtaaccacagcatgagtcttcagtctagaggactgttgaagaggctaatgcataaggctgtcttggtatggggtaaaaaaggaagttaataattcccctgttctttgaactggtcagattacatctggtggattgcattgagctgtattctgaaacatttaaraaggattctgagtagcttcaacctgtatagaagaggatgactcaratggtgaggaagctgaaaatgttatttttaaagtagagaggttataggtaaaatgtgttgttgcttttcaaatattaaaaacttatccatagtctcagtatgtgagttaggaattaagttcctaattaagttgtggataacaagaatatacacataagggttgttctcttatataaacagagtctggagatagtaaagcagctccataaagtcactgagtactccgactctgatatccttcatgtatgattatttccatcctcaagatcaccttgtggtaagttgctcagactcttgcaatcacatcctttttccagacagcaggcagaagggtgggtttggtgtggaggaagggcacgccttctctttttaaagaaggctttccagaattccctttctactcatcttttttggccacaacttggtcttgtggccatacctggctgctatgaaggctggaaatgtagttttctagctaggtgtattgcccaggattctattattagggaagaaggaggacaatggatattgagaggcaaatagcttggtatagcatgtctaaactcagaaggcagaatggatcagtaggtagaagttaaaaagagttacattttactaaatatagagaagaatttcctaatagtttcatctgccccaaattcaatgtgcttttttagaggtactgatgtcactgttgttgaacattcaaaagcagctggtaaattgcttatcagggaagttttaggaagagacctgatatgtagttttttccaatactatgtgccaagactatttcaatatacctatgcagaagccatgctgagttttagtttgattaactattcttataagaggtttcgataaaataagatttctgtttactacaatcaataatgacaaatgttccgtaaagtgaacacttagtacacaagtcttgttttcatattgtgcagatgccagcatattcttttaatggaaggcactgttgaaataagattctgtggacacatactgacttcacacacttagcagtctttctgatacataaagttctgtgccttatgacttttattatagaataatttgttacaggaaagatttgatcagttgactcaaatttcactcagtatagctgtgacatagatacattttaagatttgtggcacatgaaatgtatagcctcagtcttactttgtggtagatttttattttcctgaggtgtttcaattatatatgtttcttcagaaaatagtaagatgttggtgtggtatgtattttggatttgtattcacagtcctctaattaagagatctagacatattagagttatgactttttaaattttaggctatygtgtccttccctgcctcatgagtctgtagtaagtagactgaaagtactccagtacatacatctaggtctgtgctcattcttactgacacagataatattaagtaaacacaatagttattgaatgtctactccaatagaaacagaaggagaaaatctattgtttgccaaattagaaaaatgccatagataaaagaaacatcattttcaagattccaaacaggtaaaccaagtatcagtaagaacacaatggcaaacactgttgagttgggctcttttaaagacttaaataactcttccaatacataaaaagaccagccacacataaattggactatatatattttcaaggcatgcttttgaccatccttctcacagtgtttttagctgataccctaactttctaatacttattcaaccatttacagttcagctgtgctttgtgtaaaccactgttggatcctagctggttaatcctcctcttcattggcatccaagcctcattttcacccaattttaatgcttgtagtttgaggaatcctaacttgatcctcagatgaaatggttaactaatataatatgcactgtgttgaactgaattgagytatgttttctaaagatgacaatttattttttttagggtggagattagtttaaaaaaaggggacttgattatttgtctttttccttccatcttcccaactcatccctaaggaaaaaaagggccaactttcttctaccactttttatttctaaaactttgcacaaataactcatctggagctcaggttgtttgtttgtagacagggacaataatacctattatgtaagggttatgacaaattaaatttaataaatatgttttgatctttttctgtgttcttggtctagtaaaatgtaaaataatttatttgtaaagcttttatgacagtatctgatacacattgatcaaaaattgttgatttcttttgtattctaaaatgaagtcctaacatagcagggaccccattaagccaaaagtcctagccctttattccatggacatctaagtttagcatctccttgctgtgcttgcagttttgggattcactcttacataaacctgtgtgcccctctatctctttttctaccacttacctggggcttgttaacaggtctatttcttgtcttacctcctgcctgctgcttcccacttgtcctgtttcccctgcccccagggacttaaaaccatatatccgggtggttctttagaaacccatactcagttatgaatgtatgccttgggtgggtttcctttagaaacccatactcagttatgaatgtatgccttgggtgggcttcagtggttctccacagcttctgcctacaagtgttttaaaaagcttggtgggtgttcacaaagtgatcccactcgtgcaaccaattcccagatgaagaaacaggactttaccagcactcaggactctctcttgacattttcagttactacctgcccccaacagtcactacagattgacttgttacactacaatttatttttcctctttcttcttaaccttagataaatatatcatacatattctttcatgtctgtcttcttttgtttgtaaaattcatcagagttgcatgtagttatttgctcattctgcttgttgtatctagttccactgttcaaatataccatgttttgtttatacattctacaaaatgatagatgtttatgttccttccattttttggctattatgaaaagtactggtatgaacattcttatatatcttttttggcgaacatctgtacatatttctcttgtgttatacctgagagtggaattaatgggtccttgtgtatgcatatgtctacctttaatagattctgcccaaccgttttctaaggtaattgtaataatttatgttcccacttgccaaatagttctgaaagagtttgttatctttccatagggtgaatgaagtaggtgaactccatactggaattttctcatcttctctcttgaaaattaactgtcagtttttaggtcatgctaaaatacttttttttttcmgttttagatgaaattttgtgcaattataagttattaatataaaaaattgatacaactaatttgtttttctgaacactattcaaacaactgatttaacatccgattttataggtaaattaagtagtaatgttaactgaccagattctgtactggttttggttgtcatattgggattagctgaaggcaagagaaagagcagagagttacaataatttaaaactcaatagttttttcttaaacaccattatttaattaaattatctgtccagcaaggatctgataaataatacctttagagacctactgatttaagggggagacaacttaagctttattgttaaacctatatatgagattatattgaattgtcatatacaaggtcttttgttattattttccaggggaaaaacatctagaatataaagttatattcatttaaatgtatttttgtttcaaagtgtctagtatttgttgatgttataggtgttttgaaataaatgtaacatagttgaattggttttgtgatcagtttatgctgcatccatctagaaatcactgagttattgtggcgaacacctaacaatgtcagtgtttgatgttaccacacacttgcacataatgacgtcaacaaagcgggagcctggttaatggctttcttctctacagaacttgttcagtaatttgctgtactggtattggttaatagggtaaattgattactgtaaggaatgcaaaaagcatagattttattggatactactgtttcctttttgcaataaaccacatcgtaaatttcctgtgttcattcatcattgggtttatattatgttaaatgaaaatgaatcacattttctgaatatttttttccacacttcaaaatgtctttttagatattgtctgccagctaatttacagctctgaaaccttgttgtatcatttggaatagagcatttgataatttaaagtggaatgaatcattgtttgatgaagaattgctgttaaatcttttgggatgtaagaatttctttgctgcagtcatatatgtaactgtatatttcagtgagaatgccctctgaacattagaggacatattcatgaattgaaattccaaaaacaaatctaatgatttgacagctctgctcaaaaacagaagctcagcattttagaggttgccatttactgaatgagtcagagggagtctgggaatacccttctgtactctgactcttttctccccactcctttgtgcctggctgccattgtcctatggcacccacctaacagagtggcacccagtcaccagccaggctttgattttgtcagttgcagaggctaacagtcaagaatctcggcacaagaatgccaatagtagcttactgcagtggctaaacccttgttcttgttcacatggagatttcttaaggaaaaaatgatttccaagctatgcagaatggactaaaaatacaattttgactttcaaatacctgatttcaataacaatttttagtgtctaaaaattaagaatagaattaatwttgttatacattgtttgaaagtaactataatcaaatcaaatatattgactatttttcctatttggcttcttctgactaaactgttgcatttaatattacaagacttcatttttatggataatcaagaatgtgcatgaaaccttaatttccagcatagagggtaattgctcagtaatcatttactttctttaaaacataactgcatttaactaagaaagtaagaaaaagagctatttttaaaaatggcattgaaatggtgtataagatcaaacagcgtatgaaaaatatacccaccttggtgttattttaccatcttttacctcagtaacttaaagtggacctttctagttcacttgtttagtcacgggatcatagcagcttgctcatctctagtggtatgaagccgtatttgagaggttgggcagtagagccctacagtgttatgtgatttgctcagtaacagaggtagctccagcatgcacacctctgaactgcatgaatccactgccttttccacttgcctgtggtttaccattgttctttgtttcatttaccagggtgagatctcatttaacatgttttagattacagaggttttatagtagagctaaaagcatataaaacaagaatttattagaaaggacaccaatctttaacagcctctgctggtctcaggttaatcttactatggtatcattttcttaacaatggactatcataagctatatcatagctcttatacacatttatgcaaaacaattaaactatagtgtatgaataaacattccctgacccccacctgattttcctacccccttctatgagcaagcagatggccattttaaagtaagataagtggagaaaaatagagaagtaataaggggcaatttgagcagtcagtgtactgtggtatccgtgggacccttctccaacttcatgtgatagcatgcagtatagaaaaggttctttcagcaagtgtttaggaaaatatgttccaaaagatctgcataacattagtgtaaccaagtgttcctctctctggcttcctgttttggaattaaatgccttcagggtactcagaataactctgtttaggaacacaagaagaatttaacctcttatgttcctaatcaattttaaaaatatatatatagattaaatagaaagcaaaaagatcttattctactttgcttctcaacagtttcagctaaaaattaaaactgtttatacataaagtcggtggtttagttagaaaacaaaggtataaacaagaattctgacaggattattatcagcaaaattttaagatcagttttgtccctgtaaacaaatttcatagacaaacctttttacatgtaggattatttccaaaagaactcagtggaaagtttctactctgggtgtttgcaggagataaagggagcagctaagctgaattgatgtttacttctttgtggtgttattgttcaacattcttaagttgcttctgcaaagccagcagagggagcaccaaacaatatttttgtttaccttaaagcttacaatgtattttaaaaatattttctttcacttgcattaaaaaatgtctacaatgaataatttgttgattttacatttttactgtatagttttaacttctctgaaattaaaagacttgaggggctttattatgcaatttaattctataaacattcagtaaatgcttactgtttataagacttgatgcgtgatggagagtcaaaggtgaatactccacagtctctattcttcaataatttataatttagttggagagaaagaaatgtaaatatcctctgtttacaatgcagaaggataataaaggtagaatatgggctaattcttaataaaaaacaaatagggatattatggagaaggtgacatttgaattggactttgaataagaggtttccaaaaatggaaattctagactgaatggagcagcatgaatgcagggtatacttagagcaagacaattctaggcctgaggctagatagaacctggttgatagaggggttatgtactgggaggtgaggtcagaatgctaaggtagagttagataatggagcaccttgaaatccgtgctaagtgcttttgagtttattctgttgtcagaggagagcaaactgcacaccatttcgaggaaacaaataatgttttgattaaataatacttgtttcagtgtgaaagcttgcctggagaactgagagattaaagattagacatttttatactaggtaaggtcagacattatatcatcgtggataataataagagtaatggttgtagtaatacctttcatttgtatttgcgagtatacatatatatacacatgcatacatatttgtgtatctacagagaaccctagacacctatatatatgtgcatatatatacacacagtatatgcaataatactgctcttatataatatttatgtacatatcatatatgtatatatgtgtatatatgtatgtataacatgtgtatatatctcatgtatatgtgtgtgtatatatccctcaagataatcctatgatttgaagatatatattgaaaatgtcaagtaatatgtatatgaggtctcatagcatagtcagagctgaggtggtactcaaattctaggttgtttgagtctaagcctgatattctttttatcatgttatgctgtttttgcattatatgatgtcagtgttgataggaaggatggaatgtgcatcagagacattacaaaggtataaaatatttaaacacaaggcagaaaaaggagttgaagatagctctcaaattttcagtctatgtgactatgtgaccaggaagcaggaatggtgttgccattgcctccatagatgtaagggaaggaacagctaggggagtgggatgggaaacaggcatggggggaagataattccattttggcatgtcagatttgagatcctgaaggcaatcttatagaaatatgtagcacatactttaaattttggatttggagccgaagaaaagtcagagctacaacttgagaatcgatgatatatttcagagaaagtgtatagactaagaagagaaatgaaatgagagcctaaccttggtggaagactacatataggaggctaaggtaagaaataagagacagaaggagcctgcacaaactctgacagagatgagagtggtcaggggaatgccttgttcctcaatcagcaaatatttgcattcttgctgtgtgcaaggcctttgcccagagtataaaagagggtgccatcgcagaatcaactgttgtaggggacagtatgggaactgaggagaggtcattagatttgttcactcaggagaccagacttcctaaatatgcacagagctttagttgggcactaaaatacaaagtagacttccgcctcatgactcagtttatgagaagttaaaagatcccagagaactcacaccttgggctgaaatctgtgaactcttaactttgatatccaagagagttgtttgtggatcaaacttattttttagtttccaaaagctgtataatgctcttgtaagcctgatttcttgtctttattactttttatttgattttttatgagagaaaaaaatcactattttttataatgatatatgttcactataaaaaattcaaatgcaaaagagggattaaaaagttaccyctcaaataaccacaatacattagataaccagaaatagaattttcttccctttctaattcttcgctccttcccttccttctttccccccattgatctgctgatcatactatgcctgttattttattttttaatatatatatatatttttattatacttttaagttctagggtacatgtgcacaatgtgcaggtttgttacatatgtatacatgtgccatgttggtgtgctgcacccattaactcgtcatttacattaggtatatctcctaatgctatcccccatcccccccaccccacaatgggccctggtgtgtgatgttccccttcctgtgtccaaatgttctcattgttcaattcccacctatgcgtgagaacatgcggtgtttggttttttgtccttgtgacagtttgctgagaatgatggtttccagcttcatccatgtccctacaaaggacatgaactcatccttttttatggctgcatagtattccatggtgtatatgtgccacattttcttaatccagtctatcattgttggacatttgggttggttccaagtctttgctattgtgagtagtgccacaataaacataggtgtgcatgtgtctttatagcagcatgatttatattcctttgggtatatacccagtaatgggatggctgggtcaaatggtatttctagttctagatccctgaggmattgccacactgtcttccacaatggttgaactagtttacagtcccaccaccagtgtaaaagcattcctatttctccacatcctctccagcacctgttgtttcctgactttttaatgatcgccattctaactggtgtgagatggtatctcattgtggttttgatttgcatttctctgatgaccagtgatgatgagcattttttcatgtgtctgttggctgcataaatgtcttcttttgagaaatgtctgttcatatcctttgcccactttttgatggggttgtttgtttttttctkgtaaatttgtttgagttcattgtagattctggatattagccctttgtcagatgagttgattgcaaaaattttctcccattttgtaggttgcctgttcactctgatggtagtttcttttgctgtgcagaagctctttagtttaattagatcccatttgtcaattttgtatgcctgttattttaaataaaaaatattaaaatccttttacctacatttataaaaaggaaaagaaactaaaggtacctaatcaaattgtagaactttgaaataagtgcttctttactacacacaatagtagatatggtagaagatctgtctgaagttaagaaaagagattatgataaaaattaacaagtttagagttatggttttaggatacatgtttctgtttagaccatatacattgatctgttttgaaagatgcttacgtatactccaccttcctccctttcctatttctgtttgttacaatggtatttttattttatcaaactttataacatttacatggacttaattttgtaataagtcctatagttgttttaattctaattctatatttaactggattagtcctcaccataatttttttaccttgacttttctaacccagaattttaactgtgactcatattttaactgtctagattccatcaagtagaatcctccaggcaggtctcctgggtgaccattttgtgttacggatgtcttctgttatgtggtatacagacatcttgcttatgcagactgctctctagctgtggtttcttatcttcagaactctgcagatgctggtcagttattctctggtcatgaaagttgcagtggcttgtgaggctggactgatggttctcagttttgtatgtgattttcgattttctttccttaaaaaaatttttcttttttggtgtctccattcaattttaatgttgtaaacataagaaaatgaattaaattgaagccttatttcatagtgtgccccagaataaaatcctaaatagactgaataattacatttttaaagtgaagctgtagaactagtagatgaaaacactggtgatcctcaaatctttctacaaatggcctcaaatagaaactatgaagggatgatctgtaagtttttctgcatcaaaaagaaaaaccagaagacattacaaaaaaactaactattaatgtgaaaggacaaattacaataggtaaaatatttacagcrtgatagatgatggatatttgtgttcatatatctgttttgttcatggtgaaactaacactacaaaagaaaagtggttaaagggcatacagggacaattcacaagtggaaaaattcaaaagaagagaaaactcctactcatttaatatacttttgataaatcagaaagaaattttttttctgttttgaacacaggttttataataagtagttacatatgttgggktaaataaacatgagcatctcttcaagctttgaaattctgtggtttggggatgtgtatgtattatccttgctgttagatcatttcttcctttataagtctcagaaagatgtccactgcatctttctcctctttatcatgcatagcccagaactttgcaggtggtgatcctgaaatacaaatttaatgaataacaataatttgaatttttaaaaagataatgtttgttaaccatttttaaaatatatttgagggggctttgaatcttttgtataggtactgtaattgtgataggacttttttcagattttggggggtaatttagtcttctgttgagaattctgattaatgcattttattatttgcatagaaaaatttattattttgtatatctcataaatacctaaatctcattttcaaaattctatttgttaattttactaaatgatgatatacagtattgtactttaagaccctgattcctatgaattacaaaaagaattttgtttattatatgcatgatttattggacattagtgctgtgattattaagaaccttcagaataatcgattgtagaataaaatgacaaaaccatggcataaacatgcattttacatatatgtttaaaggtttgtgataattgatccattttgttatgttgatttaagtagggaaactgaagattttcttaaatcaaggtacatatttaaagtgatagaatgattttattggcttcataacagcaaactttgtttggagaaccatattgtgcaagtggttagtgatattaaaattggtatcagccttgggatatgagatgtatttatttttaacttttatgcagatatagttattaaaatgtacatttcaagtacacattttgagtgtctttaaaagtatttttgaatgatttccatttgagaagtaagaagctaggtttgttagttattaatccaaatatagtagtatagcttattttattgatctttctgtgatttttaaattaggagtgagaaaagtcacagacgccgtttgttgacatattgcaatccatatgtgtgcttttttgataaagaaggtatagcatatactattcctccagaacgtttagcaccagatttatgatttttctaatttggtttgtagcttgccaaagagcatgtgagtgcatatttgatcagaagcatattttgccttgaatcagatgaagaatacttaatgagtcaatgctaagaagcaatgcagagaagattgcagactagcaaactaaaaaggctttaaaatagcttaatgtaaactataatagagataaagtattattatataaaaagtcaaatttttcagtttttcatgttcatcctgttaataaaattatctgccataactattgggaatgatattttatatttatgtgatgcagttcacattttcagtgggatgaagacttatttcaagtgtattgtacttattctcgcttgggagctggaaagatgctagttctacattagagatgccaatagccctactccctctagcaggccttcctctaagaatgagtgctagaaattactacttaaaattaattggtttttttgcttgtttgataagaaaaaattatctctttgttttgacttgtatttgtttgattatcagtgaagctagaaaatgttcctgtctacttagctgtgtccattttttctttcataaattacttatccttgttttttgttcatttttcccttaaggtactcacttcttactggtttatgagattttttatttattaaggatgtgagcactttgttttgtatgttacaaatattttgcctagtttttgtactttgattttgtttgcagtgttttttggcatacataatttaaaaaataattatagtcaaatctagtaatcatttagtctatgatttttttctttgttgagatttgaaagacctgcatcaaccctacattatataaattttccttccttgtgcgactgtgwtgtaagagggagtaatcaggcaaaggctttatgttgcttagcttaaataaattataaggaattgcctttgttggactgtggttcttatttataatgacttacttacaaatatcttatatgtatgattggctgttttacctcagactggggagggctgtcctgaagcacaagaagtgtcctcccacattctgttctttcttccttgttacttactctctgccatggtagaagtggagaaaggggagagagaaatgagacatgtttccaatgacactgtcttctcatcttctctactgtgaggaacacttttatgcacatagaaattatactatgcgtactaaaccaattatttggtttcctgccctgcccacaatagcaataatawtttttcctagtgttcattgtataaaattacagctatattttgagtcaattgaggctttaagggtagcttgggaacctaaataaaattatttcaagattaaaatgagttacaaatgaactttggaaggatagcccacctgtaggttctgggctgttggtctcccttcttgaggaaccaagtctaaggaccaggaatgggctagttggtcttagatgactcttgagagtccccagtgattcggcatcttcggtttacagtgagacttgttttctaagttctatgaagtgggcggcagtctgactgatacataggtaaatctctgtgggatctaagacagcattagccaatagaatttcctgcagttatgtaaaatatgtactatatgacttctttactggtgagagaaatactcagtatttttacagtacaatatgatcgctactagcccatgtagatattaagcacttgaaatgtggctagtatgactgagaaactgaatatttaatgttattcagttttaattaatgtaaatttcagtttaaatagtcatgtgtgactagtggctattatattgaaaagcacagttttagaggtttgtattgaatggagtaaaccacagaattaactaactttctttttatgtgataaaaatgtcatagaatgcatagattttatctggatcctgtttggaagaaatcaacgatgaaaagtttaaaaggcgtttttgaggcaatcttagaaaattgaaaatgattgggtagtaagtgattttatggaatgagtgttaattttgttaggtgtgatatcaatagatttatattattaaagtacaacagtgatgttttcagatgaagttacatgatacctagggtttgctttaggaaaaaagtattggctggagagtagatgagatagaattggccaatgttcacagtttttgagttggctgatggacacatgggattcgttttactgcttttatacttttgtatgtgattgaaagtttttataataaacagtattgagttgagagagctccttgcaggtcatacagtctcgccttttgaccagattcatttactcagccattaaatggcagaggtaggattcaaatctgtcatttggctttaagtttaatcaatttttttgtaacatcatactgtctcatactttaaacacatagttctacaccccatctgcttcatgacctttggcaagttattttgcacatttccttcttgtatggtaaggccaaatttgttagcagagctggccacatagatcagcagaggcaaagggtagggtcttttatggcaagttggatcaggctgggatttcactggattcagattcaagggctgaatacaagtagtagcttgggaaagaaaccagaggagaggtagcagtaacagattcaagagaagaagaagcaagggcaagctcctaagagaagtggaattgatacaaggtgggaataggtaaaaggctgagaacacagtttgcgtagaaagttaagtgtgttgactgctaattcttactgggagatggctatacatttcaagggcaatttagctgacttggcatatagtagactgacatttctcattttgaaattcatgttccactatgcttgtctctaatctaaaataattgtaataatatagaatttttgtccagaaggggctgttgaggtcatataattcaaccaaattatttgtgttatcaaattcatattgcatttccatatagtagttggcattgaattaggtcccataaggattatagaatttcagttatatatgctgtcaagaagattttgagagaatgagcagataataattatgattattcaagtaatataactatttcattaaattgattattggttaaagtagagaagaatgattttatttattaataaagatgtatgaaacacaattttgaattatatttacacttaagtttctagtctcagggctattgttgagcaagaatttctccmatcagtaaatgcaccatcgcatattatacattttatatgtatattgcaaatgtctatgttgtatattttatttcaggagtgagggaggggaaatttcagctattaagctatcaatgcctagaaataaactgctgagtagaaggtctattatattattgcctcactaggacctaattatttaaaagcaaaacaaaacaaacatcatctggctacgcctcccgaatcctatttcaatcaggattccaatgtcttcaagccaattttatttttctgagaccaggtattagaagggaagatctgagagaatgaaggtgtgatatggctggataccagggtaaaacatcatatgggtattctgatgtttttctgcttgtatttatttgcattttcttgggctattggaatttttttactctacttctgagtttttaagtcaaaacctagaaaaagtatttaagtttctcatcctgtacccaaactattctgtagtcaaaagcaacaggctcccaaagtcaatttctaagtttaatagcatatttttatttattaggtgccatttagttaggaccaccgtgctcatttgctcatttgttaattaatttaacaacttactatatgttcttattgaggataaaaggatgcataagacatagcccctacccttatgctgcttttattttagttgagtaaacagacatggaagtaattatgattgagcatgccagttgttataatggaagcatatgcaaaagacaatggaaacattatggagcaaagaattaggaaatggaatgaggtttgagtatggacagttttcactgagaagaaccttgaaagaataaatttgagctgattagatttcctagtatattaatattagcaactgtgagaaccagatttttaaaaatttatgcaagtcatctgtcaatcaactttgaagttatttgtgattccatttccttgttgtctgcttcagatatttttttgttctccaacctttgatctttgtcttgtctggttttgtctttgaatcctggttggtactgatccattttagatgattgaccttacttgagctatctcctggcactctcaaagtacactattcttgtaactacsccgtccttgacctatttcagcttaaagcaagaggagtttcattcatatgatctggccaggactccagaatcctatttcaatcaggattccagtgtcttcaagccaattttatttttctgagaccaggtattagaaaggaagatctccgagaatgaaggtgtgatatgctagagaccagggcacaggggattgagagagaatatactgaatatgaaaagtcaagtgatggctggactgtgataaccatgaaaatatggatttggggctttattcttcaggccaaatggggcctttaaatgttttttaggaggattgtggcactatcacaactgtactatagaaagataacagagtcatgattgggccataagaggagatgttgctgtcagagagaccagttgaagaaacgagatgctgaagccttgtattgagcaagacaataatgatggagaacaataaataaatcagaaaaatttcataaatggaaccagtaagaatagggagctaattggaaattgatggtaaaggaaagaaaaatattgatgttatttttgacttttctggtttgggtgattggacaggttatattkcctttgtaattacatgtgtaattaatagaaaaaattaattacacgtgtaattatttaatggctgtcttcttcactaagctgaaccccacaagagcagagtgtctttcttgtgtgtgtgtgtgtgtgtatatatatayacacacaaatatacatataatatatacatatatatacraatatacatataatatatrtacatatatatatatatatatrtatrtatatattccctagcacctgacccagtgtctggctatattaatgttctcaactaatagttgttgatcaaccaactagtttcatttgtttactaaattttgtattaatgaccaggcactgttctagatgaactttaatacccttagctaagacatgaaatgcatgaggatgagcaggtccagtgaaaagataatggattatattttggacatattgaattgagatgccatgggacatccacttggagatatgaatctatctaaacttcaaaacagtgatcttgtttggagattcagatttaggatataagtggatgctgaagccatggagatgtttggaattaatagaatgagtaaagtgaggcatgataatggctgaagactgaactctggggagtacaagtacttaggaggtagacagagaaagaggagctaacaaagcaactgagaaggatgcccagggttttaggagaaaaatctggggataatattgtcatcaaagagaaaagaggagagagttcaaggagggcaatgtcttgggatagattattttggaaatttgaattcctgaaagagttttaggaagaccagagatttctggaatattctatcctttgttttgcctcagaatttatgtttgaactatgttaattgatagtcaaattactttaacctatggagattttctactacttcaagcctatgaaatccaaataaaattccctttattaatatgtttccatttataaagccttaagattgtttattgcctgactatgagaagacaaaatttggaaataagtttctacttttaaatgcagtgtataatctgttttttctacagatttttgtggtccattgcccctttaacttgaaaaaattttgcttttcaatcttgataacacttttaaagcaattaaaagacaaatcaatttctagccattataaatggttgttaatgcataagggtattattataacatttgtgaacatactggtgtgtgtggtaggatgagaaagctgtaattgtttgatttgtaaggctttattaccatgttttttctttttgagatggaatctctctctctgtggctcaggctggagtgcagtggcatgattttggctcactgcaacctccgcctcctgggttcaagtgattctcctgcctcagcctcctgagcagctgggattacaggcatctaccaccatgcccagctaatttttatatttttagtagaaatggggtttcagcatgttggccaggctggtcttgaactcctgacctcaggtgatctgcctgcctcggcctcccaaagtgctgggattacaggtgtgagccaccgtgcctggcctgaattaccacacatttttaaaaaacaacaataaataccacaatcttgtttttactcttctggttttatttggaaaagcaaattattttagcaacagactaggttcctttacattcaaacagcaagaaagaactaaaaaagagacaaaacaacaacaacaaacccttttctttggaaataaaaacacttgaagaattatttggctgtaggagtccaccatttaktgtgtgtgtgtgtgtgtgtgtgtgtgtgtgtgtgtacgcacgcacatacccgtgaagatctgttttgtagctctgaatttacaaattggaagggttgctactcctttatgactgatggacttccttgtaaatatactctgtcaatgtgtactttactcccactgcatgatcagtaaatttgggttgaaagattgttattgacagtatttctaatataacctaatgtttaaaaaatgcttgacttgttgcaattatatgcaaaatcttgagtcttctgattccgttagttgttttgtgtagtagaaacttccctggcccattgatagtcaggttggagccactgatgtgtttggccaggttccaggaaagtcttcaacaatgccatagtctgctcaggtactattagcctagcaggcagtttcagagcctgctatacatgaaaaaagtcacaaatagatggatttgaacatgtatttaggactagtcaggcagggaaaaactrtagaaagaattgttcagatttttgatttaggcaaatcttacctgaagtaggatggaagtgacttgattaagtggaattgagctaatagctttttccctgatttcttgatagagactgattttgatgatagttaagaggagataaaagagaatccctccttttacttttttctgttttttttttaagccccagccactttccctaacaaatcttactgtctatatttatattatattcttctcaaggcaacattcagtctcctttggctgagcagaagactaaagacttgacctcaaaggaactgttattgcttagccaagatttaggagaggagacattaaagtaatttagaggtcaagtggccttaaccagggtagggagtagggatgtttacccgtttagatttaaaaggttctaatatttttgacaggaagatacacatttattacgttgcatttatttgaaaatcctttgaactttgcttataaatattatcctcaaaatatttgttaaatgagtgaaatgataaaactatattcagtaatatgggattcagtaaccctaccatggacccaggaataagggttagaagaacctacggtcttttttctttaagcagtcatgatactggttcttttatagttaattcttcagttttgtgtaaaaggaattgtaacatggggaattatgggaactcctgaggtggtcatagatagcttcagtcctgtgttttgcccataggagccgctaagaaggtgacagaggacataaatgccctcttcacacgttttctattttgtcttttcacagttagacataactggatatcctgaaactttactgaagttgtttgtcagctgaaggaggttttggatcaagactatggaatgttctagatacagaatcacattgcctacaagcagggatgatttgactccctctcttcctattaagatgccctttatttctttctcttgcctgattgctctggctatgacttccaatactgtgttgaataggagtggtgagagagggcatccttgtcttgtgctggttttcaagaggaatgattccagcttttgcccattcagtataatgttgtctgtgagtttgtcagagatggcccttattaatttgaggctcttattcctttgatgcctagtttattgatagttttaaacatgaagggatgttgaattttagcaaaagccttttctgcatctattgagataatgatgtggtttttgtcttagttctgtttatgtgatgaatgacatttattgatttgcttatgttgaaccaaccttgcatcccggggataaagcctacttgattgtggtggattaactttttgatgtgctgttggattcagtttgcaagtattttgttgaggatttttgcatcgaagttaatcaagtattttgttgaggattttgcatcaatattggcctgaagtttttttttttttttttttatgtctttgccaggttttggtaccaggatgatgctggccttgtagaatgagttgggagaggagtcccacctcaattttttaagagtagtttcagtaggaatggtaccacatcttctttgtacacctggtagaatttggctgtgtgaattcatctgatcctagcctattttggttgataggatattcattactgattcaattttggagctgttattggtctgttcagggaatgaatttcttcctgcgtcagtgttgggagggtatatgatctttgacaaagctgacaaaaacaagcaatggggaaaagactccctattcaaaaaatgatgctaggataattggctagccatatgcagaagattgaagctgtgctcttttttacatcgtatacaaaaatcgactcacggtggattagagacttaaatgtgaaacccaaagctataaaacactggaagacaacataggaaataccatcctggacataggaatgggcaaagatttcatgacacagacaccaaaagcaattgcaacaaaagcaagacaagtcgaatctaattaaacttaagagcttctgcacagcaacagaaactatcaacagagtaaacagacaacctacagaatgggaaaatttatgcaaactgcaaactatacatctgacaatggtctaatatccagcatctataaggaccttaaacaaatttacaatagaaaaacaatcccgttaaaaagtgggcaaaggacatgaacagacacttttcaaaagaagacatacatgtggccaacatgcatatgaaaaaatgctcaatgtctctgatcattagagaaatgcaaatcaaaaccacaatgtgataccatcttacaccatacagacggctgttattaaaaagtcaaaaaataacagatgctggcaaggttgcagagaaaagggaacacttatacactgttggtgggagtgtaaattagttcaaccattgtgaaaagtaatgtggtaactccttaaatagctaaaaacagaactacattcaatccagtaatcccatcactgggtgtatatccagaggaatataaatcattctactataaagaaacatgcatgcagatgttcactgcagcactattcacaatagcaaagactaacctaatcaacctaaatgtccatcaatgacagataggataaagaagatgtagtacatatacaccatagaatactatgcagctataaaaaagaatgcggtcatgtattctgtgggaacacagacgtagctggatggaggctattatccttagcaaactaatgcaggaacagaaaaccaaataccgttatgttcttacttattaagtgggagctatatgacaagaactcatgaacacaaagaagggagcaacagacactgggttctacttgagggtggagggtgaaaagaggaagaggagcaggaaaaataactattaggtactaggcttaatacatgagtgatgaaataatctgttcaacaaacccgcatgatatgagtttatctatataacaaaacttcacatgtatccctaaacctaaaataaaagtaaaaaaaaaaaaagcataattagatgggtcctttacaaagctgtgaagttgactaaggctttttgaaagctagatattttgctatataaagaccacctttaacatttagaagttggaaatggagaccaggcatggtggcttacgcctgtaatcccagcactttcggagacccaggtgagaggattgcttgagccaggagttctagaccagcttggcaacacagggagacactgtctgtacaaaaaaaaaaaaaaaaaaaaaattagccatgcatggtggtgtaagcctgttgtctcagctagtcaggaggctgaggtgagaggatcacttgggcctaggaggtcgaggctgtgattagctgtgattgcaccactgcactccagcctgggtgacagagcaagaccctgtttcaaaacataaaaactaaagtagttggagatggagcctgaaaaatctattccaatcctaaaccactagttaaacaaaaggaaatggtggagttaaaaatgggctatctactttttgtttttttccacttatattccatggattttttttttttttttgagatggagtctcgctctgtcacccaagctggagtgcagtggtgcgatcttggctgacacttgccaccacgcccggctaattttttgtatttttagtagagatggggcttcaccacgttagccaggatggtctcgatctcctgaccttgtgatctgcccgccttggcctcccaaagtgctgggattacagacgtgagccactgcccttggcttttttttttttttataatttaagttctgggatacatgtgcagaacgtgcaggtttgttaaataggtatacatgtgccatggtggtttgctccacccatcaacccatcatctacattaggtatttctcctaatgttatccctcccattgtcccccacccccaaacaggacctggtgtgtgatgttccccwccctgtgccgtgcattctgattgttcaactctcatttataagcgagaacatgtggtgtttggttttctgttcttgtgttagtttggtaagaatgatggtttccagctttatccatgtccctacaaaggacatgaactcattcttttttagggtattccatggtgtatatgtgccatgtcttctttatccagtctaacattgatgggcatttgggttggttccaagtccttgctattgtgaacagtgctgcaataaacatatgtgtgagtgtgtctttatagtagcatgatttataatcctttggatatatgcccagtaatgggattgctgggtcaaacagtatttctggttctagatccttgaggaattgccacactgtcttccacaatgctttaataatttactctccatccaccagtgtaaaagcattcctatttctccacatcctctccagcatctgttgtttcctgactttttaatgaacaccattctaactggcatgagatggtatctcattgtgattttgatttgcatttctctaaagaccagagatgatgagcattttttcatatgtttgttagctgcataaatgtgttcttttgagaagtgtctgttcatatccttcacccactttttgatgggattgtttttttcttgtaaatttgtttaagttctttgtagattctggatattagccctttgtcagatggatagattgcaaaaattttctcccattctgtaggttgcctgttcactctgatgataatttcttttgtggtgcagaagctctttagtttaattagatcccatttttcaattttggcttttgttgccattgcttttggtgttttagtcataaagtctttgcccatgcctaagtcctgaatagtattgcctaggttttcttctagggtatttatggttttaggtctttaatccatcttgagttaatttttgcgtaatgtgtaaggaaagtgtccagtttcagttttctgcatatggctagccagttttcccaacaccatttatgaaataggaaatgttttccctattgcttgtttttgtcaggtttgtcaaagatcagatggttgtagatgtgtggtgttatttctgaggcctctgttctgttccattggtctatatatctgttttgatacaagtaccatactgttgtagttaccgtagccttgtagtatagtttgaagtcaggtagtgtgatgcctccagctttgttctttttgctgaggattgtcttggctatgagggctctttttttgsttccatatgaaatttaaagtagttttttctaagtctgtgaagaaagtcactggtagcttgatgggaatagcgttgaatctataaattagtttgggcagtatggccattttcacgatactgattctaactatccatgagcatggaatgtttttttctatttgttcgtgtcctctcttatttccttgagcagtggtttgtagttctccttgaagaggtccttcacatcctttgtaagttgtattcctaggtatttaatactctttgtagcaattgtgaatgtgagtttgcctatgatttggctctctgtttgtctgttattggtgtataggaatgcatgtgatttttgcacattgattttgtattctgaggctttcctgaagttgcttatcagctgaaggagtttttgggctgagatgatggggttttctggatatacaatgatgtcatctgcaaacagagacaatttgacttcctcttttcctatttgaataccctttattttttttttcttgcctgcattgccctggccagaaaccttcccaacactaatgttgagtaggagtggtgagagagggggattcttctagagccacaggagcagggtctgcaacgccaagtgtcnnnnnnnnnnnnnnnnnnnnnnnnnnnnnnnnnnnnnnnnnnnnnnnnnnnnnnnnnnnnnnnnnnnnnnnnnnnnnnnnnnnnnnnnnnnnnnnnnnnnnnnnnnnnnnnnnnnnnnnnnnnnnnnnnnnnnnnnnnnnnnnnnnnnnnnnnnnnnnnnnnnnnnnnnnnnnnnnnnnnnnnnnnnnnnnnnnnnnnnnnnnnnnnnnnnnnnnnnnnnnnnnnnnnnnnnnnnnnnnnnnnnnnnnnnnnnnnnnnnnnnnnnnnnnnnnnnnnnnnnnnnnnnnnnnnnnnnnnnnnnnnnnnnnnnnnnnnnnnnnnnnnnnnnnnnnnnnnnnnnnnnnnnnnnnnnnnnnnnnnnnnnnnnnnnnnnnnnnnnnnnnnnnnnnnnnnnnnnnnnnnnnnnnnnnnnnnnnnnnnnnnnnnnnnnnnnnnnnnnnnnnnnnnnnnnnnnnnnnnnnttaggctgtgaatccgtctgatcctgggctttttttggttgataggctattaattactgccctcagtttcagaacttgttattggtctattcaggaatttgaatttttcctggtttagccttcagagagtgtatttgtctaggaaattatccatttcttctagattttctagtttatttgcatagaggtgtttatagtattctctgatggtagtttgtatttctgtgggattggtggtgatctcctctttatcattttttattgcatgtatttgattcttttctgttttcttctttattattctggctagcagtccatctattttgttaatattttcagaaaaccatctcctggattcattgatttttttgaagggtttttcatgtctctgtcttcttcagttctggcctgatcttagttatttcttgtcttctgctaacttttgaatttgtatgtccttgctcctctagttcttttaattgtgatgttaaggtatcagttttagatctttcctgcttcctcctgtgggcatttagtgctgtaaattttcctctaagcactgctttagttgtgtcccagagattctggtacattgtatctttgttctcattggtttcaaagaactaatttatttgtgccttaattttcattatttgcccagtggtcattcaggagcaggttgttcattttccatgcagttgtgcggttttgagtgagtttcttcttcttgagttctaatatagattgcactgtggtctgagagactgttatggtttcttttcttttgcatttgctgaggagtattttatttccaattatgtggttgattttagaataagtgctatgtggtgctgagaagaatgtatatgctgttgatttggggtggagagttctgtaggtgtctattaggtccacttggtccagagccgagttcaagtcctgaatatccttgctaattttctgtcttgttgatctatctaatattgacagtggggtgttaaagtcttccactattattgtgtgggagtctaagtctctttgtaggtctctaagaacttgctttatgaatctaggtggtcctgtattgggtgcatatatatttaggagtgttagctcttcttgttgcattgattccctttaccattacataatgcccttctttgtctcttttgatctttgttggtttaaagtctgttttatcagagactagaattgcaacccctgattttttgtttttttgccttccatttgcttggtaattattccttcatccctttattttgagcctatgtgtgtctttgcacgtgagatgggtctcctgaatacagcacaccgatgggtcttgactctatccaatatgccagtctgtgtcttttaattggtatatttagcctgttacatttatggttaatattgttatatgtgaatttgatcatgtcagtatgatgctagctggttattttgccagttagttaatgcagtttcttcatagtgttgatggtctttacaattttgtatgtttttgcagtggctggtactggtttttcctttccatatttagtgcttacttcaggagctcttgtaaggcaggcctggtggtgacaaaatctctcagcatttgcttgtctgtaaaggattttatttctccttcatttatgaagcttagtttggctggatatgaaattctgggttgaaaattcttttctttaagaatgttgaatattggcccccactctcttctggnnnnnnnnnnnnnnnnnnnnnnnnnnnnnnnnnnnnnnnnnnnnnnnnnnnnnnnnnnnnnnnnnnnnnnnnnnnnnnnnnnnnnnnnnnnnnnnnnnnnnnnnnnnnnnnnnnnnnnnnnnnnnnnnnnnnnnnnnnnnnnnnnnnnnnnnnnnnnnnnnnnnnnnnnnnnnnnnnnnnnnnnnnnnnnnnnnnnnnnnnnnnnnnnnnnnttcatttcaatcttggtaaatctgatgattatgtgtttttgggttgctcttctcaaggagtatttttgtggtgttctctgtatttcctgagtttgaattttggcctgtcttgctaggttggggatgttcttctggataatattctgaaaagtgttttccaacttggttccattcttcccatcactttcaagtacaccaatccaatgtaggtttggtcttttcacatagtcccatatttcttggaggcttttcattctttttctctaatcttgtcttcatgctttatttccttaagttgatcttcaatctctgatatcctttcttctgcttgattgattcagcctttgatacctttgtatgcttcacgaagttctcatgctgtgtttttagctacatcagttcatttggtttttctctaaactggttattctagttagcaatttctctaaccatttttcaaggctgttagcttccttgcattgggttagaacatgctcctttagcttgtaggagtttattacccaccttctgaagcctacttctgtcaattcatcaaactcattccatgtccagttatgttcccttgctggtgaggagttgtgattttttggaggagaagaggcattctggtttttggaattttcagcctttttgcactgatttttcctcatctttgtggatttacctacctttggtctttgatgctgaagcccttcggatggggtttctttgtggacaatctttttgttgatgttgatgctatccctttctatttgttgctttccttctaatagtcaggcctctctgctgcaggactgctggagtttcctggaggtccactcaaaccctgtttgcctggttatcaccagcggaggctgcagaacagcaaagattgcttcctgttccttcatctggaagcttcatcccaggggggcatctgccagatgccagctgaagctctcctttatgaggtgyctgtcaatccctgctgtgaggtatttcccagtcaggagtcaggggggtcagggagccacttgaggaggcggtctgtcccttggcagagctcaagggctgctgcagggagatccgctgctcttttcacagcctgcaggcaagaacgtttaagtctcctgaagctgcccccacaactgccccttcccttaggtcgtctgtccgggagatgggggtttcatctataagcccctgactggggctgctgcctgtttttcagagatgccctgcctagagaggaggaacctagagagacagtctggctgcagccgctttgccaagctgcggcgggctccgcccagtttgaacttccaggcggctttctttacactgtgaggggaaaactgcctactgaagcctcagtaatggcagatgcccctgtccccatgaaactcgagcatcccaggtcgacttcagactgctatgctggcagcatgaatttcaggccagtggatcttagcttgctgtgctccgtggtggtgggatccactgagcaagaccacttggctccctggctttagcccccttttcaggggagcgaatggttctgtctcgctggcgttccaggtgccacttgggtattaaaaaaaaagccctgcagctagctcagtgtctgcccaaatgactgcccagttttgtgcttgaaacccagggctctggtggtgtaggcgcccaaaggaatctcctggtctgtgggttgccaagaccgtgggaagagtgtagtatctgggcctgagtgcaccattccttaaggcacagttcctcatggctttccttggctaggggagtgagttccccgaccccttgtgctttccaattgaggagatgccgcactctgctttggctagccctccgtgggctgcacccactgtctaaccagtcccagtgagatgagccgggcacgtcagttggaaatgctgaaatcacctactttctgcattgatctcactgggagctgcagaccggagcagttcctgtttggccatcttgccagccacccaaaatatctttatctttaatgaagggaatgtttctgggacaagtctttctataaacataggaaaagttgtaaaagtagaaaacattcacagtcaatcatcatgtcctttgcagcaacatgaatggagctggaggccataatcctaagcaaattaatgcaggaacagaaaaccaaatgctacattttctcacttataatttggagctaagcatcgaacacacatgaacagaaacatgggcacaatagacactatggactagtagggggtggaaggagtggggtaggttaaaaaactacctatcaggaactactgcctgggtcacgggatccatactccaaatcccagcatcagacaatattcccatgtaacaaatctgcacctgtaccctcatatctaaaataaaagttgaaaatttttgaaagaaatggccacagcaaaacattattaattggtattaatatgggagtagtctgaatttaaggacaaatcttcattctggcatgttatgtaggaaattcagatttatactagaaagaacactgaacttggagtttaaagataggggttcattttccagttctgccacatggcagaggttgaagtgtgactgttatttgtgtgacattaaataagtcctttatcttcttcaagtttctcttttcacatgtgtaacatggggagagttattcctggtcagtctatattacagagtttcttcaagaataagacaaaatgagataatagagggaaagtactttggaatattatacaagatttttgaaaagaatccaacttatggaggagagaaaaatatatgtagttttattctactttttttttttttgatcactttctagccctgtgatctagggtgagattgtctgccctgtgcctctgttttctcatcagtaatatctgggaagaataatataattagttttgttagtctgtttgtgcattgctataaagaaatgcatgaggctgggtaatttataagcaaagaggtttaattggctcatggttctgcaggctgtacaagaagcatcctggcatctgcttctgggataggggagggtgtcaggaggcttccaatcatggcagaaggcaaagagggaacaggcatgtcacatggcaaagcaggaataagagagagagagaaagtgagggggaaatgccacacatttaacaagatcttgtgggaattcacacactattgtgaggagagcaccaagccatgagggatctgtgcccatgatccaaatacctactaccaggacccacctccaacattagggattatatttcaatgtgagatatgggccaaaccaaatcattagtcttatttattaaattaataatgattgaattaatgtaagagtgtgtactatagttcctggcagttggcactcattgaaagttaactgccattattattattattattttttattattatcctttaagttccgggatacatgtgcagaatgtgcaggtttgttacataggtatgtatacatgtgccatggtggtttgctgcactcatcaatccctcatctacattacatatttctcctaatgctatccctcccctagcccccccaccccattacaggcccccgtgtgtgatgttcccctccctgtgtccatgtgttctcattgttcaactcccacttaagagtgagaacatgcagtgttttgttttcagttcttgtgttaatttggtgagaatgatggtttccagcttcatccatgtccctgcaatggacatgaactcatccttttttatgagtgcatgttattctatggtgtatatgtgccacattttctttaaccagtctatcattgatgggcatttgggttggttccaagtctttgctattgtgaaaagtgctgcaataaacatacgtgtgtgtgtgtctttatagcagcatgggtgtatactcagtaatggggttgctgggtcaaatggtattcctagttctagatccttgaggaatcaccgcactgtctttgacaatggtttaactaatttacactccgaccaacagtgtaaaagcattcctatttctccacatcctctccagcatctattgtttcctgactttctaatggtcgccattctaactggcaagagatagtatctcattgtgattttgatttgcatttatctaattaccagtgatgatgagcattttttcatatatttgttggctgaataaatgtattcttttgaggagtgtctgttaatatccttcacccactttttgatgggattgtttctttcttgtaaatttgtttaagttctttgtagattctggatattagcgctttgtcagatggatagattgcaaaaattttctcccattctgtaggttgcttgttcattctgatgatagtttcttttgcggtgcagaagctctttagtttaattagatcccattttttaattttggcttttgttgccattgcttttggtgttttagtcataaagtctttgcccatgcctatgtcctgaatagtattgcctaggttttcttctagggtatttatggttttaggtctttagtccaccttgagttaatttttgcataacgtgtaaggaaagcgtccagtttcagttttctgcatatggctagccagtttcccaacaccatttatggaataggraatsttttccctattgcttgtttttgtcaggtttgycaaagatcagatggttgtagatgtgtggtgttatttctgaggcctctgttctgttccattggtctatatatctgttttgatacaagtaccatactgttgtagttaccgtagccttgtagtrtagtttgaagtcaggtagtgtgatgcctccagctttgttctttttgctgaggattgtcttggctatgagggctctttttttggttccatatgaaatttaaagtagttttttctaagtctgtgaagaaagtcactggtagcttgatgggaatagcrttgaatctataaatttgggcagtatggccattttcacgatactgattctaactatccatgagcatggaatgtttttccatttgttcgtgtcctctcttatttccttgagcagtggtttgtagttctccttgaagaggtccttcacatcctttgtaagttgtattcctaggtatttaatactctttgtagcaattgtgaatgtgagtttgcctatgatttggctctctgtttgtctgttattggtgtataggaatgcatgtgatttttgcacattgattttgtattctgaggctttcctgaagttgcttatcagctgaaggagtttttgggctgagatgatggggttttctggatatacaatgatgtcatctgcaaacagagacaatttgacttcctcttttcctatttgaataccctttatttctttctcttgcctgattgccctggccagaacttccaacactatgttgagtaggagtggtgagagagggcatccttctcttatgccagttttcaaagggaatgcttccagcttttgctcattcagtatgatattggctgtgggtttgtcataaatagcttgtattattttttcagatatgttccatcaatacctattttattgagagttttttagcatgaaggggcattgaattttatcgaaggccttttctgcatctattgagataatcatgcggtttttgtcattggttctttttatgtgatggattatgtttactgatttaggtatgttgaaccagccttgcattccagggatggagccgacttgattgtggtagataagcattttgatgtgctgctgcattcggcttgccagtagtttattgaggattttcgcattgatattcataagggatattggcctgaaatttcctttttctgttgtgtctccgccaggttttggtatcagggtgatgctggcctcataaaatgagttagggaggagtccctctttttctrttgtttggagtagtttcagaaggaatggtaccagctcctctttgtacctctggtagaattaggctgtgaatccgtctgatcctgggctttttttggttgataggctattaattactgcctcagtttcagaacttgttattggtctattcaggaatttgaatttttcctggtttagccttcagagagtgtatttgtctaggaaattatccatttcttctagattttctagtttatttgyatagaggtgtttatagtattctctgatgttagtttgtatttctgtgggattggtggtgatctcccctttatcattttttattgtgtctatttgattcttctctgttttcttctttattattctggctagccgtccatctattttgttaatcttttcagaaaaccatctcctggattcattgattttttgaagggtttttcatgtctctgtcttcttcagttctgctctgatcttagttacttcttgtcttgtgctagcttttgaatttgttttctcttgcttctctagttcttttaattgtgatgttaaggtgtcaattttagatctttcctgctttcttctgtgggcattttagtgctataaatttttctctaagcgctgctttagttgtgtcccagagattctggtacattgtatctttgttctcattggtttcaaagaactaatttatttgtgccttaattttcgttatttacccagtggtcattcaggaacaagtttttcattttgcatgtagttgtgtggttttgagtttcttcatcctgagttctaatttgtttgcactgtgatctgagagactgttatgatttctgttcttttgcatttgctgaggagtattttatttccagttatgtggtcgattttaggataagtgctatgtggtgctgagaagaatgtatatgctgttgatttggggtggagagttctgtagatgtctattaggtccacttggtccagagccgagttcaagtcctgaatatccttgttaattttctgtcttgttgatctttctaatattgacagtggggtgttaaagtctcccactattattgtgtgggagtctaagtctctttgtaggtctctaagaacttgctttatgaatctaggtggtcctgtattgggtgcatgtatatttaggagtgttagctcttcttgttgcattgattccctttaccatatgtaatgcccttctttgtccttttgatctttgttggtttaaagtctgttttatcagagactaaaattgcaacccctgattttttgtttttttgctttccatttgcttggtaattattcttccatccctttattttgagcctatgtgtgtctttgcacgtgagatgggtctcctgaatacagcacaccgatgggtcttgactctttatccaatttaccagtctgtgtcttttaattgggggcatttagctcatttagatttatggttaatattgttatatgtgaatttgatcatgtcagtatgatgctagctggttattttgctggttagttcatgcagtttcttcatagtgtcgacggtctttacaatttgatatgtttttgcagtggctggtactggtttttcctttccgtatttagtgcttacttcaggagctcttgtaaggcaggcctggtggtgacaaaatctctcagcatttgcttgtctgtaaaggattttatttctccttcatttatgaagcttagtttggctggatatgaaattctgggttgaaaattcttttctttaagaatgttgaatattggtccctactctcttctggcttgtagggtttctgcagagagatccactgttagtctgatgggcttccctttgtgggtaccctggctgcccttaacattttttccttcatttcagccttggtgaagctgatgattatatgttggggttgttcttctcaaggagtttctttgtgatattctctgaattttctgaatttgagtgttggcctgttttgctaggttggggacgttctcctggataatatcctgaagagtgttttccaacttggttccattcttcccgtcagtttcaggtacaccaatcaatgtaggtttgatcttttcacatagtcccatatttcttggaggctttgttcattccttttcattctttttctctaatcttgtcttcatgcttcatttcattaagttgatcttcaatctctgatatcctttcttccgcttgattgattcagctattggtacttatgtatgctgcttgaagttctcatgctgtgtttttcagctccatcaggtcatttgtgttcttctctaaactcgttattttagttagcaattcctctacccatttttcaaggttcttaggttccttgcattgatttagaacatgttcctttggcttggggaaatttgttcttacccaccttttgaggccttcttctgtaaattcatcaaactcattctccatcaagttttgttcccttgctggcaagcagttgtgatccttgagaggagaagaggcattctggtttttggaatttttagcctttttgtactggtttttcctcatgttcgtggatttatctacctttggtctttgctgttggtgaccttcaaatgtcgtttttgcatggtcatcctttttgttgatattgatgctatgttcctttctgtttcttactgtccttctaacagtcaagcccgtctgctgtaggtctgcgggagtttgctgagggtccactccataccctgttttcctggttatcaccagcggaggctgcagaacagcaaagattgctgcctgctttttctctggaagtttcttctcagagggccacctgtcagatgccagccagagctctcctgtatgaggtatctgtcgacccctgctgggaagtgcctcccagtgaggaggcacgggggtcaaggagccacttaaggaggcagtctgtctcttagcagagctcgagtgctgtgctgggagatccgcttctctcttcagagagctgacaggcaggaacgtttaaatctgctgaagcttcgcccactgccacctcttcccccaggtgttctgtcccagagagatgggagttttgtctctaagcccctcactgggcttatagttaagctgcctttctttcacagatgccctgcccagagaggaggaatccagagaggtagtctggctagagtgtctttgctgagctgtggtgggcttcacccaatttgaacttcccagaggctttgtttatactgtgaggggaaaatcacctagtcaagactcagtaatggtggacgcccctgtccccagcaagcttgagtgtcccaggttgacttcagactgctgtgctgggagcgagaatttcaagccagtggatcttagcttgctgggctccccaggggtgggatctgcagagctaaaccacttggctccctggcttcagccccctttccaggggagtgaatgattctgtctcactggtgttccaggagccactggggtatgaaaaaaaaactcctgcagctaccttggtgtctgcccaaatggccactctgttttgtgcttcaaacccagggccctggtgtcgtaggcactcaagcgagtctcctggtctgtgggttataaagacggtgggaagagcatagtatctgggccagagtgcacccttcttcaaggcactgttcctcatggctttccttggctaggggagtgagttccccaaccccttgtgcttcccgggtcaggtgatgccttaccctgccttgccctgtgtgggctgcacccactctctaacgagtcccaatgagatgaactgggtacctcagttggaaatgcagaaatcacctgcctattgcgttggtcttgctgggagcagcagactggagctgtttccatttgaccatcttgcccggggatccatggattctttttagtatatttagcagttaaaaatatttttgacatatttatagaaagtagtatcaataacattattactatttaaattttggaatttgttttggtaagaacaaaatttgaagctatctaatgaagattgannnnnnnnnnnnnnnnnnnnnnnnnnnnnnnnnnnnnnnnnnnnnnnnnnnnnnnnnnnnnnnnnnnnnnnnnnnnnnnnnnnnnnnnnnnnnnnnnnnnnnnnnnnnnnnnnnnnnnnnnnnnnnnnnnnnnnnnnnnnnnnnnnnnnnnnnnnnnnnnnnnnnnnnnnnnnnnnnnnnnnnnnnnnnnnnnnnnnnnnnnnnnnnnnnnnnnnnnnnnnnnnnnnnnnnnnnnnnnnnnnnnnnnnnnnnnnnnnnnnnnnnnnnnnnnnnnnnnnnnnnnnnnnnnnnnnnnnnnnnnnnnnnnnnnnnnnnnnnnnnnnnnnnnnnnnnnnnnnnnnnnnnnnnnnnnnnnnnnnnnnnnnnnnnnnnnnnnnnnnnnnnnnnnnnnnnnnnnnnnnnnnnnnnnnnnnnnnnnnnnnnnnnnnnnnnnnnnnnnnnnnnnnnnnnnnnnnnnnnnnnnnnnnnnnnnnnnnnnnnnnnnnnnnnnnnnnnnnnnnnnnnnnnnnnnnnnnnnnnnnnnnnnnnnnnnnnnnnnnnnnnnnnnnnnnnnnnnnnnnnnnnnnnnnnnnnnnnnnnnnnnnnnnnnnnnnnnnnnnnnnnnnnnnnnnnnnnnnnnnnnnnnnnnnnnnnnnnnnnnnnnnnnnnnnnnnnnnnnnnnnnnnnnnnnnnnnnnnnnnnnnnnnnnnnnnnnnnnnnnnnnnnnnnnnnnnnnnnnnnnnnnnnnnnnnnnnnnnnnnnnnnnnnnnnnnnnnnnnnnnnnnnnnnnnnnnnnnnnnnnnnnnnnnnnnnnnnnnnnnnnnnnnnnnnnnnnnnnnnnnnnnnnnnnnnnnnnnnnnnnnnnnnnnnnnnnnnnnnnnnnnnnnnnnnnnnnnnnnnnnnnnnnnnnnnnnnnnnnnnnnnnnnnnnnnnnnnnnnnnnnnnnnnnnnnnnnnnnnnnnnnnnnnnnnnnnnnnnnnnnnnnnnnnnnnnnnnnnnnnnnnnnnnnnnnnnnnnnnnnnnnnnnnnnnnnnnnnnnnnnnnnnnnnnnnnnnnnnnnnnnnnnnnnnnnnnnnnnnnnnnnnnnnnnnnnnnnnnnnnnnnnnnnnnnnnnnnnnnnnnnnnnnnnnnnnnnnnnnnnnnnnnnnnnnnnnnnnnnnnnnnnnnnnnnnnnnnnnnnnnnnnnnnnnnnnnnnnnnnnnnnnnnnnnnnnnnnnnnnnnnnnnnnnnnnnnnnnnnnnnnnnnnnnnnnnnnnnnnnnnnnnnnnnnnnnnnnnnnnnnnnnnnnnnnnnnnnnnnnnnnnnnnnnnnnnnnnnnnnnnnnnnnnaggggcgcctctgcctggccgccccttctgggaagtgaggagcccctctgcccggccagccgccccgtccgggagggaggtggaggggtcagccccccgcccggccagccgccctgtccgggaggtgaggggcacctctgcccggccgcccctactgggaagtgaggagcccctctgcccggccagccgccccatccgggagggaggtgggggggtcagccccccgcccggccagccgccccgtccgggagggaggtgggggtgtcagccccctgcccggccagccgcccctccgggagggaggtgggggggggtcagcccccctgccnnnnnnnnnnnnnnnnnnnnnnnnnnnnnnnnnnnnnnnnnnnnnnnnnnnnnnnnnnnnnnnnnnnnnnnnnnnnnnnnnnnnnnnnnnnnnnnnnnnnnnnnnnnnnnnnnnnnnnnnnnnnnnnnnnnnnnnnnnnnnnnnnnnnnnnnnnnnnnnnnnnnnnnnnnnnnnnnnnnnnnnnnnnnnnnnnnnnnnnnnnnnnnnnnnnnnnnnnnnnnnnnnnnnnnnnnnnnnnnnnnnnnnnnnnnnnnnnnnnnnnnnnnnnnnnnnnnnnnnnnnnnnnnnnnnnnnnnnnnnnnnnnnnnnnnnnnnnnnnnnnnnnnnnnnnnnnnnnnnnnnnnnnnnnnnnnnnnnnnnnnnnnnnnnnnnnnnnnnnnnnnnnnnnnnnnnnnnnnnnnnnnnnnnnnnnnnnnnnnnnnnnnnnnnnnnnnnnnnnnnnnnnnnnnnnnnnnnnnnnnnnnnnnnnnnnnnnnnnnnnnnnnnnnnnnnnnnnnnnnnnnnnnnnnnnnnnnnnnnnnnnnnnnnnnnnnnnnnnnnnnnnnnnnnnnnnnnnnnnnnnnnnnnnnnnnnnnnnnnnnnnnnnnnnnnnnnnnnnnnnnnnnnnnnnnnnnnnnnnnnnnnnnnnnnnnnnnnnnnnnnnnnnnnnnnnnnnnnnnnnnnnnnnnnnnnnnnnnnnnnnnnnnnnnnnnnnnnnnnnnnnnnnnnnnnnnnnnnnnnnnnnnnnnnnnnnnnnnnnnnnnnnnnnnnnnnnnnnnnnnnnnnnnnnnnnnnnnnnnnnnnnnnnnnnnnnnnnnnnnnnnnnnnnnnnnnnnnnnnnnnnnnnnnnnnnnnnnnnnnnnnnnnnnnnnnnnnnnnnnnnnnnnnnnnnnnnnnnnnnnnnnnnnnnnnnnnnnnnnnnnnnnnnnnnnnnnnnnnnnnnnnnnnnnnnnnnnnnnnnnnnnnnnnnnnnnnnnnnnnnnnnnnnnnnnnnnnnnnnnnnnnnnnnnnnnnnnnnnnnnnnnnnnnnnnnnnnnnnnnnnnnnnnnnnnnnnnnnnnnnnnnnnnnnnnnnnnnnnnnnnnnnnnnnnnnnnnnnnnnnnnnnnnnnnnnnnnnnnnnnnnnnnnnnnnnnnnnnnnnnnnnnnnnnnnnnnnnnnnnnnnnnnnnnnnnnnnnnnnnnnnnnnnnnnnnnnnnnnnnnnnnnnnnnnnnnnnnnnnnnnnnnnnnnnnnnnnnnnnnnnnnnnnnnnnnnnnnnnnnnnnnnnnnnnnnnnnnnnnnnnnnnnnnnnnnnnnnnnnnnnnnnnnnnnnnnnnnnnnnnnnnnnnnnnnnnnnnnnnnnnnnnnnnnnnnnnnnnnnnnnnnnnnnnnnnnnnnnnnnnnnnnnnnnnnnnnnnnnnnnnnnnnnnnnnnnnnnnnnnnnnnnnnnnnnnnnnnnnnnnnnnnnnnnnnnnnnnnnnnnnnnnnnnnnnnnnnnnnnnnnnnnnnnnnnnnnnnnnnnnnnnnnnnnnngtatgtgtggaaagaagtagacatggcagacttttcattttgttttacactaagaaaaattcctctgccttgggatcctgttgatctgtgaccttacccccaaccctgtgctctctgaaacatgtgctgtgtccactcagggttaaatggattaagggcggtgcaagatgtgctttgttaaacagatgcttgaaggcagcatgctcgttaagagtcatcaccaatccctaatctcaagtaatcagggacacaaacactgcggaaggccgcagggtcctctgcctaggaaaaccagagacctttgttcacttgtttatctgctgaccttccctccactattgtcccatgaccctgccaaatacccctctgtgagaaacacccaagaattatcaataaaaaaataaattaaaaaaaaaaaaagaaagtcgagtaggatatagtaattaataacttgttacttgaattttttttgttattgaagcctatcatgttttaaaggatttcttgaactgatacacttgattcaatcacaatcattacttattaagctaattaagaaaattactttttggggtttatctttgatgtgtcctttacttaaaatatctgtggaatgtgcagaaaatgtgtttcctgcctaccaccctcttttggtctcagtcataatcctagtttggagagggtataaaaatgaagaagtaatgctaaattatcatttaaaagtatcagtcataatatacccagaaaagactgaagagatgaaaaaaataagctaaactgggcaaaatgcccagagatgccaacaaatatagcttactttagattaaaaaaaaaggaaaataataatgagtatataaaatttatacgtaggatttaggaattttgttcctttgctcagtgtagtctcctttttgtcttaaggctcattcttacttatttttataatccaaaattctaactaggggttgcagttacacacacatacacacatacactcacacacccatacccataaggctgtttgaaaaaaaaaaaattccagttgcccgtgggatagcctccctcatatcatcttctcaacatgtatatagcactggttctacttttttgccctgtcacgttagcctatttttaagaagcttaaattttataaaatgcaaagttattttcattttaatgccttgacttacaaaataattctccttctaccagtgaatgtagcgttacagtgcatattctggattatatagagcttagacacagatgaagcagtgagaaaatgaatatggggataagcctctgaattgcttcatgtctattgagcatctatatgccaggtgccaggtgtggtgttataaacactacagacagcttgtttcctcaagccaacaggctagtggacagactcatatataaataatgaaaatacaataaaataattcctctcagtaagatatgtactagtacgatgtttgtgtgggagaagcagtgtccaagtwtcctaaaaagtatttgaaaggttttctagtggaggcagggtttgagttgaacaagaaggatgagtaggcattttctaggtgggaatttgatgggagctcttcttggctgggatggcacgtatgtaaaggcacaacagtcatgagacagcaggagaactacaagtatgagcagaatgacaacaaaggatgctaagaggggacaggtggaagataagggtgcacatatgggcaggatggctcctacaagcaaagagcctcagatgccatcttggaagtgagatcgaatattgacctgtgtaactgcattgtcatgtgctagaaagatactgtggcggcagtgtggagggtgcgtgggaggtggttgaaatgtgaattaggacatcagtaaggacaccattttaatattccagccaagagataataagggcttaactaggggagtggcaaagattatggaaattgggaagagatcacagcaatacttaggaggtagaatcatttaatttggtgataaatatggagtagaaggggaaatgaataaatttgggatgacttttggacatctgggtattatgtacatgccgttgctaaaatagggaattgaggaggacaagtagttttgttttgcttgatgagataatgactttagtttttgtcttctattcaagaaagaggtctgggctaaaatttaaattgtcagatcttttggcagagaggtaatagtcaggccaaaggggtgaataagactatcagcaatggagtggttgttagagtcatagaagtgaatgaggagtgagaacaaaagcacggaggtggagccagtgctgtgggaacaagcgaggccaccttcacagatacagtcattagagctactagaacaagttagaacatctatgccaaagtttttatcagggccttccttgtgagtaagtgagaccatcattacagaaagtcagagatgtgaggatgagtgaaactcagtatagacctagttgccagagccgtgtgggtgaataagcccagcacagaacggtcgttagagtcatgggaggatgttggagacacgagagtgtggaaggtgttctaactgggagattaccaaagtgagaacagtgtctgtgggctgaggatggcagccagattgctctgtgcagtgaacaaggggtgaggaagtccagactgaatggaggtcactctaaatgtttgtgaacaaaaggatagatttatgacagtagctagtgggggaaaacagggtcttggatgaataatgtttgtgttcgtgcagactgtaaagatgagaggcattataatacatttcttatatgctgggagtcaaagacagattggagacaagaggctcaaaatgtagaaaagagtttgttatcactgtcttcccctctagttttttctgccaacacaggattggttcttaacatattttggtgggagacgggatattgacttacagttttcttttcttgtactttctttgtctggcttgttatcaaggtaattttgtcctataaaatgagtagagaagtgtttatacctcttctattttggaaagattttgtatagaattggtattttttccttaaatattttgtagagctttaccagtgaagccatctgggcctgaagcttcctttgtgagaaggttttaaactacagccaacttctttaaagatatagagctatttagagtatctattattcctttcatgagctttggtatttgttctttcatagaatttatccatttcatcttaattgttaaatttttggtgtacattatttataatgttttcttattatccttttagtgtttatagcatttttaatgataatccttttttcatttctggttttgatgatttttgtcctctctacttttcttgatcagttttgctagaggttcatcagttcaattaatcttttcaaagaatcagttttggttttcttattttttttctctgatttgtctgttttctattttgttgattttgtgcttatctttgttatttcctttcttttatttgccctgggtttactttgctctttttaaggttgaaagttaagtaactgatttaagacctcttttgttattcaataaaaggattgtagctataatttttcctctaagcactgatttagctgcattccattcattttattttattgcatttttattataaaatttttaatattttataattcactttatgatttttaaatttgacccatgggttatttagaagtatattgttttrttttaaaatatttagggtttttctaaatatcttatggtcacttatttctaatttaatttattttggtcagagatagtttgtgtgatttcagttcttttaaatttatttaagatgtcttttattgtcaagcattggtctatcatggttaatgtactgtgtgtacttgaaaagaattaatattctacagttttggagggtactattttataaatgttaattaggtcataagtcctctttgttttgactaaaattttttttagcttttctataaattgctgagattagggtactaaaatctcttactatgattgtggacttgtctatttcttcttttagttctgtcaatttttgcttcatataattttagtctctgtcaggcacatacacatttatgactgatgactatttgaaaaaattgcctcttttatcattatgaagtatccctgtttatcttcagtaatactcttaatcttagtctgttttatctgatattatatctactccaacattcttatggttattgtttacatgatctgccttcttcttcatacttagttttctcttgtaggcaaaaactgctttgttttttaaaaattcattctgataatctctgccttttaattaaaatgtttagtgcattggcatttatgtaataattaatatgattgatttaagtctatcattttattaactttttctgttaccttgctttttttatatttgctgttattcctgtttcctctttcctgtcttcttttggattattttttagaatctcactttaatttgccttttgactttttagatacacttctttacattattttatgaatgattaatttggtaattaagatatacatccttaattttttactcagagttaatcttatatactttatatgaaatgtagaaactctgcagttatattacttcattagtcatattcttcaccatcctttatataatagttgtcatatgtattatatgtatacacattatgaacctcagtgtgtacagatgtacatgcacattgttataatttttataacagtgttataacttttgcttaaaactgtcacatgcattttttaaaatttaagataacattatagtcttttttttttttttgagacagagtcttcctctgttgcccaagctggagtgcagtggcctgatctcggctcactgcaacctctgcctcctggattcaagtggttcttgtggctcagcctcctgagtagctgggattacaggcatgcaccaccatgtccggctaatttttgtatttttggtagagatggggtttcaccatgttggccaggctggtctcaaactcctgacgtcaggtgatcctcccaccttggcctcccaaagtgttgggattacaggcgtgagccaccgcgcctggccaaacattatagtctttaatatttactgtttccagtcttcttaacttatgcctaaattcagacctgaatttccctgtgctattatttctcttcagcttggagaacttccttgtttctatagtacaggcctggtggtaatgaattgccttagtgttccttttgtagaaaatttctttatttcacttagattcttgaagaatatttttaccagatatagaattttttaaagatatttttctatggctttttggccttcattgtttttctggtgagaaatccatggaaattctaattgatgttcccctatatttaatatattgtttttctctggctaatttcaatattttctctttagttgtggttttcattagtttgattatgatgtgtataggtgttgatttattcatatttttagagtggttgtctaaacttcttgagtcagtaaatttatttttttgtcaagtttgaggagttttctctcactatttctttaaatattatttttctgccttattctctaaactgttcttctaggactccagttgtctatatgtctgatgttctgaaattgtcccacatgtcccaaatactttgttcattttcttttgttttttttttttcttatcttcagattggacgacttcatttcatctatcctgtagtttattctttcctcagtcatctccagtttgttattaatcagatctgttgaatttttatcacagatatttgtatttttcaggtataaaatttccatttttttgtacttcctatttctctcttgaaatgtcctgttttttaaaatcaatatgaatatattttttcctcagtgagcatacttataatagctgttttgaagtttttatttgacattttcaacatctagataacctagacgttggaaatatcaacatctacatataaacctcaacagattgagtcacgttcaattctctgttctttctatgttgggtaattcttgagtacattttggatattgtggctgttatgttctgaaggctgtagatttcattacattcttctgaagaatattgatgttcaggaaaaataactaggtggtactaggtttaataattgggtgacagaataatctgtacaacaaagccccatgacacaagtttacctgtgtactcctaaactttttctcttttttcttttttaaggtgaagtcttgctctgtcacccaggctggagtgcagttgcgtgatctcagctcactgcaacctccgccttctgggttcaagcagttctcctgcctcagccttccgagtaactgggactacaggggttcaccactacacctggctaattttttgtatttttagtagagataaggtttcaccatgttggtcaggctggtcttgaactcctgacatcaagtaatccatccgcctcagcctcccaaagtgctgagattacaggcatgagccactgtgcctggccctgagcttaaaataaaagttaaattaaaaaaaaaataatgttgatgttttcatttttgcaatcaatagcttagttagactcaaattgcaaactgtcattgcctgtagtaggcagtggcatagaactcaattcagctcttttaacctgagttttaagctgctttcagattgccccacacatacatggttcaggagtcagccagagacttgggctgagtttaaacatagaatctggggttgtcctcttctggctgtcttctttcttgggcatctgcatcattctctagcacctatggtttttccaggctctttcccccagtttcctccagtcagaaagatggcaagagtttttgctgcctgccctcccccagtccttgtgccaacaccaccaccattgcagctgcctccagggaaaaactgcaaaaaccaaatcacttgctccaggtgttgactcctcttcaaaatctatttttgttaaatctccaaagcctcaaataggttttcttcctagaatttatatctgttatttgtagcaggattggtctgtaaggcactcagtcttctacatcatgggtcagcagattacagcccttgggttaaatccagccacctgcttgttttattaataaagttttgttggaactaaaccacacctatttttctgtgagtgatttcatgctataatgacagagttgagtagtagttgtgacaaagaccttatacctagaaagactaaataaaatactatttggccctttagagacaaattttggtgaactctgctctgtatcaagagaactcacctaatattttgacctctgatccagtgatctgattctcttccagctgcccacaggcacaataacatcatgttctagaacatcatctggaattgcgtcactgtagagcacttctgtctcaggagaagcattatctcttctttttatatgcttataccacttacttcatctcctattgcatcatgaaatctgaatctctcttagcatcctcatttctttttctctactgactcattccattcaacatacagataaacccagattgaatatatatttctaaaaactcttactttgacatttatatcccctcaagctacctgtagtttttctgtttttctgtgtaacttctcattagggttatctactcttaatactgacacttcctcaccacaagttcataccaatctttacaattctgcattttcttccaatatgcatttgaaatttatttatttcagctggtgacagctgaaacatctatccaaattgcctcttcagattatctttcttcatttttctgtaaaatgcaagatattgaccatggtctgctggaagctttccttctgtgatttccatgtcatttttatctttttatattttttctgtgtctatcaagctcttcccattgctggctcctcttttccacctatctctgaaatatggcatttctcaagatttttctctggccttatcttctttccctattagaaattttcatctactttagttgttccagatattctttttatgctaatgactcaaatccaaaatatatacgagctttaaagttatatacactttaaactctagttctgcctcttactaattgtgaccttaggcaaattgtgtggccaagatctttaggactcagtttgggtaaaataataatgccttatctcataagcttgcttatcatattggcaaccagggcagccctggttgcccccagtggtaagctgtttactaatatrccccgtatttacttttatctagttctaccccagtggtaagctgtttactaatataccagtattttctttctgtctcacttccctattcccttacttgtgctcctgaaatcgctttccaaatagattatttacactcacatcaaagtcagcttctcggagtagcccattctaacacatggaccccaaacagaacttggatcttgaattaaagaacagtctttttgcagactttcatatggttattaaccacttttttcaagttttagaatttatgttaaagttagggcattttattatagtaagaggaacatgttaccaatttattaaaaccacactactactgtttgttttttttcactgttttgtttataaatactactctgctgcccagagtcctgctgcccagagtcctgtgcctgcctgtcatgctgtaagcctacactgacagtttgaaaatcttggctatgatttaaaaatttttagctgataatgatttaaagtatttccttctattctcagagaaaatgcatattctcctggcttgaagacctttaaggcacaaataaattgatctccaatggcaaattctctgtctgtcctatgggaaggtggtagaatgatttgctctggaaaggcctttcttgtactgtcagatttcgtcatgttgggtataaggctgagtctgaccttttgttatttattgctgtaaatgattttatgttcactttcttgcaagtgaattgcttgagttagaagttgaggttcttgacacaacttttaatccattaaaaaaagttaaattcatgtatagaggaactgaaataattaattatgttgtagctccttatcttttttatgatacacctattgctgtgggtatagtgctctaaaaacatctgctcagtagtctgctatagaggcacaagaatgcttttacatgaatgcaataaagtagcagatgtttcttaatgacaacttctcaattcatttaggaaacaagtcagttctggagttgtttttttttttttctttcccaagtgtgtcaactatgcaggctaatgattccaaagaggttagaactgacaaatcaagtcactacgtataatttttcagggtgctgcaagttaggctaaaagtctcatttaatagcactttaataaaattagcatttttcttcccatgcaaataattctttgccattataagtaaccaggaaaatacattaattcagtattaccagcctaagcttcttttattttcttctttggaaacttctgttgaatgttgatttatcattaacattgcaaatagaaaaagtagtccaatgcccaggcttgggaacagggagacatgagggtccagcatttggaagtcaaacatagctccttccaggaataatttctgtcacctcagagaaagcgatcgtgaggcactggtgatatccatatcccccttcacacagtcgtccacagggctggcctttcctcagtacagtaggcaattacccacaggctgtgttccaaagggtgccagagaagccattgtcactgccccacagactgcaggctctgtaacrgaaactgcatgatcagtgactcattaagatttccatgttcagagaacctcttcctaaaagccaaagaatcttagtaggattaatatatccagattgtaacatttagtattggtaagttcatcaggtggcctgtgaatttcagatcagagggctggatttaagagctttgtgctgaaagaggagagcaaggccatgaaaagcaagatgtggaagatgccaaggatcaattttgccttcataattttgtttaataatggtcttggtcaccagcatagagtctttaaagtgaatgcatgcccccagagggcttgcaaaacaatccattgagatgtgagaaataacattacaactataatttatatttactttgattttgtgaaagttaggctctactaatatttaactttttgaaaattttaatataatttttattttaagagagatgaggtcctgctatattgcctaggctggtcttgaactcctggctttaagcaatcttccctcctcagactcccaaagtgctggtattacagacatgagtcactgtgcccagctactactaatatttaaatgtggattgatgctggcattgccactctatgcatttatcagataaccagatgccatagaggttaattatgcaaggcatctgggacctagacgataggaaggagctatcagtgatgttttcactcctttcattgcatgttatgcattgcagtttacctgtgccctggatatctgggatgatattattcaattttagttaacatagctcttacttttcagactaagggctttaaaagtttcctgcaaagaatccctggaacaaaaaaaaaaaaaaaatggtaaaaggtaaaaacaacagtctaatcagatctttcaaaaattggctctccaaatttaaaattaagattatttgaaatatggatttatatttgctattattaatgatgacccttaacctgtgtgtatgttgtacctaatgacagtatgaagcaatcattgactaacgactcattgaaaggcatccagaacttgaataaaacctcttaacagctagagaaggggattgaaatatgagatcatgatttactaagtacacccagtgatatacttcctctttatggatctgtagatctttctcatctgttgcagccattaaaatcacctatcaaaacaatgtaaaaagacctgaacccagatgtttgaaatgccatattacagtcaagatttaaaacacacaaagaagaacaaaaaattacatattcaatcaaattgctctcatcaaaatactactggcaagaaaatgtctgcaccattactaaataaaataagtttagttttctgtagcattttattttctgaatagatttacatrtttggaacccagggctctttgacttggtgcagattaggacagggttctttatgaagagaaaggaaattacctctggctctttagagtctactttgaattaaggctgccgccccaggactactgagcatatgggatctagacatttgatttttgggtgtctgatcatccacgactgtgagcaggactggctggctgctcagcagcactgactctgaagcgtggagtcctgggaaaaccaggtaacagtgtgctcatttgcctgctatttacatctgtcacattttgaggtgctaacttttcaatgggcaccttaaaatcaacatttctgcaactttattcaatcacaaccactggcgcagaaatctaagagccaaataggcaagaagctcaatgaagggtgagggtagagggccagccaaggccttttggtgcctgagcaaagagctgggtaggagggctactttcattagtacccagatcatcacccaactaaaagaatgaccttgaaatatttttccttcacctttgtcttatccttaaaatttttatattttagtgtattttataatatacaaaatatatcatatagaaatacatattcataattgatcaagaggtaaatatacacatattagggttgagtgcttaacttttttgactcctagtgtcatgataaaaaaagtttagagatctctgatttataggatgaaaatggcaacagacaatttatactcattccacttatttatttcacttaacaaatattgattgaatgtctactatttgccaggtacagttcaggatgcttggaatacgtaagtgaataagacaggcaaaagccctgccttcactcacattcaaagggatatgtgtgctgtaatagaagcctttccaagtctgccaactggataaggcctcaagatgtattcttatattcttatagcacttgcaacattatactcaaataattgtttatgcaatgtttttttctcccacgctctctgtagttataagttccttgagagcaaacaccatatctgtttgccaacaaatctccagtgctggcaccatgcctagctcatagtagatgctcagtgaacgttagttagttgaatgtatatgtgtgctgtccatgcatatacaagtgggcacacatgtataagtgagttatttgtaaagctgagaaaaaaacttgtggggcattctcaagcagaaactattgctgggggcaacagaaagtgtaggcagacactttttagtgggctgcagcaagagtttatcgggaagaagcttggataatcagaggtgacaggggtgacagattctaagtgattaggcaatctggtaaacttggacaaaaacagttcctgaaaatctatctgggtgggtgttgtgatcattgaactaaaataagccttggttaagggtgattaggatactaaaatgatcagtgctacataaaactggtttacacttgaatgaagctgaaaaagaaaaattaaaatctcacaaacaaaattcatagatttggaggtaaaattttatgtacttggggactctgtgcattttctctaatagtatttgttgtaattataattttatagctctttgtgtgattattttttaatgtatttccttatattaggacataatatctattattgktatctcttctattcccaggccccaggacagtgtctagagcagacgatggcaactgtggcctgctgcctatttttttttttttttctctttagagacagggtgtcactctgwtacccaggctggagtgcagtgtgcaaccttgaactcctgggctcaagcaatcctcctgcctcagcctcccaaagcgctgggattgcagacatgagccacagcacctagcctgctgtgtatttctgtacagctcacaagctaagaatggtttttatatttttatatggttaaaaaaagaatttaaaaagaataatattctatgacattaaaataatatgaaatttamattttagtgttcattaatgatgcactattggaacaaacccacactcattaatttacatattatctaggctgttttcatgctgcagtggcaaagttgagtggttttgacagagacttatgatgcccaaagcctgaaatatttactatctggctctttaagaaaatgtttggacacctttgatctagaatatttagtgtatcctataacattttttgaatgaatgtatgattaattagtatacctatgtgccagatatacacattttatacattatctcatttaatcacaagggaaagatgcctttatttaacaagtgaagaaactgaggcatagaggggtcaaatgacctgtccattccatgagtggcagagccagggattgaacccacatctagctccaaattctgtgcttttttatttttgcctatattatgcttctctgaagtctatgtgtttttatccgagattttgagtgtctccttgaatcccaatagaaagctgagagcttaatgttgctctcattactgctgaaatattatagtattatttaaaagcaacaaccacatctttgtcccagcacaagcatagtgcctggcacgtcatagatacttgtggaaatcttaaagggattctcctggtaaaaaccaagcaaagaaacaaataaatccttattcatatccatataatccagagacagttttgagcaagggaaggaactcatggcttactgaaacagttccttgctgattcctagacatgctgtttcttgtgcatgtgtgagagggcctgtgctttaggattcacagtcctctaacattcctacaatgcttgcctcttggtctgtttatgaaggctttatcattttcactctttggcagagaaatttactcagttctgaatttgagtgtagaagtttattcatgtgctgaaggaacttgcagtttattcatcaagacatttaaaaatctcacttgtttaaattagggtagtgctatctcttactttagaaaatgactttagccaaacttcagcccattggatttaattatcattgtccttttaaggctcagaatttcttagacccttggaaatgtaatgtaacatcctaagacaggaaaaaaatggaaaggggaaagagttcaccaaatggagatacaagtcctttaataaaattctgtttagtgcttgtaaaaatataataaaatgaaattaaagaaggccttaaaattaggattttcaggggtaggcaaactaaggtctatggactacagcttgtttttgtaaataaaatgtcactggagtacagccacgtacctttgtttacatgttgccagtggctgctttcaggctgcagctgcagagacctatggcccacacagaagcctaaaatatttactacttggccctttagaaaaatgtttggagatctgtggaactagagatataagaaaaattagagaaactgggcttattcaatatggggaacaaataaatttattcatattatataaaaataatgactctttgttcttaatcttctgcaaggataaatctagtggaaactgatttactttctagcaaggtaacaaggaagaattttctggctctggagttaaaacatagactgccttataaggcaagtttcacagattggtggttacatgtgtggtgcaaaatttattcctttttggcactccaaattccattattaaagattccttttgattagggttatcagccacaaatctactgttgaatataataattgataaaggagtaacatattaagccactaatggccattaatagtttagcaagaattaactaaccaattagaaggaaaaggacaaaatgaaggaaatttttatataggagaagatgaaggaatggggcaataaactgggagtggggggtgataagctgaggtcttaggttaatggaagtgcatttaggctccctccgagaggagaccaaatgaagtaacggtggttctcaaaacatagatgagcagctagtgaaggcaaaccggtttatggcataattctgggtcttggtgaatgagtttcctgactttataattccatagactacaaaagtaaagaatcacaaagtagaccctccatgtgtatgtgaggcaagacctgcatagcatcaccaggaacactgcttataaggtgaagtcttaaaacccatcccagaactcctggattagaattttgggggtggaggccaggaatacgtctgtttaacatttctcaccaccaagaatctgatggtctttgcaggctagaaagaaccctggacttggagcctgaaggcttagttttgtgccctggctcagtttcttacttgctggagaccttgggccttcctcctagagcagaggaacaaattacatgatgtacatcaataggcttagaaaaactgtaaactgttagagttgatgctggcctttcttatgtcacatgtaaagggtaacactgaagagaaacacacttgaccgacttctgaagcttgataatttttcaagaggtcaaaattttcccctcttcctctagtttgtcatgttttacataaagaatttctgattttcaaatccattattctgctaattcttttacttttagatgtatagaaataagtgataagtgcgattaagcattattactatttcctcctgccaaagaacctgtgttttgtagcatggactctaagagatagcctcttccacagttccaccttttacttggcgtgtttgctggcttcccagctccaggcactagctgtcttgctgtttcctatgcagtcttaaaagaaacagggtctaggaagcacagtggagccagctgtaaacatccagaaaactgccagatgtgctgtggcgggtttctgcatcccctccctcctgcctcgcccttgagcatgccagcctggagaagaggttttaatcctgcacaggaaacagattcttcctctcagtgggaacccacgttggccatgctgttgctaattcactttggttgatgtagcagggagagtaaagaatggcacctttttacccccttttaaaaaaaaatcagtagtagtagtgataatattactgggaaggggagagcctcactaagatattatccttgggatcatcttataaccacccttttttgtttcagtgttgccttggatgctgttagacatatgttgaacccgctgatatgtaccatatacaacatttacagttgctaaaagaattacgttgcttgcaaaggttcttgtgacagtcacttaytcagaagccacagggattgtggaaaaagtcattctgggaattaagatagtgaaaagaccactccactgtatgataatgagccttgaaacaaacaaaacaagagctgattacttaaggtcccacagattatttttataattcactttaaactttttaatattaaaattctttatttcttgaggaattgatttttcagtggtttatcagaaggcttcatcagtcgttatcacttctgaaaatattaaatggctgttggctcaggaaaatcagcaaatgaagagtatattacatcgcatctttccattgtgatgagatggtttctgtgtccagtcttcagtacagctaaggactgtggactgtctttgaaccagtgatgttaggtttgaactaaagacctgactggtagaaaacaaacaaatcaactatcttttcctcaagggatgttatgaataaagctcattacttacgtttgctcagtaatagtaatacagattattagtgatagaagaaaagtttttcttccttctctgtaggctaaatagagatatggatctcatttccaaggcccaatacactrtttgggtttgctttcaataaaatagctgtgaagtgtcttcagcatgatccctatttaatgggatttagttgtaaagcttaattcgtatcagattttttaaatgagagatcactgtcaacttattgttaattgaattcaataaaatcaaggtttctataattaatgtgaaccatttaatcttttagctcttgaatgaatgtaattttctaaatacacatatcttcatgaaatagcaacattttgagaaaaatcaatatattgtgacttcttttttcaattactcttaatatcaaatgaaatacagctgcccccccgccccccatctctgtgggttccgtatccatggatttagacaaccaggatcaaaactgtagttaggactatagtggttgcatctgaactgagcatgtatagaccttttttcctgccattattcactgagcaatatagtatagctgtttacatagcatttacattgtattaagtatgataagtaatatagagatgatttaaagtatgggaggatatgtgtagattatatgcaaatactctaccattttatataagaaacttgaacgtctgtgaattttggtatcctcagggtgggggggttctggagccaatcccccgtgtatacctagggctcactgtatacccaaatcctttaaaagtcacataataaaagaaaaataataaaaatattaactaactcaaagtgttacgattatgatgttcagaacatcagtccaaataaagcatagtaacagttaagtggtatactacagtacaaagagcagtggtttcagtgtcagtagataagggttgtaggccttcctgtacccctaactatatagtcccgctttattggtgtgggagatatttcagtggatgcctgaaaccatagataatactgagccctatatatactatgttttttcctatacatagctgtgacaaagtctaatttataatgagcacagtaagagattaacagtttctttttggcatatccaaatttccagtatcactacccttgtgccttggggctgttattacataaaataggggttacttgaacataagcactgtgataccacaacagtagatctgaagacccagattgctactaagtgactaatgagctggtagtgtctacagcatggatactctggacaaaggatgattcacatcccaggaaggtgggatggcaggagatttcatcacactactctgaatggcgcacaatttaaaatttattagttttttatttctggatttttcacttaatattttcagaccatggttgatcatgggtaattggaaactgtagaaagtgaaactctggataagtgggagctaggtggcattgggtaaggcaccaacaggaagtgtattgttgtttgtatctgcaagatgagcatgttggactaggtggagtgattcaggtttctttcactattagaattctcttcattctgtgttctgtaacatggtatcagaaacttttttatcttaattttttattttaaatactttaaaatactccttaaagtagatagaacagtataatgaacacccagggacccatctaacaatctcagccatcaccactccatgccagtcatgctccttctatacttccatccacttacccctctcctgtattattttcaaacaaatcccagacattagactctctttattaacatgatccctctgtcatctgtattattagcaccatgaggtcttaaaaattttatttagtttttaacaagcctcaaattgcctcactgtttctgtgctttccatttttttattgaaattttttgagataaccataggttcacatttagtaataagaaataacaatcccatctaccctttacccaatatcccccagtagtaacttcttctaaaactatagtataatatcagaaccaggatgttgacattgatataatccactgaccttattcagatttccccagttttacttgtactcattgtgtgtgtctgtgtgtgtgtatttggttctgtacagttttatcacatgtgtaggcttacatatccaccaccatggtcaagatacagaatagttccatcaccacaaagatatctcatgttgccgttttataactagctctctgccctccagtcccccaacactaatctgcggtttttgacttcaaaagtgttgtcacttcaaaaatgttatataagtggaatcatacggtatataacttttggagattgacttttatcacttagcataattccctggagattcatccaggttgttgtgtatctcaattgtttgttcctttttattcctaaatagtatggtatggatgtaccacagtctgtttaaccatgacctgttgaaggacacctcattgtttcaattttttggctattctgaataaagctgctatgaacattcatgcacaggtttttcaatgctctgggataaatcctcgagtgcagttggtcggttgtgtggtaattatatgtttacttctatgagaaactgtcatatggttttccagagaggctatacactgttttatattccaaccagcaatgtatgatctagtttctctgtatcttcaccaacatttggtggtgtccactattttgtttattttagccattctgacagatgtttagtgatatctcagtatagttttaatttatatttccctgatggctaaggatattgaatatcttctttatgtgcttatttgccattggtatatcctctttggtgatattttgcatctttactcctccatttacttctttttagttgttaggatggtgtgagattgctggtaaattacctatgaagtttgttataacatacttacataggaggaaacagatcttcagactgaaatagaaaatattgcttactagggttctcagctctgtactagaatctccaggaatacaaaaatgagtaagacaagaaccttagtcttgaagttctaaaaccatctggcacttttaactggaaagagaagcagaatatgtgtagaagtctgagatttccaaattgcatgacttcaaggaatgatattttaatgggcatcataaaggtgaccacaaatgatggaaagatgctagcagacacaaaccaaggattcaaattcatctaatatgagtaaagcatgcagaaatgtcactgcatgtagatgactgcccagagcaacactgggtgacatagtagcagtcctaattagaggacaaatacccctggctttcacaacccacaaaggcactcagctgccagtgagaacagtgactggagtgagacttctaacaggattttcaagaagcttgttctgtcccctccctcttatttcttgagcctcctacctgttccagagaatatggatctatgcctaattgatcaccagtttcacatacctggtgtcaaccccagcacattcctgagtgcttaattcgagtttgggtgaaggatattttttctaaaamttgtatcttaactagcagcactgggtctcaggcagtctatttctgcacttttctatagaaattaatgacccaaatccttcgattaagtatgcacttaagaattgcacagtgatggcctaagaagagaaatagctcaatagagaagattagagaatamacacacacacacacacacacacacacacacacacacacagaggtatggtgacatttaaagtcaatggaagaaagatgaactattgaaatcatctaggaaaatttcttacctcacactatatacaaaacaaaaatcagttggattaatgatctaaattttaattttaaaacgtgtatatagtaaagaaatttaacatctttataatttgtaagactgaggtggggtacagcaggaagccttctgatgaagacatgtaacttagaagctataaacagaaaatgtacagatttgactacataaaagtaaaaaaagaaaatcctttgtgataaaaaagtacaacaaatggttgaaagaaaacagaaagtgttttttatatatgtgtgtatatatgtatatatttcacacatatccttgcacacctatttttctatggtgcagacatatatatttatctctaatagttattatttccgatgtacaaagagtttatataattcaataagaaaaatgcaaatattcagaaaataggtaaagaataaaaacaagcaaatcatgggagaatacaaattaccaataaacatattggtaaagctgctcaccttcactagtaagtaaccaagaaactaggaattaaaacgataagaaattgatacttaaaaattcatcaacaggcaaaaattaaaaacaatattcagtatttattggatataggaaaagagcattctcagacatttttgctgggaatataaattgatacagcctttttctgaggatggaatttttgagattcagcatctcttgaaatttaaaatgctcatatcctttgatacagtgattccacccttaggaatctgcaccatagaaaaaatagaggtatgcaagggtatatgtgctgtgatattcattgcagccttatttgtaagtagcagaaaactataatcaacctaaaatatctggcaatatggaaatgttaaaaaaaaacacaacagcaactatggtgtggtcatgcagtgaaatatagagaaggcattaaaaggcactaaatctatagcagtgacttggcagcacgtggcaggatgcccacgagtgaaaatatccactctaggagcatatgtatgtatagcaggatttaagcaggggcgggggtggggaggaggtgtgtgtgtgtctatgtgtgtatatgtatttgtgtgccaaaaatcaaaaagtctaaaaaaaatacactctggcctgttaacgatggttacaaacctgaggtataggagtgctgagatgaggggaatttcattttttcttttatgtacttgtgcaatatttgtaatttttaccaccaagatagaattattttataatattaagaaagaaaggaaattataaatgctaagcaacccaattattgaccaaaaagaaagaatttggttaaaagaattgatgtaatagaaggtacagatacctatgcctagtgaaaatttaaaaagaaaacaaaatagaaaaatctttttcttgctactgtattaattttctgtatctggcatatttatttccatgatttctttctgtttattttattatgtttaattgatggtgtttactggagtttagtgaaaaatattttgtaaacatctccagttgtgatttatccattgtaatatctccccagtgaactgactgtgagtagggaattacagaattatctgtaaaggagatacagatcttgaaagtagtctggggctttgcttatctccacaggaaaccttatttcatattgataaagtatgaaatctttccttagttatttctgattgttcattgttgttactgttttaatgagaggtasaaatgagctaaaccaacctgcttcattccttctagtactaatttaatttcaaaggaaattcttcaaccccaataaataagtgaaagtggatggaaccagggtctgactcaacatgtccaattaattgcttctaaacagtaaggtacattcttttaaaagccccacacacaaaaatcaaccagtaaaaaatgatcaggtgagaagtgagatgactatcatcatctctgcttacaaaactctgttcaagttgacattaatatttgccatctactctattataaatcaagatttattgtagaaatataccaaagatagcacaataatgaagaaaacagaatcatctcaggttttgaaatatacctaacaaattcaacctcttgcaaaataactttcttattcaaaatggaactgggaattgttcagcacacaatgaatcatcttttggcaagtacaatagaatctttagggacatttcacagcctcttgttcaattgttaggatgtttttagctttcacaggtagggaagaaggtagcttatatagccatcatcttgttgctaaaattgtacagtaaagatttttcaggcaatagatcttttcagatttttttttcctttttctttatccagagcctctttgtgtctcaaaaacaatctggaattacttaatgctaatgttttctggttttactatttacccaggactcaaatgttaaacattaatatgggaaactcccttttccttgcctcatagccttatatttatttaactgttattttgtgagaagaaaatctcctcttttcctctccatgttagtacttttcttattaagaaacccgttttcgttttgtttttgcttttttttaggaggctttcgagctacccttggatgattgtgaagtgattgaaactgcagcagcgtccgaagtgattaaatatgagtatcatgtcttatattcctgtagctaccaagtgcctgtactttactttagggcaagctttttaggtaagaacatgtctgaagctaaaagtaaatttataacatttacatataaagcaaaaagcatatttggaaaattattctccagaggaaaaaaaatagagttaaaaatgagaaaactgtgggtgaggtaaggttttaccactaaattttctcatgcttcagaaagggtatcaagacttcagcgtgaatgatatcatctcagccttaagtctgatcttcagattcttggccttttgcctgaagttgactaagccccctggccctttttcttttctttactttaaacaagtaggaacaacttaaagctacaatgtttatttacttctaactttacagtaaaaatttattttaatctcagatgatccaattaactcagaagctcctgtgcctccttccccaaaagctaataattattttaagaaatgtttatcaattagcttaagctgtatttaaaaatagcactaacatttccttcagccatctatacatctccaatgccttagcttcctgtgatgctgttactcaactcattcccctgccaagaaggtggaataccctgtctccttggaggccttagctaataaagcttatttaatcagcagccacatggcgtcctcactctgcagcacagccatggcttcccgcttagagtccactgcctaaaccgggtcagcattgggatgtgctgccacccaggcccagggaccaagatgagcctcctgttcagccaaccccttgccctatttctccttttgtatctggccttatcagcagcattgtgcattttgaacagccttctgacttttttctggatagctaagacatctgaatttagccaatgatattttatttttaattcaaaagtagcttaagctgcttgaatgtatgtttggtagatttaatcacttgctgttatattgtttaatggtctctaattttgcagtgttggcagtttaacaagcacttaggatttaaaacacaagaagaaattctcatagactccctggtgagaagattttaatctgaggtgcagttcctaagaactgacaatttggggtaaattttcaacatgggacatggggaatggaggacactgatagttcactaattcacaaactcttgctgtggatttatccatataattattacaagcctttaaaacactcattttatggtaattatatttggtttggagcccagaggttaaaggaagtttcttgtcagtgagctgtgctatactaaaaagtaggagatatatttgtttattcagggggaggaaaatgtctttcttggttctggtttgcaatggctctgccttctagattcagagacaagtcgaggctgcaggtagaggaaataagacattacttcttcaatactgtactttcatataattagtattcaccataagcagttaatcaccagagaagagctcccagagacaaaacaagttgtttagcttgtcagcattagggaatcagaggtgttgaaacatgactgcttctagctggaagtgggtcttgccaaggcctgctgatgagctcatatgtgtgctttgctcttatgtgccaacagctccccttacagtacagcacagtaattgttcctgcaagtccaattatattttaatgacattggtgtagtttctgtgatcctttcttcacgattttctattcttttaaaaaaacacaattaacattcttggcttctatttgtatacttttacaatgccctccatttatgccttataaaggtaaaccaaaacaagtcatttgtttttatgtagaagcattcgccccccaccaccactgctttgtgttgtgtagagtgggtattaggaatttaaaattttattttggcccagaattcatttagtgcttgttcaggtacattaaaatatcaaatttaatttttgtgcagcatactgaatgttttctggtggagaaacatgaagaatggttctttctttcctttatcatattctaataatttattttttctttccacctaacttaacctcatggatatttttaaaatgtatcaacctttactctggagtcacaatttttcatttattccccccccagtcttttttattctccttactttttcctgtgatatctgattactctggcccttcatctgtttgttaaacaaatctctgtcagtgtggtgaaaggattcctaatgtcttcctcttattccaggcccggatttttctttgtctcattctaagagagttccgacctagaaagaggatgactgtaaaatttcttgcccaggggtctttttttgttgttgttgcttcaaaaatagttcacttagccttgtttttgacagatatttataatttcttttgcatttgattgttagtacaaattaatttctctgctttgctctaaattttctccctgtacctatttttttaaggaaaagcaaaacaagtaataaatagtttccatttaaatttacattaccctttcttgtatcaacttgtttagatttcagaagaaatctttactctggttctcgaaatgcaaatcccttagactttgaattccttttctttatatggtccagtttccaccaggccaattactagtagcccaagactcagttaacatgccatctattcttgtcgctcccatgtcatgtcatgtcatatcatatcatatattctattatatcacaatttgtactatagcagaaatatttgtttatatctataaaatgatatgctggaacatagagcttcaagataaaaacaagagtgaaggaaattgatactgagtgcctacaaagtgagaagctttatttatggctttgtgtgtatacatgtataagatatatgtatgtatatatatggcttattcagctgtggcacagcatcaagtatttgttaagtgaaacgataaagaagaatttctagtcatttaaaaaatacagcccaagaatggaaacattgtgatggtgcctacttcaactgctatgccaggttttgaaagaggaagtaattctgttgtctccaggagacctaagacccaaaccatctatgtatctttactctttagtctgatacttttcagagactataggagtagtggacttagaaaaatagaacatcctgaggactcaaaagtgggtatccaaactagctgaagcagctgttccacttctataaacacgtatttttatttaattcttgaaggcagacagccaagttgagacagcattctgcttctgcctctcatttctactactttggtgtacaggagctcagttaccaagtgggcaacgtggatttaagagaagaaataagcccttccatcccaatgttctgtttttctctaactacttttgtcattgtaggtttgggagaggtggtgggacacagttaataccctttgtcactcaggagagggtgagacataattgcacgtctgttgagtaataataaatagcctacattggaatagtgccttatagtttagtaaatccactcccacaaagcattgacatcttcaagtgcatgctgttttttttttctttttttcccactgtttttgaagcataccatattaaagaattttttgtatcatgccaaagccttctatccattccctaccattcttattccctgacctttttatgtctcattttcccttttgagggctcagctttgatcaaaagctagtggcaaatgttacaaaggtggtaaaacccttaggcacatacataatggccttttgccttaccagaggcctaggcttaaatattttctccttacatttagctagagatttctatatttatttcatcttgaattctgattcatctctttcttttcatttgttctcagtctctattgaaaaatggaccaagtggttcttcttattttcaaaacatttaattctttggatgacatatgggttcttcttgggagctgttttgacatatttctttaattagtcagcagggctgcatttgaatagaggaggaatcttttcctccattcagcaaaggaatggctgtcctttatggagaccattctattattggcccaggaaawaagggtatagaattaaaaatgtagcctaaatatttcatgtgaaagatttgtccacttgttgtaggcctgaaggatgctcatggagaaacagggcaaaagaaataatcaaagaatagttccttctcaaaggcagcatgaatcaaactaagataaacgccatgataaagaaagaataatggaaagtttggaattaaagcagcatataaatcatcaagcaggaaaaggattgtctgtggtttgcaataagaggacatctttggagtgcatagaggagaatgacagcaaaacaggaaagatgggggttggaggaagccgaagaataaaagtagaatatccatagctctgtccaacaacttgtagaggacagccacaggttgggtttcttgaagaggttaggaaaagcactgtagaaggggaggagagtgagtgccaagctatgggggctggagggctggagagagcccaccatatttggagaacagtgaaggaccagtttggagtaggggctaacttaggatgacttacggaagaaatagttgaaaagatatgttgaggtcaaattatggaagagataatggttaggaaggggttggaagatataaagaaaaagtgaaagagtttgagcagaagtgaatgagaccagaggaaggatgtcctagaaattgtgcctgagtaaaacagaaagaaaaggaattgaagggtgagagtgaaatttggaaaaaaaaaaaaaaggatttggctttttcattgttgttgttattaattttataacaatttaaaaacaataacctcttagagaaaatgaagaaaatgagttggaaagaacatattttcggggaaagatgtattattgcaagtacggtaagagttatggttaaggcagcttgttgaataggaagaaaaatagtggattagagaagtattttaagactggggcaaaaacgactctagttaattactacagtgagcagaaaatagaaaattatttgacagataatttaatttagagtcttaattgtaaagaatctttaagaaagtttgtgtatttatatttatgttacacatatgtttatgtagacagtaaatctagccaaggtcatgataatgaaccataacatgaattttggtgaattaaaaagagattctagggattgaaatgaatttgaagagcaaacagtgaaagttatttttaagaataatgaaaagttatctaactaatacaaatatattcaaactgaaaagtccaaataacagaggaaatctagtgagaattatttgttgagccatgtaaatgtttgaaatattttggggaattaggatagaagtcacatgctgggttagaacatatgatagcaatagaatctcattgaaaaatcaagccctgttttgaaaatgtactaaaggaaaggtgctaaagaaatgggaagtaaaactacagagatagctagttagccaaaaggtttattctaagcagaatattgcttagccacatatacaaaaggcaagagattttagttggacccagaggcttgggagagaaaataacaaggtaagtacattaattttattaacctgtaagcgactgtattttagctttcttaggtgaatgtttgtgccatatggaaaaaacatctctttgcttactattggcacaatgagccctgtttgaaatacctattaaaatatacatgagtgcctactgtgtgcacaacacaaatctcattagcctctttttaaaatatgctgaaacaaatcactgcctaacttgtaactcatgtattgtttttctgctccttcaaagtcatcaaagcagtattcgagtctatatgttaggtgctgttttgagaaggcagagactgcattccatgagaaggagaccaggttggatggtggaagtaagggtattcaaagtgctggtatagagtaatatagtagtaataggtccatgatgtggggataatgtttgaggaaagccaggaatacaaattactgagtattaatctcaagagtttgggatcaaaacctcagaatactttggataggattgaaaatagagtgttggcagggcgcggtggctcacacctgtaatcccagcactttgggaggccgaggctggcagatcacctgaggtcaagagttcgagaccagcctggccaacatggtgaaaccccatctctactaaaatacaaaaaaaaatagctaggcatggtagcaagcgcctgtactcccagctacttgggagggtggggtggaaaatcgcttgaaccctggaggcggagcttgcagtgagccgagatcacgccactgcagtgacagagcgagactctgtctcagggaaaaaaaaaagaaaacagagtgtcttctgctttagaaccagcagaccttaggctgtagatatccagctggtagtatggttctcagatttctggatcaatagtggtatcacagggctgatgtctcaggtatcttgtggacccaatgttgcttcccttgggaccattttctgattcagaggttcatcaaaatggtcttatatgtcctttactaggttaagtgattcacttaatttaaatggaagggtataacatcacttgcgttattccatgtttcttaacactgtgtgtggacagtttaagatgattcataattgctcctttatgtgctattgggcatatgttcataaaaatagattgtaacacacataaactttctcatgtaattaaaaaccatgttaacatctattttttctattcaagactgctagacaaatatataacattttaagctgataattttgaaaatatttattaagcaagacttttaaaccatctatttgtgctatattagatgtgtacccctggttgcaaataatttgataagcaggaaaaggcttattgaarggtagatcgtagagtcaactgaaggtggtagaatgacaaggcaagggaatatctgcctccctttagctttggtggtagaaatggggctctgcctcctacttattttggaatttatctcccaaattggaagtgtgtttggatactgagaaatcacatatctgctatagctgcatctgcttaatgctatggatttatgtgagtatgagggtttttaaaaatataaatgtaaaacatttaatcaattaattttattatgatcattcagccattattcttagaatgtgctaattactctagaaataatgttgaactttcatctgttcattcatttgaaaatatttatacataaggcatggatatgtttctgaaatgctgagataaataaaggaaatcagagatggataataccatcaaggagcttacagtctagtgagggaaacacaagataggtctgaaattcactataacaagtagaatatgttaaggaccataagagaggtaaaaggcaccagggcttggagagctatgactaccttgagctgtggtgatcaagagaggccttggctggacatgggatttgtccatgagtgataggggaaagggtgagccaggcttgggaagaaaatcatgaaagggaaaattccagatactcataggttaggcagtgttgatggggaccactagtaatagtagcaacaagaacaatacaactaatatgcatgtataactttacactttacaaagaactcctgtgcacagaaacacatataatgtagtggtgaaaagcgcatggtctagagtcagaaaactttagttctgattcctagctctgctgcttactaaccttatgaccttgggcaagttattgaactttgccatttcttttctttcatcatctgaaaaaaaaattgagttagcaataatactgatttcagagtttcgaggatcctgagcttatattggaaatggtgcttgacacttagtgcctttcaatcatgctagccaaattatatatctagatcttcacaataaaattagaaggtagtaactattattaccctcatgtgaagacaaaaactgctcagaggggttaaattatttattcaagggtacatagaaaactgtagagttgggacttaaactctatagcccatttttcactacatgacactttcattcaaataactgaaatttaagaaccatatacgttaaattaattaattgatgttatatgcaagcaaaagaaagttgccatagttcatatttttggaatttcatttagatttcttgagcccaataaagatacaaagtcctaaaatgcttataggaataaataaaagttacagaattagccagtatagtagctgaaatgaatgtacgtgaacaattgcactcatttcatatcacaatataattttctcactgaagcaaaaatgaattttcccctttggtggagcttcatctctgccttactgtggagtatgacatgaatttttatatctttcaaagctatgttgaagacaatatattgaataatgacattttttgttgtgaaaaatctactctttcctttttatttctaatggccacattcagaacattattcttaaacttactctgaattatttgtactctctctagtcttcattttaggagttaaaaaatgttagtgaaaccgtgcacaataaggataaaggtgactccagcgtgcttgcactagagttagatagtgctggtgaaatatctcatgctgttattggctcatgaaaactaatagccctgagaaatttaatttagaaagctgcacattttgagtaatatatagattacttgacatgtgggttattattcaattgagagattttatatgaaaatgtcaaattaaatgctactggcagttgctaaagattgtactttttaattattctatttttcacctaatgtctcttcttcttttgtcattgacactttagattactgacagaacattccattagcttaaatgtgtattatcattccaagtgatacaggcacatagtaggcactcaataaacacttgttatataaatgacctcaatttaccatgctcactatgtaggttactactgaaattattttggcttctacttctttttcaagtattcaagagattttactgagctacacagcctcaatgtgactaatgaaatttctaagcatgttaaaattggtgcgattgagtatcttggatctgaaacgaaggagttgttgattgagtatgcttatgtctcctctgactgaggccagatgtaaaaaaatagactctcttaacatggtttaaagtttctcattgaagatactttgaattgaacatgcaggcacataataatgtgttttatgtacttaaccaagtatttatgtccgtgttttaagttttgagtcttcagttttcataaataagtggatatgtacaacattcttcaggtttctactttgtttatatgatgcagttctttatacatatataaatatcccagtttgtttcagtgggatttctcaagtatccattttgcttttgaaataattagtcacgatcatatttgaatgcattttagatattaataatgtatgccacgattttgaagatattgctgattaagttagatcttttgtttttgtatgaaagatctcaaaaactaacttttgtgtgtctttgatgatgaaggtgtgaactgtgactaggcaaaccagtgacgaaggcttagggaacagaaaccacatcatacctcattaagtcattgttgtcatagagacaaagctatatttacccagaccttttacagtgtaagtggtcagcagaaactggagagatttgcagagacacagaggaaaagcaaaattatatacttttgccaaccatactctgattactcaacatattttgggaactgctggttttgaaacttcttccagtccttgtggctagaagttggaagatggttacttattaaaggtgaatttgtttggcgacaacaaaatcatttggaagcaaatatatggaataaaataagtataattttttttcctttgatttaaacctatttgggactagtaagtaattagttacttgtctggctctgaaggcagttcaaaagttcaaaggcagttccattgacagaattacagcattgttggaataaatattggttgaatttgctgaataatcaggtaacctccctaggtgactgttttgaggaacagtggtcttttgaatatttaagacctgatatgcttgttttaaaaacatgtagtcccaccaggcctagcatgccaccagcagggggtgccaaacacagaacttcaataggtgctaaagagactgcagtggcccttgagatagccgttatgggcctagaagaagcagatattttaacaatggtattataattgcttgttgaccttcctcagtttttttaagggggttagattttggaagttggagaccatggtttggagagggtattcatggaggtcacgactgtctaagccatctcaaccagttgcatcattgtggatgtataacagacttgcactgttatattaccaatttttccattggtttcctcatttgaagagtctacttttcaaacaaagctctggttacaacaatcaaaagcaagcaagttggtttagaaagttggggtgagaagaaaatagtgcttattctgaagaaaaagaaataaagctttgccaggcctcattgggattgcagctaaaggactccactgaggtaaatactttcctggcctcttgtctctgcccttccctatatagccacatttttgtaaagatggagtctcactttgttgcccaggctggtctcaaactcctggcttcaaataatcctcccacctgggtctcccaaagtgctgagattacaggcgtgagccactgtgcccagctgttgttgttgtttaaggtgatgaaaatgttctaaaattgattgaggtgatgattgcacaactctacgaatataactgaattgtacacttcacatgggtgaattgtatgtacgtgaattatatcttgataaagttatgtgtgtttttttttagtcattggctttaagtgacgaatgttagtgatatgcatgtagtgctagtgatcccctacccagccctggtggtctttccactggttggcacctctccctggaacgctgtgcctcccagtgtttgcacacaagttactttctcactaaagtctaaaattgcaaacccacctctggctggcacttcttagcctgctttacttttcgttttcaccatagtatgtatcacctcctaagataatatacagtttacttgtttattgtgtttattgtttattttcacacacacacacgcacacacacacacacacacaccccaaggcataatgtaacctccatgaaaacaaggatgattgttttgctcactgatgtatcacaaaggcttggaacagatgcctggcatatagtaggtgcccaattatataaaacatctacttctaaaattaacttctatccaaaccatttactccatacttacattgttgcctgaaatactttaaggaataaaattaaaatcattactgattaccagatatgaaacccagcattcttctctaggtctgaaaagctttatggtaatagaaataaagttaaggaaggcattttttcatcatttatcatttgctcagtaaatatttgtaaagcatttgcagtgcctctgccctcagaggcagcgtggaccagcaggaagagcattggtgagtcctgagatctggattcagacttcagttcagtcatgaaccggctgcatacttttggcagatacatatttcgtaagaccttggctgccctatttataaaattagtggttatactagctctaacattttattatcctactacaggtatttgtttacttctaactttgacgtgtaaaaattattttaaaagcatgtcgttctgtaatttgattagtttactatttgacactaaagttcttaagatcttatttgcctcttcccacaccaatacacacacacacgcatgcgcacacagacacacgcacacacatacacatatgcatgcatggcatttgcatatttcaaagatgcatagtgcttaagagcagagtttggccctactctgtaaatgtgttcagaaaacaatataacacagatactgaaggcagcttgtttttaacttgtagctaaacatgacattcaaatgttaattggatgaataaatcttgttcattttacagacatggaaatgtcaatggaataaaactatttatcacaagataatggtctcctgccgctagataaatgccaagatgaagatacttattgaaaatgtatcaaaatattctattgctatttattgaaaataaaggttgaggaaaagttcaactttttaggtcaaacatgagaaatgccctgcttataatattagtatggtactatatcaaagatgatatgcacggtatagcaacatgggaaaattctaagaaataacagtctagaaatgaatcttttaggtttgagaattactggaataattgtgtgagggctgggaggagattcctgatatttattgagctcttattgtgtgcctaacacagtcctgggtgcattcactaatgtaagcctcaaaagaacaatacccagaaaggatcattattctcattttgcaggtaaagttaaaagcaaaataatttgcactcacatggagagtaagtgccaacaccaggatttaaaacttagtccagattccaaatctagtgctttttcccccaacatcatacatttctacttatacttgaaagtcttaatacagtgatttttggagctcttgagtagattattttccttatgctttgttgcccttgatgaccaaatacttctttggtctaaatattcagtatattgctatgtgaaatatctttaagtgatatcatccattagcccaaaagagcacgcccataagtcttgagggccttatagctctgaatggatcaagttatattggattctagcattaagacaccttctttccagtagtgtatggtttgaaatctttaggtgacttcttctttctgctttcttttcagaacttagatacctatttttccactttacttaccttgtgtataatgtaagtgccatagtggtctttgtaaaatacattgtttgggtggatacagagggataattgaaacaacttaaagaaaaagagcattattgttcaataaagcttttactgccctcttcatgccaaccccgttctcttgtccttccccaccccaagagtccctttctccacctgccatagacaccaagtgttaatatctctcttccttggaccatcagtgagcttcagtcttcttcaggcagagaccactctactgtaatatacttgtcatagtttcctcagtagatgttaggctccttgttaggagaaattgcgtgtttttcttctctctattctccatggtacctgatggagtgatttggacattatagatactccatgagaatgtgaaagatgcatgggtatggcttctttgttttaaggactagagtaagtatgaaggattcagagtattcatggtgcacctttatgaatatgggagtctgttggttcctttgcctgtgcttgcatctgtcagttctctctaaaacacatttggattttatttattttgtaaaattcctagaggcaatgaatgagcagacaatttaaatgctagatggatacaaagctgagaagcttgaatgtttaaatttccctcaggaagaaaatagtaattcatatagcactctcttgatatataaatagcatgtgcactgaagatctttctaaaagtcatgatwttcttccaggagttttagattgacaccaagcaccattgtgtcacatgaattactaactcagtctttaccatgcactttcacagatgggagacctttaactctgaaggacatatgggaaggagttcatgagtgctataagatgcgactgctacagggaccatgggacactattacgcaacaggttggagagtattgtcattttattgtatgcatgttattgtattctttcccgctgctcatcttttctgctagttccctctccaactcttttccctatttcacttgtctatatctttacatatttcacctcaaagacagtttccttaaaaaaaaaccttcccagacccagtcttggtttagccaccctattataagctctcagagtgccctataattatcctttagaatgcttattccaattttaaattacatattaggatgatttaaaaaaattgatgtctgtcttctccactatacagatactccttgacttacaatgggaatacatcctgataaacccatcgtaagttgaaaatatctgaagtagaaaatgcatttcrtacacctaatctactaaacatgaaagcttagcctaacctaccttaaatgtgctcgggacacttacattagcctacagttggacaaaatcatctaacacaaagcctattttataataaaatattgaatagcttcatgcaatttattgaatacttgactgaaagtgaaaaacagaatggttgtataggtatcaaaatatggtttctcttgaagatgtatcacttttgcaccatgataaagtctaaaaattgttaagctggaccatcctaagtctgggactgtctgtactgtgagctctcatataggcagaccatgtctcttttattcttcattgtacatgcagcaccaaaacagtacttatcatgtagtatgtgctcaataaaaatgtattaagcaaatgaaaatagaaactaagttggcttatatattaagaaatagatgatttggcttatgtaatctatactgttttacagttttactcataaatacatttgcaaaaaagaagagcttttgattaataatatggttgcaatagtgatttgcaaaagtagagaaaatagatctgcaaaagtagatataaaaagtagatttgcaaaagtaaaggaaatagatctgtcaatcatgtaagtcattactgccttgctaaaatcagtagttattttggaaatttaaaactactcatcaccttgcaaccaatcatcatctccttaaaaataatttttacttatatcaaaaatattattttttccaagcttctgttcagctaatgaaagcttcctttaaaaatgagtttatcagttattagaatttttatgccctcttatgtgtttgatcataatgacagtttacctcccaatcaacataagaatccttagcatcttgtaagtggttctttaacaatgaccattttctaggttttaattgaggacaaaactagctytaggtatttgtatctttcacactgcccctcaaattaatcttttctcttcccactgtcaccctcctagatcaagccctctgacctcacgtggaacaattagtaaagcctcttacctgtggttttctgctcctttcctctctgccccttacctgtagtcatatctttttaaccactgctgtgcttacttacctgtgctcaaacctgcaatagttctccgagggcctatgggatgtggtctaaatgctttgcctgggcatcagaggttgccactccctggttccaacctgctcttctaggtttatcttctactcctctgctctatacagctcttgccaaatatggttattcatctctctatactcctcttgtgcagtttgttcttgtgatcttttctagatctaatgccttccctcatttttctgtatgcattacctgttactacctgtcctctcatacattcccttctctgaaaccacttcaactcacaaaaattgcccctctgaaatccaaatctgtagaccaggcattggtggtgctgtgaagaaggataatgtgaaatatgagaaaaccaaccctaaagatttggcaagaacattttattttatacaaactattttggattaacctttaagtatgtcaagatgagtgctaagagttccagcttctagtgtcttgtcagtggccacaaactgtacaaaaatttgtattgtagagtccttatccacaagacccagaaaatgtttggttgtaagagtcaagaaagatggcaaaagatagaggaaaaatatattcaaaaatatatgtgtatttaactttacacccatttatcaactctttctcaattccattatactcttgaatccagttcttaccattttccttttctgcctctagcagataattaatctccttaatgcaggcctgtatatagcacaatttctagtggtctgtgatattttatattttaattccacgtgtctttgttctgacccatgacataagaacaagattttgatacaatgttgacatagatttctttttattgatagaactcttacattgttaaactcaccactgaaccaatctgtatatagattatttttaatagaattgacgaatgtctttcattttatagttatttcactgtcacacagcctattagtgtaccatctttttcctccctatcgtagtacggtattacagatcaaatcctatcacaacaagcattactatttctaacactaaggctggggctcacttaataggagggatatttgatataaccacactacaacacaactataaaacttaggtggtcctttggaattgatcttattgggatttgatctgtgaacagatatcctacttctaataacaatgtttatttaagctttaaaattgctcatcacagtgcgtgtcgaggcattacagaccaagtaggggaaactcatttgcagccattgcactacttggcatttgaaaatcatcatgaatatttcctttggagatcttggcttttaatcccagattggttaatgggttggtatttatatcctcttctttgcttgagatctttgggagaatgggtcttcattttttagtaccacatacaaaagaaaacaaggtgtcctcagtgagatggagggggagaagatgatacagcactagggaagaatgggctgatagaatattggtggtgttgaatagtagacaccgttttgcagaattatactaaagaatcattagcttgcggactgaacatgataataatatgctgtcctccagagtggcttaaaaacaaatgcagcctttgcataatataaaatgcatttcacttcattttcaggcctgattgtgctcatatagtttgttgctcttcatctttagtaatcacacttctgttctttcagcatttgtcttgatgataaggacctattcatgtcagatgtaaaccccctcttttgaagataagccactcataaatttcatacatttgattatggtgattacttacctgcttttgcccaacattacagactacctattatatcaaccctgtagcctaataaaaaaacttctgaaagaaagttaacaggtacttaggttggatctgccttaattgttatagtgagtgttacaataatgatcactggaaggtgttggctctatgttttaagaaagggattcctgtgatcttggcatggcctaaagtcacaaaataaaaatgggtaccttcaatttcactttaagatatgtgtgtttatgtgcagggtgtatagtggtcagataagtaattttttcttagtggattctttttttgaactttatattatggaaaattttaaacacatacaaaagtagagataattgtgtaatgtgcttattagctgatgaagagtttggttttttccatatctcatacagttaggaacttttttgaagcaattcctagcatcattttatttcatccctacatatttaagtaaatatttttaaaagataagagttctacatgaatgttcgtatcagttttatttataatagctcaaaatggaaaaaaacccaggtgtcttcagtgggtagatggttaaacagagagtagcataccattaccatggaatactacttagcaataaaaagggaccaattattgatatactcagcaacccggatgaatcttcaaagaattatgctgagtgcaaaaaggcaatcccagaagttgcagagtgtttgattccatttctataacatttttgaaatgacaaaatcatggactgaagaacagatctgtggttgccaggtgatagggagtgtgaatgggagggaaatggctgtggctattaaaggcaacgtgagggaaccttatggcagtggaaatgttctggatcttcactgaatcagcgtcagtatcttgtttgtgatattgtactatagtcttgcaagatgttaccattgggggaaactggataaaggatatgagatatccttttgtgtcatttttttaaatttttatgtttaaagtagagatgggggtcttactatgttccccaggctgctcttgaacttctggcctcaagtgatcctcctgccttggcctttcaaagtgatgggattacaggcatgaatcactgcacctgacctctttgtataatttcttacaactaaacatgaatctacaactatctcaaaatagttaattaaaaaaggtaaggactcaaaaaaaacataaccacaattctattatcacagataaaattattaataatttcttaatatcattaaataagcaattaatgtttaaatttcccaagttctttttttatagtttgtttatatcaggatccaaaataaggtttacacattaaaatagttaacatatcttaagacttttggaatcttacagattctcattcctccatctctttttttttcctggtaattttttgttgaagaaacaggttgtttgttctgtagtgttttgcagtcttgattttttttttcyaattgtatttctgtggtgtttactatgttcctccctgtgtttttttataaactggtagttagatcttgaggcttgatcaaattcaggctcgattttttggcaagaatacttcatggttgcttctgggtatgccgtcggggggacattatgtctggttatccctcttttttgtgatgttagcagccattgatgattattgcctagacccattaattcattagtgattgcaagatggtgatgttctaattctatcattcattatttattagttggactacttctataatgacaaagtttctctctccatcttacttacctgaggtatgctttgattaggaagggcaggataaatgcttgattctttccctttgtgagctagctttcaagataatgagttggttctctagtatcctccaaaggtaaccaagaaccttaaaaaatatgtctttatggactcataaatgttttgtatgtgtccgttcatagtagtggttatctttattgatgttcagtttacctcatctttagccagtggaagtctggccaaagacattggctcctgagtcattttgatacaacccatgtggctttgatggcttccttgtttagtggtatgacaagtggttgcacatgcatgttgtgcaattcctgcccagacttgttggagtcagccaaggagaactggttcctttgggaaatggtagtgcctttatctaggtgttggagccagagagagtggatttgactttgtatgccaccacttactagctgcatgatcttggttaaattacaaagattctgtgtcttagtttgattttccattagaggttacagtagcatctacacagagcgaatgggaagactaaatgaatcaatatatgtaaaatacgttgtacattgcctagcacataatatgtagtaaatatattatgtaattattgtaatcataatcattattattttttccaggtaaacatagttatttcagtgattttctcagccattgaagattaagctatgccaaatttaggatccccccttcccaccctggaatttatactaaacttctggaccctaaccgataatatctaccccaggggctctgtttcaggtctgtgctgcctctttctcctcatctctgtcacyctcgctgtctctctcatcaaacctttgctttctaggaccacatcctgacttttgtgggccttagatacatttaccttaacggactcctttctccataaaaaggtattaaaattatattttatagctgcattattagagagatgactgtattcatactatatattaaaatactttctttgacctacaagtttattattttattttttaaaaagcaattaaaatattttcatggattcctaaaggtattgtagaccccaggcaccatgcctactctgtctaatgaataagtcagccctactacacctcactcttttctgctaccgcaacagggctgcagaaacatcaggtggctgtctgcagtccttctatgctcagaaaagtctggctgcccctcctgttttacagctgcctaaatataatgatgatgatggaagggacttttcttcatgaaacctactgtgtactagaaccatatcctctctattctcaaatttccaaaccacaagagattctattgtgttgtgttattttgtacgcatgtatatgcacacacatgagcacgtacacatacacatgcccctcttgggaaatggcttttcaaaattgcctctctctaagcccctgctttccttcccagctctgaggagagagagttgtatatgaaactcaatctgtatcttatctccttttaaatatattctttctaacacttgaactatgtgcttaaatttggaaaccaaaactttggaggttctttattttctgattccatatgtctgggaaaggaaagtacaagtgaatgaatggggttggagggataaaagtgggaagaaactcgttgattattttcctcatttcgtcctaccatgcaagtatttaatactatataagagtaagtttaaatgtttgtacagagtggaataggagaagcctgtgcagcacacattttgcatatcccaaataccactgagttccttttgaagacttcggaatgcctaaaacatgcaaaaacatgacaattaattttagtgggtttcattatgtttccatgataaatttctcagggtaaaaaaaaaataaaaacacaacaaaaaaaacatactccttaggtaccttttggtgaatagattgcttttgactctcagtgatgcaggaagtcactggttaaggattcttaaataatgaagcttgatatgttgcctggtgatttataatgatggctgataaactgatgatttaattgtgcttcctctagtaataatcttaagtgctcaagtgaagttccagtgattggctttcttctgaactcagtctccctggagtctttaggcatctcttttacacaacatccgataactgacttttaactgtttctattttaaataatacaaatcaattaaaacacacagctgtttaacaaaacttctcagtgttggtataggtctcagtgggtatttcctgatggctgataatgacatcaatttagtgcacctggtagtatctgtgtgaactggaagtggtttaattcttaaatgacgagaaaattaagaaggctttatggattgctgctgctgctgcttcagaatcactgccagcttcctttgcaggcttccttcatggtggagctttatttaaatgggactacagatatcatgtgattgttttctctgtaattcactgctaatttattgaatctgagtttctaagtattagctgtgggtattaataagtcatttagggggcaggtttatggcagcacaataaatgtatctaccttgcaggctttttgtagaaacgttcctatgttttagcagtattcagtgattctgccacactttattgtctcaggagtgtgagatatactctgtttgttatatccttactttggtatcttcgagtaataatgacagttctgtttgtctctgtctctactagcaattatttttagattatcagtctgtacatgcattgtgacttttaatgtttattaaatgttgatgctatgggtaccatacatggtcagggtactttccatattcattttttttttttttttttcagacagagtcttgctctgtcacccaggctggagtgcagtgacatgatctcggctcactgcaaccctcgcctcccaggtcaagtgattcttrtgcctcagcttcccaagtagctgcgattatagtcatgcgccaccatgcgtgtatttttagtagagaaaaggtttctccccattagcttggctggtcttgaattcttgaccttgagtgatccgccagccttggcctcccaaagtgctgggattacaggcgtgagccaccgcgcccagccaatattcgtttttttatccattcggaaatgtttactgtcattcatactccattgtgcttttcctgtttggggaaacaaaagcacattttaatgaattctgtttgttccttagacttcccctacattaagaaatatatgaagaatggccaggcatggtggctcataactgcaatcacagctactcaggaggccgaggtgggaggattgcttgagcctaggagtttgaggctagcctaggtaacataacaagaccccatctcttaaaaaaaaatggttatttgggtgtaactgatttttaccagaagtctccagaaatctcacctttaaaaaaaaggcatatgggccaggcatggtggcttacacctgtaattgtaatcccagcactttaggaggccaaggcaggtagatcacttgaggtcaggagttcgagaccagcctggctaacatggggaaaccctgtctctactaaaaatacaaaaattagccaggtgtggtggtgggcacctgtaatctcagctacttgggagggtgaggcaggagaatcacttgaactgtcgggaagcagaggttgcagtgagcagagatcatgccactgcactccagcttggcagcctgggcaacagagtgagactgtctacaaaaaaaaaaaaaaaagcatatgaaacttctttctcactatctttcactaagtaatttattttctttcttttttttgaaactgtgtttcgctcttgttgcccaggctggagtgcagtggcgcgatctctgacctctgctcactgcaatctctgcttcccgggggttcaagtgattctcctgcctcagcctcccaagtagctgagattgcaggcgcccgccaccacgcctggctaatttttgtatttttagtagagacggggtttcaccatgttgatcaggctggtctcgaactcctgacttcaggtgatccacccacctcggcctcccaaagtgctgggattacaggcatgagccaccacacctggccaatgacttatttttcttaaaacttttttggctttacaccttggagtgtttgtggaaagtcctaaatgcatattgaatgctatttaggcattggtataacagtgctttctcatccagcttttactttctaaaattttctgaccactaaccgctcattaagtgtttaatctaaataaaatgggagttgatttattattggattcctattgtattgatttctaagatgttttatcccattttaatgggagcttaagatatatagctaaacaggatatatttcttataaataaccaggatgctggatttgggtcttattacttctttaagttgaagtttatttcactacataataaaaacaagaggctggttaatgttctttgttatgtgtacatctggttgagcagaatattgcttagctttttaccatcaaagttacacttttgactcagcacatgctttgaatgtatacaaaggccttcttttaaagaatctcccagcatttcattgatccctggaattactatttcttgaaaaggaacagcttatcaatacaaaaataaaataccatttaaaatattgaataattaattttaatattattcatcttagcacgtttcattttgataattacctaccatcaattattattttttaataaacatcttagtccccaaacttcaagtctgaggaatatttatattcttatttccagtttttgagaaagaggttaatggcgggtacacaataaagcaacagcttggagcaggtggagaagcctgggggctgggggtgaggaccagaggcaggcagaggacctggaggggaaatggaacacaggctctgctgctacacttacccgtgtatgttttgagtccttagtaaggagtatatgctacctcagaaagatgctatttgttttatcttttttttttgtacaatagttgctgtatacacataattccaccatgcagttattgcacattattttcttcccactttctactcccttcaacttctcttctcacttgtcattttctctggttctctcccatgtcagctgcaaaattctccatattacatttgcagcctgtattttttagttaaaaagttggtcaataaatagagataataccaaagtatataaagtagttgtgccagttacatttttttgtaagctgatgttatttttttcagtatattaatgcagtgttacttcccttagtccaatctgaattccaaaactatttcaagtggtttgtatacatacattctcatatgctaataatacatacatatactataaccatcaaagcaagtgaataataactaaatggtggatgggaaaaggcagttttaatagaaaacataaactaaggaaagattttgagctttctaaaataacaaataacaagggagagccaattaaatacattgctttcattctgttacagaaggaaacagacaagattatcaggagagacagactttttcttgtattaaattctagatcgatcatttcacaactatggaaaaatagtcttctttatagataccacttaaaccaattccaagagatggggaggggtgatgctcagttgtagttgtgtgagagtgttacactaatgtactctgtgtgtgtaggtttacactgttaaagtctttactggcagcttactgttcaaattcagcctacagatgctattttaagtgttttgaaatgttttttaactttgtttttgttttttgttttttttggagatagggtctcactctgttgtggagactggagtgcagtggcacaatctcggctgactgtaacctccgccttctgggctcaagcgattctcctgcctcagcctctcaggtagctgggattacaggcatgcaccactacaacccagctaatttttgtgtttttagtagagatggggtttcaccatgttggccaggctggtcttgaactcctgacctcaaatgttccatctgccttggcctcccaaagtgctgggattacaggcatgagccactgcacctggccgtttttaatttgaataactttagactggatacttgctccatagttaatcatgggcacctcctctccctatttcctcctactgtctatttcacttatttactttgcctgcctgtcttcaaaaagcatttgagtttgcctattcttgcaagatgcaaagaaagagcctagagattctgtatggatctgagcatctcagtacatattttgcgctgtcttcaaataaaagtggtatgatctgggcttaaaattctttataatcattttttctgattgaaaaaataatatatactgaaaattttaaataaaatacaaaatatcataaagaagaattattcataatcccaaatgttaaaagttaccactgttaacctttcagtgcatagctttccagaagtttatatatagctttatctataatgtatattcatatatattatatataaaaatacacatgcaaatgaatcatactatgcacccttttattttgaaatttacatcacagacatttttgcatcccaatatttaaatacatcttcattttccctttaatagttgtgtagaattccgaccaggcatggtggcttatgcctgtaatcctagcactttgggaggccgaggtgggcggatcacgaggtcaagagatcgagaccatcctggcaaacatggtgaaaccctgtctctactaaaaatacaaaaattagctgggtgtggtggcgggcgcctgtagtgccagctacttaggaggctgaggcaggagaatggtgtgaacccaggaggaggcagagcttgcagtgagccgagatcacaccactgcactccagcctgggcaacagagtgagactccatctcaaaaaaaaaaaaaaaaaaaaaaaaaaaaaaatggggagaattccattgtaaggtaaggtcgtaattgttttaaccaattttatgttgtgaacactgagttttttaaaaatgtgcattataaacaaatttctaagtgaacatccttgtatatataattgatgcaattgtcaaatattatttggaataaattcttagaagtggaattggtgagtcaatgaatattcacattttaaaggttttgttagatattcccatatcaatctcagaaaagatgtactaattctaagatgccagcagtgtcttagagtactcatttctcaaagtgctcactgatactgatcataatcattcttcttaatgtgttacagtctgatgtcaaccagtcttttgattggagtcacgtatcaatcaacttaacactgaagttactgataaatagctgaaatgtaggtttttcttgcaattgattggcacatacattttagacactggagtagtggacctactgtcagaattaaagggtctgatttatattcttgccaaagctgaacattgtttctgctgtccagagttggtctgtgggagtacctgccagcagggctgggcttttctttgtaaaattcattatatttgcataaatggttgagcagaactccatggaagcccttaaggtctgctcttttaagcacggaaatactacttcacacatattctttcacttagtctttgaacaccgttatgaggttgatactattctccacactttagagaaggggaaactgagacacaaaaagattaagtaacatgttggaggtcagacatctaagtaagagaactggaattagaactcagatgccatactagggagctcacgtctttaaccattatgttttaccttctcccacaataacaatcttattctcaaaacggtattgtattattattttaaagcagaactgatgaagttttaggtcrtgaaccccttttgagaatatcaggaaagctctggactctttccccagacacacaaactattgcagccctaatcaggagtcccctaggactcgtcaggacatccaaatccttggaacttgtaatagctgtagtggattaaaactcaacttccaatctgcccttcttctctcatgcccttcctgtacagcagacactggaaagctaatacacagttctcacacgtctcaaataggggcctgaatttggttcaggaatatcatagtagatgcatttgtgcaggatttggaaggcagaagcatgtggaaactgctcttgtcagaagcatttctggcatggaggttgtctacgtgaccttcacagaggcttcactgtccagaggacggggcatccattttgctggtgggagttgtagcaggtgtgctgtggctctggaggtggccacatacggtcaggtttttgttcactggagtggggatgtgattctagaatgacagattcctgacctgagaagaggcggtaggttggatggtgttcagttctgcaggattgcttcaggaatttttcctggaaagtcatctagaatttgtttattcagtcctctctccctattcaactagccagagagcttcaagtagagaatagattctggtttttgcaactgaacattgactgataccatattatatagcttgacccaaagagagtttcttcaacaggttaggggttgggctctggagtcagaaacacttgggttcttactcaggttcttctacttattagcagtgtgaccgaggacagttattaggcgtttcaccttcctcatctgcaaaataggaaattatttctacataaggaatattatgaggatgattccagtgggttgttatgagaattatgtgagttagtgcatgttatttgcttagcattgtggggcacatagttgatactatgaatatttattatcattaatccataaatatcatggaaaggaaaagcagtggacacaatttctattctatataaaataaagcactgctggtcaatagaattgttgagcttcaggtttcctacagctgtgcattcacaggccaaggcttacagcttattgaggagaaagctgacatagtatacttagtacatttacttacctacataatgaattgtgtcattttcattcaaaagaagacttaaaaaactgaattctctggtagtaaaatttctttctcaggagagaccttcagctttagatgattagttggatatgctgtttactatgaggtggggttggcagatcacaataggtatgtcccaaggctacaatggcagcagaatagcccatctgggcctcagtgagaatctgcctccatagtgcttctcccccaaccgtgccattagcagttgcattctacaatctaaagttgttattgggcctgtacctaaacctacagcttcccattgaaatacagatgtatcttagtatgtcctacagttcatctagaattggatagtgtcagtattgtrctcaattttttaaaccacttgttggtgaaaggagttaaattgaatacatgtctaagtagcttcctctcatcaataggctcattttctgacagattttctctcctatctccatccctagccctattcaaatcatctttaataactgagattgcagtgatctgtccttcacagcctcacacggcagtttgggtttttcaaatttaaacttgttcgtatacagctagggtaaaacctctactggaggatagtcagaacaaggcaaagccttagactgtagaaggtcgcatatggtaatccatgtagaggtttttacagctttccctcccctacctctacttaaaggtcttcatgcgatcaaattaattgtaagcagctgttaaaggattgcaagcaactgttaaaggagaaaataagtttaagggtgagttctataaaataatcacttttgattcgccaaagtctatctcattggtagaaataaacagcaaaatcaaattattttttacataaaaaaattaatttcaatttcttcacaagcatgtttgacatcagttcctttatcggatgataaagaatagaaaggctaaatgatcaacagtgatagtttcttggatatgcaaatgacagttctccttggactttgctttaggagaattaagtcgtaactttacacaagtttggtgaaatgttttccctatttatcaaggctgtccccacagctgtggaccatgggggaacaaattgtctcacaataggtctttcttctgttgatgaagctttaataaaatcatcatttcttgtactcctgtctcaagaaattattgtgtcaactaacttgcgtttcatactgggttcaggaaagccccatatgtgagtggagacacattggaactattatttgtgtgtgttagggtgtgtgtgtggggaaagggacacatttggaagaagccaagtaaaataggtgggtctttggagccctctaccttacttcaatcagagtacctccattttcttctgttttatggtatcttaagaggtcttatttgcagaaagtgttctgctgctttaaaatgtttgtaaatggctaagctagagggcacatcgcctagatgttatttgaaagattgtcaagttaaaggcaggcagctgacactgacttgggtttggacaaagggaattttagtattamgatatgaacttaaatattccggattcaacaggtctatattttaagagagttatcgggaatatgtaagtccattttgtttcttaaaagttgctcagaaaaaaaaagtcttttgatcttaactgagatcagtgtggccaggcctaccttttcatctgctaaaattattttgttgagtgattgaataaaaacagtgcttagatcccacagccttggatattggatagtatggatttcattctttcacaaggaggcagtttctaacctctaaaagtagggcccaaaaagaaggtgatcagggcttttgaatttagttctttttcctggcattttataggagacaggcttttggccctgtaggtatgctctggaactcccttggaatcagaaaatgtagccagttaacttggaaactaaggagcttaagtttccatcgctgccaatagtgactcccttgcttctgggttattaagctaacctagctaacttgtacctttgataaagatggccaaactgcacatgtaccaaagtggctcagggaagtcacccaggtcaccccatcttccttgcttattcacagtctgctttcactcttgtctcattgttgcctggcttcaaacacttcaagcactttgctttgtaacctagtgttgaccctgctggtcccatgaacttggtatttgagagtagacttcttgatgcacaagcctgagctctctcttgccaacatttgctttgatattggttccctatgttacttgaaaaaaattcctcctgtctttttctggcttgcaaacaatactctatccccaracttggcaggacctctctaatcataccaaactctttttagccagaattggacagagactaaagaaatctgaagtatagcataaccaaccagtcactgagatgggaggttttctaaaccagtcaaaagacactggtgactgtctgggtgatggtttgcaaatcttaagggagcaaagtttaggtcattgagggtcagcccagaggagatcttggaggggtttgtatgggaaggcaaagactatgtttatcacgagtttacgtgtgctcccattccttcctcctctcagttgytggcaaccactaatttaacttttttctctrtagagttgcttattctggagattttatatcaatgaaatcaaacaatatgtggccttttgcttatagcttctttcatttggcatgttttcaaggttcacccatgttgtaacacatataagtactttattccttttgacagctgagtaacattccattataatagatatatgacattttgtttatccatttatcagttgatgaacattttggttgtttctactttgtgactgttatgaacaatgctactatgaagatttgtgtacaagtttttatatgaatatgttttcagttttcttgtgtatataacctagcagtagaatttctgggtcatgtagtaacactatgatttaatttcaagtaactaccaaactaagttttacagaggcatcaccattttatattcccaccaggaatgtatgagggttacagtttctccccatctttgccaattctggtccacttggcattatctttcttttaaattacagctattccactgggtgtgaagtatccaattgtggttttgatttgcacttagctaatgtctaatgatgttgagtattttttcatgtgcttatcagccatttgtatttcttctttggagaaatgtatactcaaatcctttgtgcactttaaaattagttttttttcattgtcgagtgatgagagttttaaagtatattttgaatactagacccttattgactatatgatttgcaaattttctcccattccattggttgtcttttccctctcttgatagcgttctttggctcacaaaagttttttatgtaggtaaagtccaatttatctatttttttattagatttatttcgccttaggtattatatctacaaaactgttacgtatcctaagggcacaaagattaaaccctatgtggtcttctaagagttttatggttttagcttttacatttaggtctttcatctattttaacttatttttgtatgtagcaatgaggtaggggtgcaaattcattcttttgcatgtactaataaatatccagtagtctctgaaccattatttgtaaagactattcttttcccacttaattatcttggcacccttgtcaaaaatcaatttaccatagatgtatgcatttatttctggacgccaaattctattccactgtttcatatgcctatcctttgtcagcgtcacactgtcttgtttactgtggctttataacagtcattttttgaaattgggaaacrtaagcccaccaactttgttcttctttttgaagattgttttcgctagctttggttctatgcatttccatatgaatcttagcatcagtttctcaatttctrcgaaaatgtcagttggaattttgatatggattgcactggagctatacttcaatttgaggagaattgccatcttaacaagattctatcttccaattcatcaatacggaatgtctttccatttacttagctcctctcaatttctttcaacactgttgtatagattttcaggtgacaagtcttgaattttttcattaaatttattcctacatattttgttctttttgatgctgttgtgaatgaaattgttttcttaatttcattttcatattgttctctgctagtgtagaaatacaactgattttttgtgtgtatttttttgtatcctgtaaccttgctgaactcttttattaggtctaatagttttttgtggatttattaagattttctatataaaagatcatgtcattatggcatgtcttgatttttgatgacagagagaatacaggtaatagcatgttgtctgaaaaagaaattgttcaagaactaaaattctctaaccctaaccagcttatctatctatctatctatctgtctathtacctacctacctacctacctacctacctacctacctgcctatctacctatctgtctgtctgtctgtctttcttgggaatatgacctgtgcctgtgtccatcctttggtatttggatgtggcatgaatcctatttacattacttcccattgtcctctcagtcgttttcttcccacccaccttctccaatggttaattgcatccttctctgattataccttacctctctgtcccattattttctttctttctttctttctatctatctatctatctatctatctatctatctatctatctatctatctatctatctatctctatagataaaatgatttgttcaaccaaactaagttctttttactgtatcacattcagcagttcaggtgacttacctcagctgagtttcagtaccctgagaactctttttgcaaaggactggagtttagtaagaagtccatttcttgatctatgatgttttcctcaattcctggctaatgcctggtattgtgtgccctgttcatggaaaaatagaactcctcacatactttagagtgaaatatgagggaaattgagaagcataggaggattgggcctggggaaggttgactaaggggatttagctggtaatgcagagtattttccttgagattttcatttaattcacttgcttaattgtaggtttttgtggaaatttactttttagacattcttactaaataatattagactacataaagagggagtggtataaaaaatttacctttgctcaagtgaggtagaaggtgagcaaaagaaaccagatttgcatttaataaacaaaatagaatgctaagtcgcccaggctggagtacggtgacaggatcgtggctcactgaagcctccacttcctgggttcaactaattcttgtgcctccaccacccaacatggtaggtagttgggattacaggtgtgcaccaccatgcctggctaatttttgtatttttaatagagagatggggttttgctagtcaggctggtcttgaactcctgggctcaagtgatctgcctgtcccagcctcccaaagtgctgggattacaggtgtgaggcaccaaggcagccaaggatgtgcactatctacatgttttctgtagttttagccttaactgtaaactcagcccccaaaaacagagattttacaacctgaatctatggtctaagaggttattgctctcattttgccacattctaaggacaggccactgttattattttaacagaagaaattcccgaaagggaacagtacttgggattgggggacttgcctgaaactatttaattgctgttttgcttgacttttcacattgactcttctgaagaccgagcatcctgatttttgtcagtgaagtattacctaatgtttagtatgatcatttaccattagcttcctagaaggagcatgatatacagtaaacatttccaggtacaacattcagctttcacactgatacattatatagctaattttctcctagtttttcctgaaaatgttccagttaaaagcaggcagcttcttctgatcatttatctcagccacagggaatcttcaatgcaaaatgctcatatttatttctttttaaagagaaacctggtgaaaattttgaaattttagtaagagtaatgaaggatttctgctgttattaaaagaaaacaaggtaaggaatcttcaaattaaaacagtatcaccagtattaattgagtaaacattttcctggatacatatttactgatttttggtcgatttttctcaaaacatgaaaactacatttatttcttggtagaatttgtgtgcttgtgagagattgtctcaaattttctttttaataaatttcccaagtcttgacagctaactagacttgcgagtctttagagattgtctcaaattttctttttaataaatttcccaagtcttgacagctaactagacttgcgagtctttaagatgtattgaaaggagcatagactttacagcaagaaagaggcaggattcaaagctggttctccccttgctatgtcttggggtaaattacctaaaaactattttacctgatatcaatataagcatattagctttcttttggcatttgtctggtaaatctttctctaccttttaactattaaacttgctctggtttattcatttccttgcatacagaacattattttaaaaaatttacatacagtaaagtttaccttttttggcagacagttccataagttttagaaaaatgcagagatgtgtaactgaccaaaatcaagatacagagcatttccatccttcctccacccaaattcccttgtgcagccccttgtagccaaccttttctcccaccccaaacccttgttctctgtccctattgttttacgtttttcggaatgtcatatatggatttctaggcttttgagtctggcttctttcacttagcacatatatttgaggttcatttatgtttcagtatatatcaatagtttataactttttattgctgagtagtattccattgtatgaatgtacagcatttggtttatccttttaccagttgaaagacctttgggctgattccagtttttggtgattaagaataaaactactaaaaacactcatttgtagggtttttggttgacgtaagttttcatttctcttggataaatacttaggagtaagatttctggtctatatgataatttttttttaatgccagactattttgcaaagcattggaagcattttatactcccactagcaatttctgggaattctagttcctccatgtctttaccggcacctggtattgtcagtttatttatttactttaactataacaatatatgtgtagtagtatcatactatggtttttgttttgcacttatttaatgactaatgatgttgaatatcttttcatatgcttgtttaccattcgtatattttctttgatgaagtatcttttcaaatctttccctaacttcttttttttttttttttttttttttttttgagggacagggtctgactcttttgtccaggctggagtgcagtggcacaatcatagcttactgcagccttgaactcctgggctcaggagtgatcctcccacctcagcctcctgagtggctgggattatggatgtgtgctaccactctcagctatttgcccattttaaacattggattttttttaaattagattcttttatattcttattgttgggttttgacagttctttacgtattccagatataagtcctttggcggatatgttatgtataaatactttctcccagtgtatgacttctttttattcttttaacagtttttcacagagtgagagtttttaatttgtatgaagtccaatttatttaaaaatacattatttatttatttatttatttatttatttatttatttatttattttgagacagagtctctctctgtcacccaggctggagtgcagtggcgtgatctcactgcaacctctgctccccgggctcaagcaattctcctgcctcagcctcccgagtagctgggaccacaggcacctgccaccatacctggctaatttttgcatctttagtagagatggggtttcaccatgttggccaggctggtcttgaactcctgacctcagatgacctgcccacctcagcctcccaaagtgctgggattacagatatgagccaccttgcccggcctaaaaatatattttttaaatctactgcacttttggtattttatctaagaattgtttgcctcgcccaaggtcacaaacattttttcctagacattttattatttttatttttaagcttatgtctaggatttattttgatttaatttttatgtaagctgtgaggtttattttattattttgtatatgaatgtccaattggtgcagctccatttatttaaaatactaagctttcttgattcagttacctttgcacctttgtcaaaatcaattgaccatatttgagtgggtctatttctggactctctgttctgtttcattgatctatttttctgttcttccaccaataccacattgccttgcttattgtagctttatattaaatcttgataaaccctgtctctaaagaatgagtcttccaactttgttctttttcaagaaggaacctttaactttctgtgtaaatttttgaatcagcttctgaatacccacgaaaaatactgctgagattttaactgggcattgtgttggatctgtgggttgatttggaaagaattaacatcttaatgagtcttctaatgtgtgaataaggtataactctccattcttgtatgtcttctgtgctttctttcattagtatgttattgttttaagcatgcagatcctgtatacatttccttaaatttttatgtaaatatttcaatttgggatgctattatgtttaatatctgttaaattttcaaattctagttgtttattgctcgtatatagaaatacaattaatttttgtatattgtccataggttctgagaccttgctaaactcacttagtagttctaggagctttgttatagtttggggaggggttttctatattgacaattgaagacagttttgcttcttcctttctaacctttctccttttttcttgccacattgcactggctaagacttatagaatgatgttgaatagcaatgatatgagggccatgatggttaattttttgtgtcagttggccaggctatggtatctagatagttgttcaaacattattctagctgtttctctgaaggtatttttaaaattagattaatattcagatcagtagattttgagtaaagcatattgatgggtgggtctcatctgatcagctgaaggccttaacagaaaaaaaaactgacctcccctgagcaagaaggaattctgctagcgtcttttggactcttaaaaacaactcttcccccctgcagacttttgacttgccagacatccgcaatcatgttagccagttccttgaaataaatctctgtctctctctttctttacctgtatctatacaggggtgagctaagacttttatctgtacacagaattgagggatccattactccagctatgtgctctccagtatttctcccacactctagggatctcagaggctccttttcctgggcttctcactagaaagacagggcttctcttggagttttagcttccagatctgctgttccatgtagttccgtgtgactagtactactcttgagcaaaacagcaagagaaaagaaagaaaaacaaacaaacaaattaaaaaatggtattctactgcagccttcaggccatactgttcccttttccagttcccctggcctgaaacacgtttctctcaagggtttaagctgccattgcagtgcaggtctatgacagggactactctttgggcaggggtatgagagaagaaagaaagaaagacaaaagaagtaatggggggctgggygtggtggctcatgcctgtaatcccagcgctttggaggccgaggcagatggatcacctgaggtcaggagtttgagaccagcctagccaatgtggcaaaaccccgtctctactaaaaatacaaaaattagccaggcttggtggtgcatgcctgtaatcccagctactcaggaggctgagacaggagaattgcttgaacctgggtggcagaggttgcagtgagccgagatcgcaccactgcactccagtctgggtgacagagcaagactccatctaaaaaaaaaaaaaaagtaatggggaaattttccacctttccaggttgtctggccagaagtggggtttcttccagtgtttggttgtttaccctccctgcacagttccacagtggggcagccattgggtcaaagccaggaaataaaagacgaaaaaccaggtgacttacccccaaagaggttatttgaattttggctagtctttccagtctgctactatcgttaacttttcagagtcatagggtagttgctttttaaattttgtttttttagttttaatcggtgggagagataggctgtggtgggtttactccatgttggctggcactagaagtcttgtgtccttatgtttaagtgctatatatattttttatctcatattgttgtacttaaaaattccactctagtttttgtctgtaagccaggggagtttaatctgtttacctttattatgatgactgatatgtttcaattttttccttttatcttatttgtgtttctgtttgttctgtctttttgatttcctcttatgacattctgctccaatcttaaggaaatgatgtgactcttgtgactgctttttaaatctctaaaatggagataaaaggatctaaccagtgtgttatcttaaaaatgaagtaagataaatatttaacacttttattgcggtcccaggtataatcaatttaatttaataatattcattgagcacctatgaggtactcaataacagaataggtaaaaattgctgcttttatggagcttatattctagtgggggagacaacaataaacaaaagaagtaaattatattgtatgatagaacatgaaaagagctatggaaataaataaaacatggaagaggatagggagaacaccataagggtaaaagtgacaattttaaactggcaattcagttatttttgcatgtgggaagtagtactgctttattttttgtatgttttatttgtgtagtgttttatataacaccttccaaagcactttaacctcatattttgcttttattcttatacattgattcaacaataggggccagacttatactagactctggggtacaatgaagagcaaaagcagacatgagtgatattcccgtgaagtctttagagcatttctgtattacttccatattagatgaagtcaataatgccagtttatttatctttttgataaataatttttgtattttacaatgtaccagacacctatagtaattgtgaggttagcaagatagacatggtctctgttctcttgaatcttacaatttaatgagaaaacaaatttttaaataaacaattttggcatgttctggctatagaatggaaatgattggaagggagcaggactggaagcaaggagagatgagttaagagggagaagtaacccaaacaaactaggatgatggcctacatggtagcagaggcatgtggaaataaagaatgatactagagataaaaagaagctacatttaagaggtggaattgacagtgtttggggaaattggcttatggatgatgcaattcatagatgagggataggatgaattccgttttcaagatcctaagtttaaagagtatgcaagatatctgagtggcatgtctctgaacctcatgagacatgtcaggaatagaaatgtagaattggacgttatcagcaataaatggtaattgaagccatgagaatagataaggtctctaggcagatgtaaaatgaaaggaaaaaatagcctaagagataattttgaagcatatcatcatttaaaagaacagaagactgcctgtgaaaggtactaagagagggtggtcagaagtgtacgaggaaacacaagagattcttgagccctggaggcatgttttttgtttgtttgtttgattgcttgcttgctttttaacactgtgagcctatccagtgtttcagagaagtcaggtaagaaaagactgaaatgtgcccattgggttcagcaacaacaacgtcatttgtgtactgtggtgagtaagcagaatgtggtttgatgcctgagctgggagatgagggagttgacagagaataaatattttttttgatgaattgggagaggaagatagggtgattcttgcagagggacatggaggagaattttatttttcattgtaatttacttgtttgtttttaagatgagaaagactttattattttaaaaactgaaaggaaagacaggaggaagggaagataggaggaagagaactgaaagagcaaagtcctagaaaaggtaggatggtagtgggacaagggatgacttccattttaacagaagctatagacgacaaaatatgagtatggattcagatgtatttttagtttggcaagaaaggacattttatggtttttattttttattttctgtgaaattggacatgtgaaatctgctgtcagagagagattttatggctttagaacaaatggaaaagatttgacttctttccatggggagatggaagagtagactagagaaatatattaggacaaacagaaggcatggaagctacgcttgagataggccaaattatttgatttcttaagcagtgcaactttgatgcatgtacaaaatagagtcagccaaatttgggatttttgcaaggggttaagatggaaagacagtaggcaaggaagttgatactattggtaagaaagtggttggtgtgacaaagaatagaacctaagtttaataaggaagagagaaagagagctatagaaaaaggggactagagatccctatgaagtcaaggaactgaaatcttgagaatagttgactaagagatctgaagacataggatatttggtctgagagttgttttaaagtggggagtgattcttgtattgataagtttctgagtgtggctattggagtgctatgctgacatggaagtcaagaaagagaggctgtagcgtaggatggggcaaccacatggatgtaaagtcatcttggataatagtgaaacttgagatagaaggaaagactgtgaatcaaatgctaaaatcttggagagaggcaaacatagtaagcaacagaaaggaagagggattggaaggtattatagctagatggcatgtatatcaaaggaactgatttttaaaaaacttctcaccgggcgcggtggctcacacctgtaatcccagcaatttgggaggctgaggcgggcggatcacaaggtcaggagatcaagaccatcctgactaacacggtgaaaccccgtctctacttaaaaaaatacaaaaaattagccaggcttggtggcatgtgcctgtggtcccagctactagggaggctgaggcaggagaatcacttgaacctgcgaggcggaggttgcagtgagccgagatcgcaccactgcactccagcctgggcgacagagcgagactccatctcaaaaaaaaaaaaaaaaattcttattgaagtgtaatgtaagaagtatacagatccttaattatcacacaactcaatgattccatctgtgtagcccagtcaagaaacagaacatttgtaaaattatacctactcccaatcactttctctccctttttcatagatgtaacaattgtcttgacttctaaagccctatgttagttttgcctgttttttgaatgttgtatagatgaaatcatattctatacattgtattcttttaattctggttacttaaacccaatttgtgtttgtgagaatcatccatgttgttccatgtagtaggagttcattaatttttattgctataaatatagtatttgccagtattataatacagtatttgattttatgactatatcacaatttgtctttctactattaatggccatgtggttccccctgccccaggttttgactgtgatcattctatgatcatgtcttttgatgcatatatgtatgtatgcatttctattgggtatatatcaagaatagaattgctgggtcataggacatgcatatatatgtttaactttactagttaataccaaacagctttctaaaactgttctatcaatatataaattcccatcagcagtgtaggaatttcagttgctccatgttctgataactgtttgatattgtcagtctttttaaatttagccctactggtggatgcattttggtgtatcattatagtttaaatttcatatccctaatgattaatgaggttcatctactgttttgtgaagttcctgttcatgcctactgccatttttttctatttggttgcctgtcttttttttactgatttataggagtttttcacaaatttgaggtatgagttctttgatggatgtatatatagcaaatagctttttcagcatggtagcctgacttttcatttcctttgtagtgtcttgataascagaagtttttaattttaatgtggtctaatttaagaatcatatcctgtattttttatgctttttgtagttgtttgagatcattgtctaccccaagatcatgaagacagttcatgtccaatgctgtccaatagaactttctgcaaagatggaaatgtatatattgcactgcccaatgcagtggtcactagtcacatgtgactgctgagccctggaaatgtggctaatgtgattgaggagctggatttttcattttaactgtaataaattaaaatagctacatgtgactgttaactgtgttattggacagatttgttttctagatattttttaactaatttattatgttatttagattatatctatgagccactgggaactagttttagtttagtatgagatacaagtcatatttcattttttcccgatatggatatccaattttctcagcactatttatgaaaaagattgtgctttctgcatttctttgtcaccttagttacacataaagtttccacatgttcttggatctgtttttggattctctgttccattcagttgtttccttgtgtcaataccatactatttttattactataagtttataataagtcttgatatccagcaaaaaaagtttcctaactattctttttttttttccttgcctatgctggactcttaatttccatttaaattgtataagcagcttgtgaaatttcacaaaataataccgggactttggtattataataagttggatctagaggtcaattcgaggagagtggtcatttttacaaaattaactcttccaatctatgaatatggtacatcctccattgattagtttttaatgttttcttttaatattgttttatagtattctacttatagaactggcgcgtcttttgttgcattttcttagcttcttgttttgtctagggccaccagtacattgttgggtggaagtggatatgggtattcttatctcatttccttcagagggagaaccttcaatattttaagtgtgaggtttgcattagattttctgctagatattttttatccaattaaakaagttttatcctattcctagttgagtcagtgtgtttgagatgttgatgttttaaaaagatcaaatgctttattggcatcttttgagataatcaaatgatttttctgttatactcctttaattgattttcaaatgttaaatcaacttgtattctggggaaaaaatacaacttcgttgtaatatagtatccctttaatgtattgctggatttcatttgctaacattttgcttgggacattttcattcatattcataagagaaattagcctgcaattttttttcttataatgtccttgtcaattttagagatcaagcatatgttaccttcataaaatgagytgggaagggatcttttttttttcctttcctctgcaggagtttatgttttgctgatgttatttcttctttaaatgtttgggaaaattaatcagtgaagccatctgggtttggagttttcttcttggaaagatttttaataaaaaacttgatttcttccatagatattaatctgacttatttgaaggtcgtcttttttaaaaaaatttttcctggctacttttaatattaacttcatggtttttttctactgttatatattgctgtagactgaatgtttgtcttccaccaaaaatcgtatgttgaaacctatgcatccccaatgtaatggtatttgaaggtgaggcctttaggaggtgattagatcatgagagaagagccttcaaggtgggattagtgtgctcattaaagggatctcagagaactgcctgcctcttctgccatgaggacatggcaaaaagatggccatctatgaaccaggatacgagctcttaacaagcaccatgtgtgttggtaccttgatcttggactttccaggttctagaagtgtaagaaacaaatgtctgttgtttataaaccaccaagtttatggtattgttgttacagcagtctgaatggactaagatatgtgtctgcatattatgtagtcttcatatgtatcctcccgagattcatggtttccttttaatttgtggcttgatgattttcattggtttttgaaaattttgggccattttttctttaaatagattgcttttgccccagtttctctatccccactttttgtgactccagttacaggtatttagaccccttcaccatatctcatatgtctgctatgcctctcccaccccactgacttttgtttcactgtgcttcattctgaatttttttcctgaccagtctttcagttttatctttgttaatctgctctgaaagtctttcattgaattctaaatttgagatgtagtagtttcagatctagaacttttatttagtaaattttaaaaattccacttccttaccaaaattctcaagcttgtcttgagcacattaatagaagtttgaagtccatgtctgttaattcttttatctggattatgtgcattgtttctattgtctgttttttctcttgggttttggtcaagtcttttcatagaaatgtgtatgtaatagcttctttttatttagagccagatgttgtgcatataaaaaatttacagagatactttaaggctctgtgaaatgttatttttctccagagaggatttacttctgcttcagggaggcagctagcttaggggcactagcaatttctgatcacattaatccagccaaggattgagatgtttccaagttgggtttcagtccctatgagagctgatctgtttccaatacccttacttttgaagtgtagtctttccaaatcccatctaaaatcctatgtgtttaccagggctcctcttccttggtataccctgaactttcaggatcagtaatcttccaaataccaggctcatttctctgggcttcccttttctcctgattctttgacccacaattcctcagtgtttttgtaacactctgatgccttcaaacagatttttttttccccagctttcctagttcctagtgggaaccatgttggacatggagcttatttaagctggggcttttaaggaggttgatggcgagggcagggaactttggagtctgcagtgggaaatgataatacctgccccacctcaaggcactgagtttctactaaagagggctgcaaggaaaatagagtccttaggggctgtcaggttttactcaggacaagaatgtatgatatatgctgagaagagactgaggaagttggagagtttggaggcagggagagttaatatagtttctatctttcttcctttctttctttaggatggggttggttgaactagatgacatctaagtttccatgtaatttgaaattctaggattctattaaatgagctgggcttccatttaggttaatttagaagtttaattagaacttaaaattcctcctgtagagataaggaggcttatcatcataaagaaaacttctgggttttaatttcagcacgatagctcccagttgtaaaacactgaatcgacttctttccatagtgcatgatgggattctaaaatcttatgtccaaagggaaccagttgcaatattatctgctaggaatttactactctgtgaattattatgtagtacacatttatgaaaactgcctcatttcttcctatcttatagtgtattatgattttattatttcttatatataatctacaggttctggattattctctgctcatgatgtaagtgcctccactcatctagccctacacgcctgggtacttatatgtattcctgtctgtcctttctctcctctgaccctgtttcccagttctcccttccctgctatactttccactatgctctctggaattccttttccatggtggaaaggttccctacattctctttcattgaatatttcttttagctattgtcgtcaactgaactttggctctctcaagaggattctgcttcccctgcaccttctctttcctgcagatctcaagctgccattccaggctcaggactccttcatccctgtggaaaatctccagctcctttggggcctgggcttaacccactctcctgattgctttcaggtactccctgcttctcacactcccatatttcaactctagcgtcccccaacttcattgggttcttcatccattaatgcctctgcttctcactgttaccacctccacatctcaactttctcacatctctctatgcccagtgtagattctatggcccaggccaataatcattctctttcaaactctttaatatccttgtatctctcccatgttgtacccatatccaagcaattgaacatctctggagaaaaatcacacaacccccttgtcaaggctcacttcaaatggatgaccatgaatctcaacggacatgcaaaactgccaagtcattctattcccctcctctagtaattcactttctgtctccccaaaggcaatatttcacacctttccttcttgtggcctaagctcctctttgcctacttatacctcatagtgagaatagatataatcagaagagagccaccttatcttctcagcattattctagagcctcctgacttctgtacccacactctctgcctttgctctgttactatgggaaaagagaaactgcccctttccactgccagctccctcccttgtgctctgaatcctaaactctttcttctcaaggatgactcctgaagcaacaccctttctctcttgcatcattatgtctccttgccataggattcttcccattggtatacaagcacctttattatcaactatcttgagaaactttcccttcaaagattttgaaccaggcagttcacagacaagtacaaacaagtatcttaaatatttgaaaagatactcaagttcactaataaaaagagtaatacaaattaatactacatggaagtgccattttaaacctaccatattggcaaagatataaaagtttgaaagcacatagtattgggaagggtatgggcaaaagggccctttcatactgtgccattgagagtaaacagatacaactttaatgaaggtcaatttggtaaaatctagcaaaattattaaattgcatatgccctttgactgggcagtcccacttctcaagttcatcctatattggacgtgtaaatgttagagtaccccagggctttgtctttgaccctgttctcttctgtgtctacattctctccctaggtggttctatccagttccatgtttttaaatatctttaatataccagtgactctaaagttagccttcagctgagaaactcctctgcactccaggctagtttatctaaaccascaatacgataattttatggtatctcaaactttcaggtagtccaaataggattgatttttttcctctccaaatcgttaccaagcctttttcatttcaacaaatgataccactgtcttcccagcttctcaggccaaaataaccagtgatgcctttgatttcatttagtcctgaactttttgcgtctatttatttcctgactttattccattttgaacttagtttaactcaaagatactgactttgttcttcatacacgaatttctctcttaaatttcccctttggacctgaagccagttaacatattccagactaagagttggttcctcttgaccgtggtcttggctagttacctctctcttgccttgtctgtttccagatatctctcctagtcttacctggtgagcttccttcctctggccaccaccttgctttagctatttgggcaaaatgcagagaatgctaagcaaactcttgagtgactgatatggaagacttagaatgccagtgtattaatttagaatgatgaactgtaactgccaagcaaattggaaagcttgtgtcagctgataagaattcaggaagattactggaaaccaccttataatgagaatattacctggtgaacctagaagcaaagcaaaagagttaaatctatcttaaaggtaacatccagccttgtgtggccaactccatgcatattcctaccagttcgaccagtcacgctgtcatcttgtctactagaatgtagggtgtctaagagcggaattcatgtcttttatgccttcaataagtccagtgtttagcaggtggataagtactccagaattctctgccctggatgatgctatgggagcactgcctaagtctgccctctgactcctatctttctctgatctctgctattatctctcttttgttgatacattctttcagaattattcaaagcagagttgctctctctcgactttgggccttagatattgtatactaaggtgacttctgagcaaatgtgatcctgactactttgagttgatttcaccagtttcatatgaggctctgcctcaccgtcatgtccatgtactacctaaactactcattggcctaactgtgctgccagaaactagaagggtaagatgtctgctcatacctgctcataccatgtggacttccacatggtaaactttgaacatttcataatttgtaaatacttagaatacatcataatcacaaatatttaaatatgattgacttaagacttttcaaaaaatgtaactgatcttcagttacatttacaaatgcaaatttgccactaaagaatgtgccacaaaatctgtgaatagagttaacttttctcataggtgaaactacaaccaaaaaaatacgccttgtaattcgctaaatgtatgatattttgtaagcttgataggaataatttagtagcagcaaacgaagactactaatttacaaaagatttgcagttgcattgttgttgcaacaattataattggtttctaattataattactattatgattaggctaataggatgaagatttttttaatatatgaaaatttttattcaaatctcattcttacgtttatgtgtaaaagaatttgagaatgaaaatagcactacctgtatatgattgggatcttgttgtgcctgagaagaggactttaggccccttgcagcagggaataatttttcagactagactatagctcaccagaggccttctgcaagagagtggatctctcaaggtggagggactctcttacgaggtggcagctaaccctcattgagactcccatggggaaacaagtgcaaactggcagccaggcaagagcatacaggataatcttctcctgggcccagaggacagggatcatgtgtgtttcattctccactgtattaccagtacccagccaagaggaactccagtgcaccttgcacataagaggctcctgttaaatatttactaaatagcatggatgaagacatgtatttcagagcttttatttttatttatttctattaacaaattacctaaacttaaatgatttaatacacttataatcttacagtttcagtgggccaggaaatcaggcatggcttagatgagtcctctggttctgggtctctcactgggctgacgtcatctcaaggcttgatggggaaggttggcaggactcagttcctcacaggctcttggactgagaggccaccctcagttatatgccatgtgggcttctccatagaacgtcttacaatatggtagcttactctatcagagccaggatatgagagggcaagagagaatgccagcaaaagagagtgttagtaaggtagacataacaaccttttgtaacctagtaatggaagtggcttcccatcactttagccatattctatttgttagaagcaagacagtagatccagcccatacgcaaggggacacaagggaattattgaaccgttttagaaagctgcctaccagaccttgagttttttcaatggtgatattctcagaaagaaaaaattaatttttatatatctttaaaaaacacttgaattaaatgtcatgtttgttaagaaacatcagctcattttgtcctgaaacaaaggctaacactgataaatacagcacctgcattgaccatattttaaaaatatttccaggccagacacggtggctcacacctgtaatcccagcactttgggaggttgaggcaggtggatcacctgaggtcgggagttcgagaccagcctggccaacatggtgaaaccccattctctactaaaaatacaaaaaattagctgggcatggtggcaggcgcctataatcccagctactcgggaggctgaggcagaatagcttgaacctgggaggtgaaggttgcagtgagctgagatcgccccactgcactccagcctgggcaacaagagcgaaactccatctcaaaaaaaaaaaaaaatccaatttgttacattgtaataaataatgaccttctgagaattcaaagacccaaatacaagggagtgtattgcagcaggcttaatcaatgtttagtgatgatagaatgtataatcgaagagccaaggatagaaatcaaattgcctttctgcagaaagatcctcaacaattgaaaaactgctctataaaactaaagaacagcttgatgatttagaaaatagaaactgcagaaatattctgtagatcctagatatgtccccactgcttattaccttgtctgcttcagagtaaaaaggaagggcaacaaaaagagattcaacttagtgaatttcgctctggcctggagccaccctggcttaagactattagctaagtatatcctggtctaaaaataaatcttctaccctcttattttcaagtaactttcctttttcatacccagaccagagaagagacatatattattaacttacatccagactttgatagattctttaatgaatggattttgatgttctgatatggtaaaattatgcatcacatccacaataatagtattgttttaaaataccagaatcaagtaagccacctgagcaacttgtgagacttcaagcatgctaattaggtatgaatagaatgggagatcaatgacagactggcaacacttcagcaaaagccacttctagatacttgccttatgaccaggaaatgtcttacactagcaatagattattgtaatatgccaaaccaataaaactcatgctattaggagtttcattagatttatttgagtccacagctataagaatgaagatggtagcaacaggccaggcgcagtggctcatgcctgtaatcccagcactttgggaggccgaggtgggtggatcatgaggtcaggagttcaagaccagcctggacaatatggtgaaaccccatctctactaaaaatacaaaaatcagctgggtgtagtggtgcgtgcctgtagtcccagctacttaggaggctgaggcaggagaatcacttgaacccgggaggtggaggttgcagtgagccgagattgcgctactgcactccagcctgggtgacagagtgagactcagtctcaaaaaaaaaaaatgacgatggtagcaacaactatcttctctttttacttgaaacctgttttatagaagcagaatacttaaccactctgtaagaatgcttaggcctatagtaaaattgggaagatcatgagttttgcaatcaaacagacatcagtctcagcccagcctcttactagctgtttggccttgggtaagttacctaactcccttggaaattcagtgtcctcctatataaaatgggagaaataatggtggtgatggtgatgatgaccacaacgaacattgttaagcatttgttatttactaaacactgtgctatttatgtgcattagttcatttactacttttattacatagtaatattacatttactatgtgcttatatattatattaccttataattcttataaggtataaatgcaatcttatcccttatatatcctgtcatatatatgtgtatgtgtcagaagctattttttgccacatgaatcttttgtgacaaattgtagaatatatatgcatatatatacacacacacacccatatacatacacatatagggcataatattgattggcagcagtttacacaggcaacatgctttacatgcattgtctcatttaattctcaaaacagctggccatgtgtggtggctcacacctgtacccagcactttgggaggctgaggcaggaagactgcttgagcccaggaatttgaggccagcctgggcaatataacaagaccccctctctaccaaaaaaaaaaaaaaaaattaactgggtgtggtagtgtgcacctgtggttctagctactcgggaggctgaggtaggaggctcgcttgaccccaggaggtcaaggctgtggtgagctgagattgtaccattgcactctagcctgggcaacagatccagaccttgtctctaaattaaaacaaaacaaaaccaaacaaaaaaacagctgcataaggaaggttataacagaacactgttctctctttacacacacacacacacacacacacacacacacacacacacacacatcacacgtacaggaattattttaacctatcagttacatggtggtttcacaggtttcaacttcatcaacccagaaccacaatcacagattttggctagactctgactctcatctactagtgataacaacaagttccctgtggaagtttatagccccacagattatcagggaccatttttgctttctgtaccatgtggttctttcctgctacagattcaaaatgcttttttgtccattcctaatacttttcatttatactgatttctttgatgagaataaccttaaattcatatgtcttactttcatcctagggagttttttttgttggtacagaatgatcattgctattatagtttgcttttattaaacaggttcagttgttttggtacagcagccaggcgggagtggtggagatagacccatcatcactgggatatgtcattttccttcatctccatttactagccagatctggggctatttttacatgaatccagagtctctgtgttttttttctcatatgtagttaacaatctgaatgacacattctttatagtaccacaataattccgtccattacatcacttaatttatgggagtgctaacaccaaaatcgataaacattatttctgaaatgtcaggagtgttaatggtgtgattaaaaaagaaaaagattctaaaatctctctgcacagagctctttgatatactgttgttgaggcgcacctaacccaagctgtgatatggaagacttaaatcattaagactctgtcaagtttaaaaatgtgtgttggaagctatttttagctgcacgaatcttttttgccatattgtggaattctgttagtggagagagggagagactacatgtctcagagaagattgtctcaggttgttttgagacatatcaacagttgctaaggaaccgtcgctaatgcttctgggaaattctgtaatatcttacttaaaaattgggagaaatttttacagagcaaagcttcttagacaaggaaagcatatgaagagtgatattagagaacagtttcaaactggaaaaagtattttaaagttttctagaagattgagtttaaatggggtttcatagtaccatgtacactgtaatcgcctcttgcagaatcctgaaagctttcatttacatctgattttagaacaagtagtattttaaaatctggtcacatttgagtttattttccatgattgatgctttaaaatggagattagtacttcttttcacacagagaattaattagcatgctaggatggcggttccactgattcccttctcttctggtgaaaatctatgttaataggaaacatttaataggcactgactgtttactaggtcctgcagacacatagtgttggcatgtaatggtattatattataacccaaatagtcctctcatattagccttgtctttgtagctagtgagactttcacatgccacaagactgtgctgaggcttatatgttgcttaggagtcagactaggagcctaaaaccaatacagctgcaccatyctggcaaggactgttgggccaatcaccagcaacaccttcacatccattagctgctgcccacctggccacagagagaagactcacctcacattcattactaacattacttttagccaagccaattttaactatactgtttgctctacatgctttaattacttatggacttattagaatctgagaagggagtagaagtgatttattttttcctctttctctcattcacaaatattaaaggagcacctattatgagcagttgttatggttagtgctggggatagaacacagctaacacacagtccttgccctcaaagaacttatattctggtggggagatggctgtgcaaacaagcaattgcaaaacagtaggagagccactgtaaaggtatctaaggagttaggaaggaacaagtgcagtttttctgcctgggagaataarcaaaggcctcatagatggagtaatccaccaactgaatcagcatttgttggtcatgcacatggggaagggaataagagggagtgagcagtgcgtgcagggtcacaaagacaggaccagcaaacaaattctaatcagctaatgctggtggctgggagcatggcagaaggtcagggacagagcaggacaggtgggcagtggaaggctttttttttttgagatggagtctcgctctgtcacccaggctggagtgcagtggcgcagtttcggctcactgccagctctgcctcccgggttcacgccattctcctgcctcagcctcccaagtagctgggactacaggcacccgccaccacgcctggccaattttttgtatttttagtagagatggggtttcactgtgttagccaggatggtctcgatctcctgacctcgtgatctgcctgcctcggcctcccaaagtgctgggattacaggtgtgagctaccgcgcctggctggattttttttaaatcacaaatgcagtgtgttttaacttctctccctcatgtactccatctctctctctctctcttttttttttttaagatggagtcttgctttgtcgcctaggctggagtgcagtagcgtgatcttggctctctgcaagctctgcctcctgggtccctgatgtactactccatctctctctttctctctctttttttttttttgttaaagatggaatctcgctttgttgcccaggctggagtacagtagcatgatcttggctctctgcgacctctgcctcctggattcaagcaattctcctgcctcagcctcccaactgggactacaggcacgtgccaccatgcctggctaatttttgtatttttagtagggatggggtttcaccatattggccaggctagtcttgaaacccctgacctcgtgatccaccgtccttggcttcccaaagtgctgggatgacaggcatgagccactgtgcccggccttccatctcttttatggtttctatatatacatgctgtttattgacttcaggcctttgcttctgtgcttctctctgtctggaacacctttcccgcctggcctaggtttcctttctcagctagcatggctcccttctgggccctgtgatgcaatacctctgcatttctctctttagcattcccagctggaaactgttgtttccagagagatgtcaaggcatctctctcctactgaattacaacctcttctacagtaggggctatattttgttttgttttgggaaacattcataagtggtttgtaacctcttcataacatttattaggactaataaatgttcaatgacatgactgatctgatagagctcttgaaaaacactatgtacactttttgccttctggttgcagatcaggtaccaagtgcagtgataatttagaagacacccatatgttagataatcacagggacagagcaacctatacaccgtgtcttggtgtggccaccatctattactctgaggcttttccagcagccagggaagccaacagccaagacagcatcagaccatttgataggactccgaagccaccatttatttgataggactcaaaagccacaatgtagagatggttcaagaatgtgatgctggcaatataagatataggcatgcaaaaatatattttgaaatgagtaaaaataatgatagcagcaaccaaatgctactttcagactgttatgtgctagaggaatacagaggagatacagatggccagcagcccttgagtatattgttagcaaactcagcattaattctgagtctgaagccctgactttgcactccaatcagaatattaaccaaagaaacgttttgctagtcttttagtgaatatgttaacagaaaatcttgtatcggagttgcattaaaggtcatgcttgaagtaagccaaaatgtgatattgattagtgcatttcttcctaagttaaagaaacagaagttagagaaaatgtctgatggtttgaagagtactctctccccagtgttatagaaagagcagcagccttcttgatttgtgattttgtgcttgtatttttcctctgccatggcaagacaaagtatagttagtggtacaccaacttcccaatttaataatgaaactagttaaatgggaagtggtataaaatagtgattaagagcctttgattttacagccaaactgcctggatcaactgttggcttttccaaattagttgtgaatactggagcaaggtactgagcctttctatgccttaatttcctcatctgtgaaatggtgatcctagtagtacatccctcatgaagtttcctggattaaatacaatagtaaatataaactatttagaatagatcctagcacatagtatgcaatcacactggctagtactgttattaatgatcttgtctcaaattgatgatgaacataatttccattaatttattcaccaaattccaaattaacactactatgtgttagtatagaacataagctcaaataacaaatgatgttatatttaaatagagaaagattcatatatgtattttttgccatcaaacaatcatcatttggtgggccatctggtagtgattatagttttatggaaatttgctgctgaggtaaatagctaccacgtggagattgccccaggtctgggaaggcagaagacattcttcaggatttcaaaggcacatcagctgtgcagttgcacaggcatgaatggaactgtacatgccaggataacaatcagggcatattgttctttcaggtttcaaagaaaacaagtatcatacttaagaagtgtagtcacactacccgtgatatagtcctaagaatagtgttgtaatttgtatgccgggtacttggttttaacaaggcatttaattctgttaagcaagttggtaggttggaaaatctttcaaaggcaggctgtgtgtggaagtttataagcaacatttgtttactctgtgaggaaatgatggtgagagttatagatgcagacgagagatagcaaatgcatttacagtcactaatagcaccaaacaaggctgcagttgtatgccattatcatttgctatctgtttttttgtttgttttaagatgttctttgttgccttcaaagattgcacttcaggtattaacactaagattaggtcagaaaagaatgcatccaatctctactgtatttagatggaaaaagcaaattattatttggaatataaacaatcttattacatattgtctgcatgccaatgtctgcacacttgtggctcatagtcacaatgatgaataacagtggttaggttggtttactaagttgtgcatcactttggtcatattatcaatccttaagcagtgaaagactctcctaaatgtctatagatcgcccttgaaagttagagataagtttcatcatcttggtggcatcatcttttgcaatcaatcaccaataaccaacaaatagagatttagtggtggtgtatataaacagcactatgagagacagcattgttcaggaaacagaaatctatggcatggtcttctttccccaaagatggggcaataatgcacagattacacagaagaattaatcaataataaaaaattacataatgaaacaacctttatagtcttatatagatgttacaggcacatatatatgataaagtgctaggtcactgatagaaattttaagtagagagtttgtttattatgaactgaaatgattctagaaagatttgagaatgagagagagaggcttgatactatcttagaatatttggtagatgaggaaggaaatgagggagtattcgagatagggggatgaacccagaggtgaggaaacactagtcatcctgtgactagagagcaaaccagaacaagaatataaaatgcatgtgaagccagccttctaaaagtaaggattgcatacctttggaaataaccagcagtcggccagggtgtgacaaggcaaaggatgaccatgggtcgacagaatatgagaatagtagaacctttgttgttgtgtttgctgctatgtatttagggcttagaatagtccggggcatggtaggtgcttaatgaagcccccactcttttctgtgattaggggcagtctgatagatgataatgctggaaaagtagtttgtgccagcctgcagggaaaacaagtagagggccatgcaattgaaactttattatataggtttaggatttttacctagaggtcacaaatacccaggcttcagggtttatttaaaccacatgcaacatgggcaaaagcctgtatacattatgcattattctgaggtccatagctctcattgcatattgaaagggatccaggcccccaaaaggttcagctttacctaagaagcaagggagtagttagaaataattttgagcaagggagtggcataaaattagtagttgggactatgaatcgggtatttgcatgcagggggaaggagagaatagaggctctaaaacaaaggaaagcaggtgggaggttctggcaggctggagggaaagagatgcttgtgaaagcccactgtggaagtgattgtcttcaaggagatagagtgaaaggagggtgtttaaaggaaagctgtgctggaggaatactgacaaaatgcttatggagaaggtgggggaatggaggccagtgaaagtagattcagtttctaaagaaatccatcagtcaacatttattcaagcctcttaaatcttcaccactttggtgtaagactttgaagtaaggatgatattcctgtcacaaggggaagttagaccttccttgaaatgcctgatttaaaagattggggtgtctgcctcccatgtattaaaaataaggacatctatgtattataaactacaaacttacatgaatgctgaaattaaattagtttctttcaaaattgtctgatttcaaatttccaattaaattcatggaagctgacatttcttcaatatttttggtgctcctgttctgcaggtatttagttgaccaataggataattgagtccttgcacccttttaatgtcacacactcccaagtgaagaaatttcaaattttatgggtatttcagaaataagagtctctcactgtgtcagtgcaaagtagtttgggttgatcatatttaatgaaagaatattagactcctgaaaaataacttatgccagcactgactgtgtggtcaaaaaatcttatacctatccctcaggtaatacaaatatttggggaccataacattaggggaatgcacatatttgctttcgatcatttaagtcagtagagaaaatgaacctcctgggttctaaattaaccccacccagctgtttgcagatcatcacatctggaaagcaggtcaagaggaaaggagatgctctctggaaaggtaaaagcattttgctttccaagcagattccaagtccatctagctgctgctttgtaggcaagccacgaatggtctcaaaatcaaaatggccttgacctcattatgtgacagagaatgtggttgtaacagggctactggctatggcctctgctgccttaaccgatgccaaagccctttacagacagcctggtgccttccttgccgatttccacaatggcaggtacattaaggagtgtctctgtgcctaccgggtgatggatggctctctggcggtctctggtggtcaacattataaatgcttctagagggaacgggaatacttgactccattagagcaaatgcaaaaacaaacatttggagaattatgctaacattctctagtgtgaacctaagtctgatactaacttctagctatgactcagatggatcactatggtatattgtttatatgtaatatagagtagcatcttagagtgagttatacgtatttaacttctttagtggaagaaggtgaagaattcatccctttaaagtcaattcatatttattcttactttctctctctctctgtctgtctctcccccaaattcacatttctttactggtttttataacaggcagtttccaagatgtgactgtgtgtgtatttgtgggcatatttaagtaagtgtgttaactttttgattgccagctctctgtagatctgaacatcaaaccttttaattaccacagttataaatgcccatattagcagcttgctttcttgtaccaatgagtgaattggagataggtagttgttatgttaaagagagctggtgaatatgcttcaacacatacatttccacactgcatcttactaggtacatgagggttctttttacttcttttttttttctttctaattcttggtagactatgtatagtcagtgaaataaacatcacccattactcagttcagtcttccctgaagtattagtatttcaaacaatcctattaccaaaagattattttgatactttattaaaagtcctacagctctagcattgctatactcaaacacagatttatgcaattaggattataatggaagctttattacaatgatatataacttgtatcatcctaataaaagtttctgtacatagcaatactttaataacattgtttctgtaacagtgattccttagtaatggagcttctcttatagcaacttcattattaggaaatgatttcagtaatagaaatgcaaataaagattttgaagggagcattttatgcatagcactattacaggcctgctatcttttcatgcattacatctaatcattataaacttatgacgcagattataattatgcttattactatcctattacactttagaatttgtatcctttcaaattattgaaattaactgccattttaaaattcaagggttaaaataatttaaattttaattaaattttgtttctaaagcattaaaaatgtttcacaaaatcttctctaatttgtattgtattagagattatgtgaaccaatggcattcaacctggagtatgtgtacccttggcggttgatgaagacttcccaaagatacatgggcatgagagttttaaaggaattaattttcagatcttctattcctatatgccccctcttgtaaaatccatctgcttgagaaggcacctgtggttgagattttccttgttcccctccccttttttactttcttccagtgtacaaaagaaagacatctgacatccgacatccatcccttaccatgacatattgcttagccagggcactgaaaaaggagaaatttgacaacccctttatttaaggtatccccaggtcccaattcacacacatatatatatattttaaaattttattttattattatttttttgagataggatctatctgtcatccaggctggagtgcagtggtgcgatcttggcttactgcaacctccacctcccagattcaagcgattctcctgcctcagcctcccatgtaactgggactacaggcgcctgccaccataactagctaatttttgtatttttagtagagacggggtttcaccaaggttggcaaggatggtctcgaactcccaacctcaggtgatccgcctgcctcggcctcccaaagtgctgagattacagacatgagccaccactcctggccccaattcatgtttttaagtcaggatatatagggtagtggttaagtacttgggctgttgtgtcagaggtctgtgcatagatccaggttcttcagtttgctagctctgtgacctggattagtcatttatgcttactctatcttagtttctacatctataaaatggggattataataataggttattgtggggattaaattgattcatacacatatgaataaaagcatgtactatataaaaagtatgtatgggctgggtgcagtggcttatgcctgtaatcccagcactttgagataccaaggtaggtggattgcttgagtccaggagttcaagaccagcctgggcaatatagagaaaccccacctctgcaaaaaatacaaaaattagctgggcatggatggcatgaacctgtagtcccagctactcgggaagctgaggtgggaggatcgcttgagcctgagaggtcagggctgcagtaaggagccatgactgtaccactgcactgcagcctgggcaacagagtgggaccatctcaaaaaaaaaaaaaagtatgtatgtactattaaaagtatgtatcaatactatataatgccattaactcatgatttccaaaaatattttactttatatatttgcttatcaaattttataatatatttatgttgttttgatcaattgaatactagcaatgattatgacaactcaatcagacatctaagttaacatagaacaaaatggccacaggaaattttaaaacataaactcctttgtctctctatttttttggttatgagaagatgatcaataaaaagcttttaagcataaaatatacattaggatgaagttctttgagaggagcacaatagagatatgaattcaaggagaaatatataaaatgtccaattgtattgcatatattttttaagtgaatgatgatggatgtttattttcaattgaatgcatttaagataatgatgtaatattaatagttgtatttaaaattgtcaatatgtaccgtgcattggaaatcatataatttgcaactatttaatgaaaacctttagaggtgaacttgtgtacctggggtatatagatagatgttttttaaatttaggtgatgcaaacaagttcagagacactggaataaaacactgatttacaggagtaaggacataagtgaaagtagaggcataaaattatctttataatttatattttcctgagtaccagctataagaacaataccttccttatcaagttgagaaagtaggtaaattatagaagcctgaggttcccgtggcagaaagtcgatttgacttgtgtggactaacttaactgaaatatcttcagtgtttcacagagaaggtcagtgtataaaaaacacatgtactcccaatttgatgagtaattcctaggagagatcccttgcctttgtagggatgctggatttgtcccttgaagtttttgtgaaacgagctatttctgagtggacccctctcctgaggcagaaatggagaggccggatggcttggatgcatgctctgagacaattttacttcatgctggagatggcagctgttacagtactggaggagcactggctaagacaggaaagaataaatgagcctcttaggaggaacatgctagaaaggaactattttctactttaaaaaataagtgttgaagaacatgtgcatgccctaaggtgtgtttactgctaattatatgagtttgacaggcacaattttgatttaaattttatttcatgccatgcttcaagttgaaagtttggatgccactttcttattgggcaagtttcatgtcagtgtatccacaattgtaaactgtaattaatatataattttgtgtgctggtttttacacttaatatcatttttcagaccctagccaaggaaaataaagctttttagagaagtggtgtgttaatgctatagccatattttatacaaactggcacagaatctgagtaagttgtgagctttagttaatgtgacttcttatttgaatggcccgtgaagaccaaggaatagtcagtcctccatgtctgcaggtgtccatatctgtggacatggagggccaactatactagccactttacataagggacttgaacatccatgggttttgctatctgtggcagggaggtaggggggtcctggaaccattccctgtgaataccaaaggatggctgtaccagctcattggaaactcacgtcatataatgcaggcctgttcgtatacagattggagccttggcaaactatttttgaaaagttactgatccctgcactggtcaatctgaaaaggcattatccaaggacataatgtggttataaacattcaagaaagttgcccaaccccatcccgagccctaaccctttgcatgttctcttgcatcaggtcactaattcctgaaggttgcagcctacagccaagttgaaagaagcataagggctaagctagttgactaaagtctttatggagtctatgtgatgtttttgtgaaatatttcaaaggaagggttagttctcacattaagacagggctacttaaaacagtgagggactaataaagcagtttgtattggtggcaataatgtagtttcatctttttggagggaaatgtgatcatacaaatcaacaaatacgaaatacaaatattcccactgtttttattcattccaaaatttttattataaggaaataattcataaagaggaatatatagtatatatgcataatttataatagtataaactggctgggcacggtggctcacgcctgtaatcccagcactttgggatgccgaggcgggtggatcacgaggtcaagagatggaaaccatcctggctaacatggtgaaaccccatctctactaaaaatacaaaaacttagccaggtgtggtggcacgctcctgtagtcccagctactcaggaggctgaggcaagagaatcgcttgaaccggggaggcagaagttgcagtgagctgagatcgcaccactgcattccagcctgggcaacagagtgagactccgtctcaaaaaaaaaaaaaaaaaaaaaaaaagtataaaactggaaaatctaaatgtctaaccatggaatgatgtaaatatccattatgatatattagctagatggaaaattatgtaattaaaagaaagttataaggactatgtaaaatatggaaaattatatatgaaataatgtcaacaggtaagaggaataatggagtcacaaaagtatatattcactatgtgcataactgatagatagatagatagctattaataaaatttgagaagaaataaacctttaagaggccctagtctgaagcgttcatgaacttcgttgagtgttgctggcctgaagagccactggggagaaaatgacggtaaactcagagctcaacctttaaatcaaggttcatctcatgagttcatgtagaaatctttggtactagttttctttttgggtcttagactctctttttgggtcatagactttcttgtctagaaaatactgaactagatccaaactattaaaaacacaattcttaaaatttcagcagaagttggggaaatgtaagaaattgatatgatcaggaagtgggattagactatactttttaaaaatcttgacattattaagttgcttaaagttttaataaaacactttttaaaaataagaagttgtcattcttgtccatatgtatcagtttatttgtctcccctaataccttacttgcaaaayaccataatacaatggttgtctgaaaagctctattactatgtttatttgtaggagcgtatgatttctcaatacggcagcctattagtagcatagttttttgttatttagttttaaattattagtattctagaaagtggggaaaatgcctcatagtagccaggtttttatagggcagatctttaacatttttcgttatgagaaggagaatcacatattttgtaatgggattatcgcatgcttatgagttttcttcatggagtctctttggagagagctaaagagaaaaactaattttagcttaatgaaatcactgggaaatctgcttctgggtataaaaggaatccttatattttcaaagttgggtaagaagcagaaaggaaaaaaactgtcaggagctatagctgtaactggagtattagaaatttatactgattatatttatctaaagagaagcattatagtattttaaaaatcatcttgaagattcatctcttttctgttgctttaaaataatatttggcaccattctaaaaagtaatgataggtaatagattgctattttattttgtgttgctcataaaatatcttcctgtgcgatagttgccagacataagtatctggttatcaataaattaggctggttttgtgaatgtattcttggaaatctttgaattttctggttgctgatttacaggggtgtgccgcaacacacctagctcaaaagtggtgtccttggtttagtgtgtgtctcagaaatagacttaagtcaaaaattgtcaccattctgtaatgtaatggaagaaaaaaagtaaagaattaatgcttggaaagtgcaggcttccaattgttttactttaagataaaaatagaataaacgtaccacctgaaagttgtttcatactgaagttctgtatttagtcttagcaggcttggcattggaaaaactcaattttgttcttagatctggacataagtcttggctcaatcatttatacattccacgaccttggataagccattcctccaaataaatttctacaaaatgggaagaatacctactttatagaattgtgaaaatatagttgggtaatatatattaatgcatagcttggattttttcttaatcccaatctaatagcaatccctggaacttctagtcaccaatatatctcaaatccatttatttttctccatctttactgtcttcaccctaatcaagccccttctttcttgatacagtagctttcatggtagcttccttcctgcctcttttgctttcttttctcttcttgtcttcattctccacccagcagccaacatttttttttaagtgaataacagattctgtcataaagcacttaaaactttctgttgtatttaaagtaagtgcaggagggcagcttccttctctccccagggctatcaagccactggactctgccttcctttctagcttcagggtttctgctgtcttctctctctcccaatattccagccttacagcctcctttctgctcttgaacacatctagttcactcccttctaatggtctttactcttatatctttctgcctgaaatgttcttcttcaggtttaaaatatgactttgaaagtattaaaaatatacaaaaagaattagggctgatgtctttacataagactaattaggaaatatatcacttgttttggtagtatttttcaggtatattttcttcattttatacattcactttctagtttttcagtcacttgtgtaacatctaactagataatatttttcctatcacattagacacctatgttatacctgactgaacctgtacctctactgtctgacaccatcaccaatgttctgatctgagcctaaaaatgactaacgaattgccctttcaacacatttcttcctttaataacccagaagcagtctattatctgttaatttaaactgaaaaataaaaatttctgacttctgattatcccwggaatatattgttccttcgtttatattatatttgtgtggctccaattttaaaatgtgcctctgaggtcttgtttaccctcttacagcatcttaatcatcactgctttaaacgaaagagtgagagtttgaacccataatcacatgatggcattgccagcccatgggactatccytcatggaccttctaagttaaatgaaccagtgccatgtttgaattccaggtacagatgctccatcattttgcagttaacatagagcagttccagagaaggcccaggcccctctgccctcaacttccttacctgtcatctctctgtccccaactttcttactatataggggagagaaaaaaaacttttctgtctaccctctaattgactgcctagggcctgcaaattaaattgacaaaaaacagattagcaggagaaaagccatacaaattttacttgatttaacattttagtttttacgtgcccttacagaaaaggcatggagactcagaggagcagttagaccctgcagcttatacaccattttaacaaagggtgatacatttgtggagaagtcacaagaggaagcaaaagggatttgggcttccaggggcacagattataagaatgtaaatatgaggagaaactaatggaagataagggcgattttagtaagatttgtttgtgcagacccatctcagtgccaacattctgtgtccggtgatacctggatgatctgttccaggtatgggagacgggaggggaacaccttcacaaagagaagtttatgtcatacttttaggcagatgggggagggtaaagagctctttctgaatttgctgcgtttgaattacctttagctcaaaatagtccttaaactaaagtagcatattgggggagagacccttcatctgctctgtttcccacagccctcagcactgagcaggtatcagggcccaccctgcagaagcagggcttagggtacctggtgtgcaggaccactgctgggctcatccgtaaaaccctgccctagattcgtaccttgaaccccattgcccatgtgtgcatctcacaccccagactacctcaggaaagggacaggtagagagacatgctagaaattgagtgtcatttcctctgtgtatatttgaaggtcacgctagctctgaaaagatttggaaagtaaatcagggactttgaaatcaaacctccaagttaaatgaccttgggcaagttaattggcatctctaaaccccagtttccttatctttacaataattatatgtcaacctcttagtattattattagaatttagggagaatcctagtaaatgttcagttcatacacttgtttgtgtgattcccttttagagggaatacccagtctagctcagactcaccttccctgataagcttatcacccacacattaggtgctttgctgcctaattctttcctgcattcttttttgacaacaaagtattactggagaaaaatgcagcatttataatttaaactaattataaacatgtaatttgtagcccatagtatgtttgtgctgttccactttaattacgcccatcagttcttctctctgctttcctggcacgcccctggagtatgcatcacacacgtgaattacctgatctgcacagactcctaggggatgggtgtgcctcctattttgcagtggcggggagggtgctgtcagaaaccacgtgccttgtgtttccttctggaatcagctatcattatgactctcttctttcctttcctctattcatgctggagaaagctagccttttcccctagggaagcaggtggtgctcaatctttagtgagcatgagcattgccttgggagttgatcacagatttggagtgggttccaggaaatgacatggtcaacaagcaaccccaaatgattctgatggtcctgggatcacactgagaaatctgctctgcttttgtattgcttacttctcctcagactttactcccactgttttcttctctgtctctttatctttaatctgacatccttcttgggattcttctctatatctttggactaggttttttattctcaaaacaaacaaacaaaataattgttttttccattgacatggagaaaaatgattgtggtcctctattctccattatccaccacactgtcaccctcaggtgagggccgaataaacattcttctttctgcccttctgcacttgcaggggtttgactagagagacagagaaattgacagtatcctctactgacagcacctcctgtcaggcatttttttaaagtggatgtttttactggaacaaaacattttaatgaaaacattgacttggaacataacaaggcttttaaatagagacttggaatcctttttgtattcacttaaatctgttttatttttctctctatgacgctatataaaatctcatcaatatacaaaatcattctgagcctcagattttctcattttctctggatgagagctttgattagctttttacaagttcttcattagtaattggcttgcttttttgttttgtttttggctgttgactctaataagtttatgttctatcaaagaattatttgaggatggtctgaaagatgctactcttgttgtgttagggaatattacaatttaagactctttataaaacgcaacaagtgctattaggactaaatgttcatttcttcttcttgaggctggtggctggggtgggttgttcagtcttatcatcatgcctgacctagttgtgcagccgtgactgtttaattaatagacatttacataagctcctgattttcccccagcaagctttataatggtcttggtggttatctccttttcaccctgtgaagtatcagcagtgcattttccattttgcatatcaaaatacagagagattaaattatgtacaacaaattgataattgaataagtttgggaactcggagttctggcatattaatagtcttgcttaaagcaacaatctatatagactctataaatatattcagacactgctctctaatccaggagctggagtggagactgtcagaagcccagggagggagccctttgtagatttatgcaggtgtgggagaattagtttctggcctctctatggagccatgaaagaaggttttgttagtagaggaggtggtatctgagaattattgctatgatgtctgtaatttttaataaaaattctagaaagcctggtggtgtctgtgtagtatatgaatttgatgaactgtctttctttggttttgtttgtttgttgttgttgtttaaaccaccttcctaaacaccattagacatttcttcctaattaacaggccaaaaatgtcaacaggggcagctagagtaaggtgtggctcacttgtcttcctctgttcatcctagaaatgaggagaaacttgctgatctttctgggtacttaggtgagactttggtttctttcccacatattttttttcttaacattttctcacatttttttctatgtatattctcatatacctatgagagatggaaatctgaactggtatttcttctttcccccctttttttccccttttttaaaactataaagtacgattgcttggtgttcaaaccttgcctctttgtcttgactactttcagaaaattattggatcataaagggattgccttaatcatttaacaccaacatcaacaaaaccaaacaaacaaaaataggcaatttttcttctccaaacttaccaaacttctcagtcttacctaaaagatggaagttggtacatctctcttaactcctttcccattaaacttggagtaggctgtttctggcttatattctacggccacactttgcttttctcctccctgagttctgcccgtcctttaaggtctgggcaagattaaataccatatttttaagaagtcttggccgggtgtggtggctcacacctgtaatctcagcactttgggaggccaaggcaggcggatcacctgaggtcaggagttcgagaccagcctgaccaacatgatgaaaccccgcctctactaaaaatacaaaaattagctggacatggtggcgtgcacctctagtcccaactactccggaggctgaggcaggagaattgcttgaaccaggaggcagaggttgcagtgagccgagatcatgccattgcactccggcctggatgacagagcgagattccttctcaaaaaaaaaaaaaaagtctttgctgccgtctctctccccgagtcagaagtgacctctcctttctttgaattcccatattcctggatgtgtacctttgagtagccaggatcacaaccagcctatcatatataacagttatttctgtaatccttgaatggtagatgccctaatggagtatggggaggagagaggagataccaaatttcatttgactcaagatctctcatagctcatgaaaatatacatcctgctatacagacttatgtttccaacygtagccacacaacacagtgttacagaaagcatacgattgaagccatacagcaagcattagatctgccttaagaaaatagtgattaagtttcaggcaagcaggatcttaaggagtatcatcccagggaacaaggtctttccatcgatagggcctcaggcctgggccacctctgcatcgaagttttcctttattttactggtgagctcctctgtggccctcaggcacctcagattgtccttggaacaccctccaccttatagcagggagtgtctcattttttgctagtgccactgtgatccctacatggtcttctctggaagtgtgaggactccccatgccttccctccgaatggtgaaattaattgctgccacagaaggaatctttcttcgcagcttttcctggtcgcagtcctattaccacgccccacccacccgacccctaaccactgcccagccatcagccatctctgctattctcactagggatctgctttttcattcaggggacagggcatgagtatttcacctttaggagtctttcttctagaggtgcaattcaagacttgtagtattgcaggtgcagctggactgtaaamcccatgaattaagataattagctgctgttttatgtatttctagtacctaaaactagaatgtaaattctatgagaacaaattttgcgtctgtatttagtgtgcaaatatttgtagtgcctagaaaagtgcctggcatatagaatgtgctccataaataaatggatgggcagatggatggatatatgtatgagtgtttagcatggaatcttacccacaataagtattcagtgatgtttactgaatgcataagtaaaaaaacatatggagtaacaaaggtgggagtaaagtaggaaggcatatattttggtagtatttgagtccgcttcttagtctgggtaacataccttagggggatacagtggtgtggcaaggagtaggcaaactcacagaattaaaatatgcatcttggtgcatcaattttccacaatggtaaaataagatactattttttaatgtggaagccaatagataagagtttagaatatattgcatatttgacataattttttaaagtaaattacatgtagagggttatcctaaccatctcctcaaatcctctccttcgttcttagatacacattggaagaaatatttgagaaaacagatactgaagtttttatcttatgttgggacttctgcaatgtaaagtaggttctgtctccagttttgtgccaaggagagaatggtgtccctacagtgacgtaggggctatgggtgccctccacacaaatatttccctttatggaacaggcagcatatgccagtaataacttactttggcacattaggctgtctttgtctatgcgataaattccacaaatatttattgagtacctactagatgaaaggcactaacctggatgctaagatgaaaatagtaatcagaatacttcctgtgccctcaaggaattaaagagtagtagaggaagacttttataaacagtcagttgcctatatggaacagtgtggaattagcagtagacttaggcatggggtacagtgggaacatagatggaggagacctgattggtcagggattagtggtgaaggagggagagaggatgttccaggcagagagaacagcatgtgcaaaggcctgtaggtaagaagaagcagtgtgtttggggaacaccaagtagtttaatggtaaactgtatataaatattgggtcaaaagcttctgcacagcaaaggaaagatcaacaaagtgaagagatatcctacagaatgggagaaaatatttgcaaactcttcaattgacaagtgattaataatcagaatatataaggaactcaagccaataccaaaaaaacccccaaataatccaatttaaaaaatgggtaaaagatctgaatagacatttttaaaaagaagacatacaaatggctaaaagatatatgaaaaaattgcccaacatcactaatcctcagggaaatacaaatcaaaaccacaatgaaatatcgtctcactccagttaaaatggctattatcaaaaagatagaaaatagcaaatgctggcaaggatgtagagaaaggggaatgttcatacactgttggtgggaatgtaagttagcacagccactatggagaacaatattgaggctcctaaaaaaactaaaaatagaaatgccatatgatccagcaattctattgctgggtatatatccaaaagaaaggaaatcagcatgtgaaagagatatctgcactcctatgtttattgcagcactattcacaatagtcaagatagaaaatcaacctaagtgtccataaagagaatggataaagaatatgtggtatgtatacacaatagaatattattcagccattaaagagataaaatctgtcatttgcaataacatggatggaactggaggacatcatgttaactgaaataagccaagcacagaaagacaaatgttgcatgttctcactcatacgaggaagttaaaataattgatctcatggaggaagtgaatatagtggtggttactagaggctgggaaggatagtgaggagggcagataaagaggggctggttaatgggtataaaaatagatagatggagtaagatctaatgtttgttagaacaatagggtgacttaagaaataatttattggatagttcaaaataactggaagagtagatttggaatgttcccaacataaagaaatgataaaggtttaagatgatggctataccagttactcagactgaccattacacattgtatgtttgtatcaaaatatcacaggcaccccataaatatgtacaactattatatatccataaaacttttacaaaaggaaataacaaaggagaaaagttatagatttaattatctaacattatattccacattgccaagtcatcatgaacaaaatttaaacacaaataacaatctggaaagaaaaaaaaaattggagtatttcagcaactttcatgacagcagaggttatctgtttattcattgtgatataactaacatttaacccagtgcatagcccacattgatggctgaatgaatgaaaaagatcaatatcccaaaagatgttaagtagctaatataaattgataagaaaatctccataaaacccgaatagacaaatagtcaagaaaatgtgaaaaagcattccaccttagtgtcatccttggctcttctctttttcttacacagcatatcaaatcctttagcaaatcttgttggctctaccttcaaaataaatccaaatctgactgttcttccgcacactactgttgccttttacaagtcatcattatattttgtctgggctactacagtaacctcctaactgctctttctgctttccctcttgcccttttacaatatcaaggtaacattttaaaatgtaaatcagaatgtatcacttttttgttcagaatcttccaaactctccccatcacactcagaataaaatcccaagtcctttccatgcattatgagatgctacatgatcctgcgtcttggctagctctctggtcttacttccactgtcattcctcttcatttcacctgaccaaccacactggtcttgtcattctttgaacattccaagcccccttctgccctagggttttaggatctttgcagctggtgttctcaaggtggaaatactcttttcccaaagaagtgcatggcttgctcctctcttggtcaggggtctgctcaactgttacctctgcaattaggccttcccttaccaatttacctaaaatagcctctcccccatcattctctatatattaaaattttttttctctctcctccatttgactctctttaccttactatgtacaaaacagataaaaaaagaaaaaaaaacctccccagaaaatttctaaacacaggcttaccctcaggtcatggaattggaactcctcctaggtaccaggcagaagcatatataaacttctttggtgggatgcacttttaatgttaagcctcaaagaattaccatatttgtagtcctactaaaaggtcacaataaaaaaaatacagaattcataacgagccattatgaatgagggccagcagaccacagactagtagcagacccacaaatccagatactgaaattattcagtgcaaaaatataaatatattgaacatatttttaaaaatggataaaaatattgaaagtatgacataggaagacgactatggaaaatgatcagcaaatttaagaaataatcagaacttttagaaaagtatataatgtctattctaaaaagcacataaatacagttaaagagagcattaatgtatgagaagaatctgaagaattgtatatattgtagcaaaaaacaagaaagaaatagtaaatatgataacaggttaagaaagacaaaggatagaggaggactaacatgtctaataagagttccaggaggagaggctagagagaatgaaggagaggcaatattcaaagagctgatgctgagaattttccagaattgttgaaaaggcactgatatttaggttcaggaagctcattgaatcccccagtgaaaaatgaaaagaaatccacacctatgcacattacaatgaaatagtagagagaaagagaagatcttaaagcgaatgacaattagactgatagtcgacttctacccagaataaatggaagccagaagaaaatgggataatataatccaagtgctaaaaaaaatcattgtaatctagaattttatacctacaaaaacctatttttcaaaaatgagggcaatataaagcattcacaggattggacaatttactacctacagatcttcaccaagaggtgttcagaaggacatatttcagtgacaaagaatattatcccagaatgaatgctgacacatagggaaaaatggtaagcaaaaagaatagtaaaatgtgggtaaattttaacaaacattgagctataaagtactaataatacctactttctggggttaaaaaatagatacagcggaaatactagacaacagtagtacataaatcagtaaagggtgatcagagtattaagatacttgaattgtttgggaaaaagataaagatacagaataattgtacattttattaagtgaaatagctattttaaaatttaagaataaccactaaatgtttaggaatgtattaatagtatgtaatttttcaagctaataaaaagagaaaaagcagtgagaaaaaatttttaatcctacgcttagtcaatccaaaagaaggaaacagaagaggaaaaaagaaaaggaaaggaagaaacattaaaaatagaatgagtaaaatgtctacaataagatggaaaaaaagtgaaatcaaattatatcagtaatcacaaagcctgtatgtgaactaaacaccccacttatgagacagattgtaaaggtggatatttaaaaatccgtctatgttctttttatagaaaatatcttaaatataaggatgcagaaagcaagaagtcaaacaatttttttaaatgaataatataaatagaaagctgatgtggctatattaatatcaggtaagaatccttttttggcagaaagcatattagtgataaacaccatcacttcatattaaagtttcagttctctaagaagatatacttctatgcatttaaatatcacagcttccggatatataaagcaaaaactgacaaactgcaattgacaaacaataatggacaaatcaactgttataggggagatttaaatttctcttagaaattaataagtcaagcaaaccaggatatacatatggacaacacaaataactagcttaatctaatgaaacatgtagaacagtgtagccaacactgaagattacatatactttatgtatarccttttaagtacttatggaaatataaaaaattaagaaaaacaaaataagcccaaacaaaaatatatggaagcaaataataaaggtaaatgcagaaattagtaaaacagaggacaaagatacctaaagaggatcaacaaaagacacatatggtagggactatcacatagtagggccaacaattaaatatctgttcagtgaataacaagcaactgaaagtataaatgtgtgtataaaaaggtctgaaaggaaattcaccagtgattaaatctgagttgggctgtttgggattagctcgcttttattctttattcttggtattgtctgaactccctgtgtgtattgctcttataattttatgaaaacacatgattttaaaatcaataaatagatttttgaaggagtagactagaggttggaagtcaggaactatcttagacaccagttctggtcagagggcatgaggaggtgcagtgtaagtgtgtggtcttaggagatatggaggtgctctgcccctcactacatggatgaccttaagcataatctctctaagcctgttcttttaagtggcaataataaagcctgtctcaaagagttactgtggtaggtggccatgtaaagcgcttaatacggtgcctgatactgcagatgctgggtagtcattttccttcccctgcttgaggggttagcatgagggagatacctgtctccatttctaaggaatgtgcccagcgtggaaggcaaatttgatcagtctggaatatgaaactggatgaaagcttaatatgtgaaattacatttgtgccctcccaaagaaccaagaaaattaagaaatgaaccaagtaactcatcatatttattacatgtaagaatgaaggtgcagtattatcatttccttgtgatagtcatatctaatagttctaaaaccaattcacagtattcttgtcagacttattttatgagacatttaaccattgctaaattaaatttcatgaggaaatatgcctatataacttctctggagttacagagatagaaatctgacccatcatttctattttcatggaaaaccatttagcagaactttgttccagtagaagtgtttattaagttgtaagcctaacacagttcattgcctgtgtgcatttccacacggacatttttctcagtgcagatttgctcagttcattactactgacagcagatggtagcactttcacatgaatttacctcctgaatcgatctaagaaatgtcactaaaaggatcccaatagttttgatgttcttccatctctgaaaagggtacgttaaacaaataaggagtagagtttagattttttaaaaaactctaacacataattcctaaaccaactaatgactgctttcatctttgattctggctgtctgaaggaaaaacggtagaaaatacagataatctttcttgatagcataagccttacaaaatctccattggaaaataatggcttttggagaatattatccacattgattgtctgcaccgttaacatgcctcaaattacttgtaaattctctactctactttcygtgaatacaaattgctgggcttgcagaatcagctgattgaatgtgactgaaaaaatagtattggctcaggttactatgctaactttgaattctgtgatttctgtggcattaagatctccacaagattaaccacatttttcacttacagacctattgccttgatttaggcttaaatcaatttaaaattatcagaagatttaatgtttgataaatgagtgaatgatataatatatgaattctagtcacataaaggaaacttgttatttttctatatcatatgatcattattgcattcttcataactcaagggtttatattcagtagtcctatatatttagaaacaaggatttatttagaatattctaaaaattaattttccatttgtgtttgaaaagtaattaatgatttggctaatttcgccacaactaaaagaaactgatacattttagaaagcattgagtgttgaagcatgtacaatttaaccgtgtaaattaattatggatgcttctgacacattgctagaagagtgctcatgattaacaacatacttaaaggatttgcttcacaacaagaaaaagcttttgggtttcacatgctctcaaaaacatgcttactaatattctaacaacagaggcacaacttaatactgacctttttttttttttttttgaaacagagtcttactctgttgcccaggctgagtgcagtggcacaatctccacttactgctacctctgccttctgggttcaagcgattctcctgcctcagcctcccaagtatctgggactacaggcgcctgccaccacacccagctaatttttgtacttttagtagagacaggtttttgccatgttagccaggctggtcttgaactcctggcctcaagtgatctgcctacctcagcctcccaaagtgctgggattacaggtgtgagccaccatgctcggccaatctgacttaattctgctaaaagatagcaactttgggccaggtacgggggcttatgcctataatcccagcactttgggagattaaggtggaaggatcgatgagttcagagttcaagactagtctggcaacatagtgagactttatctcttaaaaaaaaaaaagaaaaaaagaaaaaaaattatttaaaaaataaaatacagcaactttgttcaatatgctttcatttctttccccttcctttgtaccattattgtcatgtatgttacatttatgttataaactcaacactagagtgttcatgatttttgcttatataatcttatgtcttttttaaaaaattaagaaaagagaaagtacttagtcttttttattcaccatttatgacacttttcatttttccctgtagatttgagttacactctggtattatttcctgaaggactttttttagtatatcttataaggcaaatctgctagcaaggaattctctcagtctgtttccctgggaatatatttatattactttcatttctgaagaatgtagaattcttggttgacagttaaggttttttccctcattactctgaatatgtcattctgctcctatctggactgataagaagtcagctgtttttgaattgttattcctctttatgtgatgagtcctaaaggactctcttgctgtttttaagattttctccttgtctttggctgtcagctattggactatgatgtgtctaggtgtgggtttttttatatttctccttagagtttgttgagcttctgggatctgtagattaatgtatttcatcaaagtttgaaatttttagccaatatttcttcagctattttgcctgcccttttctctccttctctttttcagattgcgattatctgtattctggtacagttgatgttatcccacagatgtctaaggctcatttttcttcaattttttttctcttttcttcacattgaatactttctattaatatactttcaaatccactaattctttctactgctgtctcatatttactattgagtccatctagtgaattttttatttctggtattgtacttttcaactctagaatttctatttagttctttttatagtttgtattcctctcttgagattagctatttgcagagccattgtcataatttttctgttttaattctagttttctttaattcactgaacatatttataatagctgctttgaattatttgtaaatccaacatgtgagtctacactcagagtcagtttttaataatgaattttccccctggtatgaaccacactttttggtttctttgcatgtcacataaattcctttgaaaactagacattttagataatatattgcagcaattctggattccaatattttttcctgagggttgtctttttcttgttgttgctgttgtttttgtttggtttagtaattttcctaggctttatctgcagattttttttccctgtaagtgtggccactgatgtctttgctactggttttttaattcttatttttattttttagactgccttcctcagggttatccagctatgtctgtaaagcttgcaggttggccaatgattggacagaaattatgctcaaatacctcaagcctataatgcttttttcttttgccaatggatgtgtacgtggattgggaacacgctaaaaactcaagtagtattcatattggccttagctcttacttcctatcaggccttcttgtgactccactgaacatccccttcccatcagctagtgatgcctggagaacttatctaccccttctgtggctgtcttatttccagaatgtccccattaaattactggtagtttgctgcttgcctcaactgggactgcaacctctggctagcagagctgcagcttttttcttttcatttagtacctattttgctatttttattgacagtgctgctgagcaatagttttagctatctgttggaaatcaggccagcccctctggctacacagttattggctcttatggccagattgctctggtaaaacttctgttgatggagtgtctggggacattggggaagaggaggaggggatatggaagtacttccaggcaagaaggcttcagattccctctgtttctaacttgaagtttagcagattatcatgaactaaacacgtctcagattttatatttgcccttggttgatttccaggacccaaaaatggttagtttttgacaattttgttcatttttatatttaatttctggggagaggatttgctgacctctttattctatcacagctggaagtccacttctgttgttattaatttataaaattcttctaaaagattacatatcttataattcctattttaagctgatcagcatattataggcttgattcttttgaaccaaaagcattttgccaaaacaatataatttttattttaaaatccaatttattaataaatttaaacttttaatttttaaagaccatcattcattttaatatattctatttaattatataaatataaggtctcagtatagtaaaggataaagaattttttaaagatggccaaacctgcattaaagaaatgcttaagctattctaaaagctcttcaaaggcatgaaagtctcaattattttaaaaagtgttttaaatgacattgccatgcattttattctattagaacataaccttaaatgctaatatgactgttttatgttctttgaggaaaaatgaatattaaaatgttgtagattactgaagtgtttttgaagtacctaaacttttattttaatttaaattcatttaaattatttttcattaatttggttttaaacctgaatacaaatatagtgatagttctagttgccatatagacctagaccttttactaattcagacctttcttcctttcacttataaacagttgtcaaatattcctaaacacttagatactggtcagtgatgcttttaatatgctacttaatttacaggaacgtcctatttttagattgaaatttggctttattatagggtaccataagactactttctgaatgtctggctgttattcttttctgtttagatattaatgggttaaatactaatagccaactaagtgtctgctatgtgtcaggtactgttctatgtacttctgtggtattatctcattgaagggtcacagtcaatctctgagacagatactatcattagccacagttaccagatgaggaaacagagacgtaaaatggttaagtgactttcccaatagctcacagctaccaagtggtagagcaggacttgatctcaaacagtcttaaccatagagctcatgcatgtgcttacccacttgctatgtggaatgaaaaaaagatgacttatagaagtaaagtccatgtctttacaaagcagcatcaaatgagcagagctgcagtgtgccatggtcctaagactcctctaagaaaatggtcccctgaactgtaagtgcctatccacctcttagataagaaagagatgccaaagggaaagtgagtcttggagagagtggaggctgcgtgattgaactgatcctccctattaggagtgtttccgtctagtggaaatttgtaactgtaggtttcatttcattaaagtcaacatgtactttacatcaataagattggattatacctctttattccttccattggcaactatgtaagtcatcccaaaagaatttagactatatttatcttttttaaatcccagctttctaaacagtcattgttttagtccaggataattctaaatttttttgcatttttcctgcatattttctatgctcatttcccccatagggtcatctgcccccacattctgttcccaaatctctgcatggttgtttttttccttgtcgttctgatctttgattaagtttcaccttattttagtccatttaggctgtcataacaaaaataccatagactgggtggctcaagaaccaacacttatttctcccagttctgaaggctacaggatccaggatgagggcactggaagatccagtgtctggtgaggaccygtttcctatttcatagatgccatcttctcactgtatccccacatgataggaaaagagtgagagttacacctcttagggtgtaaccctaagagggatacacacattcagtccattgtattacctcttccttcaggccttccctttccaagtctaatgtcaccacaatccctccagaatcatgttaccctgttgtgtttcctttgtagggcttataattatctggattatcttatttattcgttctgtgtgtttattggctgtctcctgcactgaaatctaagttccatgggatcaggaacattgtttatctaagagatgcagtggtctctataactatagctagaagtattctggcagacacataaaaaagatgattgattaatatatgttgaattgctaaatattagtttaaggcaggtaagggaaaccagattcaagttggacaggaggacttggcataggcccaacacatcagggctttgagcccagggcccagttagggatgggaatgaaggttgggaagagagctgtagagaggaagctgatgccttgctggaagaatcaggcgactggtcagagtcacctggagatggcactcagggagaaacaaatgccaggtggtgctaaaaatgccagatacatgaaataacctatcactagtggataactcatccctcaccaccaccaccccaaatctccatacccagtgtcaccaatacaagaggaattgtcccttccagttcttgtgagtggatatgtgcataagcatacagacatgaatgtttggagctgaggggtagaggcagcaaggacagccacataattcatcccatcaacagctctgagttcagcttccccttgggttggctgagagaagaagccaagagaagaaactaggcatcccctagtctaaatccagcctacaagcctgttttacttgtcccactccatgtttaaaaataaattatgccaacacttaaatgtaggaggtttaacataaacttcagcttttctaggttagtttcacaaatagggaggtctggcatgctgaacctgcattcccacatgggacagttggctggagcagagtagccagcatggccttggatgggtgcactcggcagtttctcacgggccccgtcatctgctggtgtatttagctggcattatccccttaggtcacctgctttgtcttcataggtatttgagtttgcagtgttggtataatggttaatccacaatayaaataatcaataaatgtatcatcaataatagtgtttttgttggtagaacttgtgcacagattacccactacatagaaacctcctagggctccccattgcttgccaaatgatgtccacgtccctaacttgggtatggtctgacctatatcttatatccaattactaccttataaaagaaacagagttacatttcaggcttttaacttataaaaacagccctgtaggcttgggagagacagaaggagagaaatgaggaaaaagaaaaacaaaaactcagagacggaaagagagagagagacaaacagaagtagaacaatttaaatagtgcaggccatctcctcccatccctggttctactcgtggaacatgtgcccactggcactggatacatgtaggcttgaaacaacatgttgacaaaatttgtgtaaagaaatatgcaaatgattttgagtctcttaccattgacaaagaggtgaataaaatgaattgtttaggttgtcaaactactgagctttgtgaacatccttgaagaaaaactgaagaataatgataggccaaagagaaacactggccaacagagagggaactgataaaatgcaactacagtttatattgtgtaaacaaaaatgggtgccctgctatactcgaccatactgctttatcaatgaatagtcctttctcaccaacttcttctgatgtttggattataaattgtttttaaaaatagaaaataaacctgtatattaattcaataacttggaatttgagacaaacctttattttaaaggagtaaacyagataaattattttagccttttcaaagtaactcacactgatcctggaccaattctgattcttacaggaacatccaatacttgggcaacccttttttgtacttcatccctgcaagacgaatgaattcatgactcctgtattaaagaattctcagaaaatcaataagtaagaaacaccatcaagatacattggcttctactctgattttaaaagtgtaaatctttttatgtgactctaaatgctaggctaaaaaagaaatattaataataataatggctaacacaatgatttttaggatatgctagatgctgttmtaagagttttagatacagtaagacaytggatttttgcagcattcctatgtgctaagtactattattttgcccaatttacagaggaggaagttacagaacagaggagttaagccactcaaacaaggtcacacagctagttaagtggtgggatttgaatctaagcattttggcctcagaaccatgctcttaatcactgcactctgctaccttagtaagtgctgtaaactgtaagggtaaaatttgaatcatcaagggaagtcaggagccagtaccttacctcattcttcaactaccctaatgagggatccttacaggctctctggaccttaaattcttgtcaagcaatggggctggcattcagaaatgctgagattccaggtggtaggtacaaatctttgaagaaagcctcacttttgttattgttggtgaccaactgatgttctaccattcatccaaaaactacaatggaaacgttagcatggcctgtatttcacttgtttcctaggaatgtcaactatatcacatcatggctgagcattgtagggccagttgttgggctgaatctacctctgagttatgccaaagcaaygtctcaggatgaacgaaatgtccmttaacaaggtaaaagaaaagcctggatttaatgttttgcygttacaaagatcaatgtctccattgcatttagactcatcccaccaaatgcaaaatttgctttcatctttagtgggcaaaccctgacttaatttttagttttccaatcagtcccctaccaagttatttaggacagggatccccaaatcccaggccatggaccggaaccaggcctcacagcaggaggtgagcggcagctgggtgggcaagcaagcgagcattaccacctgagctcttcctcctatcagatcagctgcagcattggatctgcataggaatgtgaaccctattgtgaactgcgcatctgagggacctaggttgcgcgctccttatgagattctaaccaatgcctgatgatctgaggtggaacagtttcatcctgaaaccatctcccattcggtctgtgaaaatggttttccctgaaactggtgcctggtgccaaaaaggttgggggccaccaattcaggaaatattttactttgctgtaagtagcatgcactcagtgacaggaatggatagttttattttagtactgatattcttaaataagtctttactgctcagttatttttcttttattctcttggcttttgttttatgttcttcagattcttctattgagtttaggaattgcggcacgaagaatgccaagagtttacctggccagccctggctttaataggactgataccatggaatatttcatctcaccaagatgtgacatggattatttttcccttggacacaaatgtctacagcaactgatgtttgataggctgaatgtttagaagaaacacttcaaagggatacatcatggccaggcatggtggctcacacctgtaatccaagcactttgggaggccaaggtgggagcatcacttgatcctgggagttcgagaccagcctgggcaacatggtgaaaccctgtyggtacaaaaaaatacaaaaatttgcctgtttatggtggtgtgttcctgtagtcccagctccccaggaggctgaggtgggaggttggctttaacccaggaggcagaggttgcagtgagctgagactgtgccactgcagtccagcctgggtgacagagccagacactgtctcgggaaaaaaaaaaaaaaaaaaagacacatcactataaatagcaaaaaaacaaatctaacttattaatactaggaataccaacattattagggcacttgcaggttattcttttctaggccaagtacttcacttccatttgtctgacatggagattgagggagaaatgtatttgtgtgttcattttaatgtaagatatataaaaattaaattactggatttacctgtccctgaaactggtgttataaacatgacctatcttaagtgattttcccacaatcaaactcaggaacaatagattatttctgttttactccaaaagagagagagtgagtgtgagtgtgtgtgtgtgtgtgtgtgtgtgtgtgtgtgtgggtgtttgtgtagatagttgtaaaacaaagaaaaaacacaatattttactgtgagataatatgttttaccagcaaagtgtggcatagtaattagaagttttctaaaaagctataggagatatttaaacattaaaatttctttttgacctatagtaataaaacaatggtcattttacccctctgcttctcaaccccacagctgctctgctgtactctttgagggctcttgagcgagtcttcatgtccctgagacttattttcctcatctttaatttgaaaataacaagctacctcatagggttgctgtgagaaccacatgagatcattaatgcatgataagatattgtaaagtattatacgaatattcattaaatgctcacctttcttgtatataattggtattcactaaggctgtaaataagtttcatagccagttaagtattaagataaacctaacctggaacaattttttttttggttgcttgttttgttttttgctttcatttgctaggagctgaaacgaagattaaaatgtcattggctttttagagagtctagattagtgtgtctttgaatgagggatatacttaaaatcacctgaggatcgtttacagctacagatgctggggccacctgacacagtctctctgggggtgattctgctctggagaacctctggtctggatatacctttattgtgacattgatttgtattgttttgctctactggcaggccttttccaatccatacaagctgaacttgcttcctaatgtttgtctaggccttacatggatagtaaggaagcttaggagacatgtacacaaggcagcccacttgtaggaaactgcttcaggtgaggacatcattcaccagtggatcaccgagcaccgtgacagcaccctcagtccacatctgcagattaagagctgaactctcacagagaaagtggaagtagagaaagggttaattcaaactgctagaaaagctaaaagtaaattttaaaatgctgagctgcccatattcatgctaggatgagagccggcttaaatgcttgctgggcattttggtatttaccacttagcatgttttcaacttctgtgagggattttccccccaatctccctaatgtaaacacagatttctcagcaagtcatttctcaagccatgtcatttctagtgtaaaataaattataataatgtgtcatctgaatggtgttcttgtctgcaaacattagttatcctttgctaacagattctgagatgagagtctatcagtttggagccaatgtttagttttttttaaaaaaagttaaaaatacaactttttctctgatcaacaaagacctaaaaattcatcagtggcagaaaaaagttccaaggagctcctgtagactggggaggcctttcttcccagatagatccatctcctcaagcagcttgatttctttctagaatttttttcacttaaaaaacttctaatttttggttgataacaatttccatttttataaatgcagttatgctaacagaatgttatcctgacagttattaaacattagaagatatttggttttgttgaagtaactgttctttctcggcaatatgaggattttttctccctgcttcctcaaataatgtacaacatctatcagaaataaggctgggtaaagtcgcttccagctcacctcctaaattctgcttctgtgtgaccttggaaaaatttcttcacctctgtggtcctcagtttctttatttgtaaaatagggaaattcagctatgtgtcttttgcgacaaccgtgaatttttaggtctgtgaaatagaagtccagagatctaaactgtgaggctggttaactgctagctgtgtgacttgggccaattttcttatttccttcttaaactatttctgaaaaataaagcccacagtatctatgctgcttacctgacaagggcatagagaagatcaaaatgatacataaaactgaatgtgctttaaccaaggcagtgagacatggagtgaggggtgacagtggataatgacctgctccttcagcgacactagcatccctactcctctccacctcattgtatgtctgagccctccccagtgccaagcgctctctgatctggggagtcttttccttcacacccttagctgactgttgcttatgctggtgcccacctggaagtgcttccttccccacaggtctacccaattcccaccctggtgttggtgattcactgtcacaaagccacctctgaccaccacagaccccaatcagtgctcccttcattactcaccatccttagtcactatgagcttttagctgcctctcttccgctctaatttctccccaacttgataagtattaattaagtcatttcaggtgttggccactgtccttgatttgctgtgttgcagcatacacagaagaatgtctgtgtgtgccacctaagtagaaaggctcttgggttgggaatttgagaggtgggaaaactctttgagggaccagtggagggagcagtgaggggagcagaggctgtgttgctcagcaggtactagcctacgagctagaggttaaaaaaacaaaattccccttccccccaacaaaggcttattaaaatcaagagaaaaaaggccagaactgggtttttgcatgtatttctcctatgataggtatagtggtttttattcatactcccaaaatattaggaaatagagctctgcaatgtcaaaatcagctcttacataatccagagatattccagtgaggtttttttagggttaaaatttaagaatgagaatatgaaaatattcacttaagcagatttcctcttacatactgaatcctaggccaggtgccacagatagcaaatggggagacataagaatgccatagtccagtggagaggacacacaagaggaagcttcaggaacagtaggctgcatgctgtgggcaagcacatgccaaggaaggctttgcagaagaggaatgtgagtggagtctcgaaaaccttatgacttagccaggtcaagagtgaaggaagaatcttgaaggtgcttgtggggaagtggtgaagaatcaagctggctagagcaggactggggccagctcgggaagagtctttactgtcacactgagaatttgtatttggcccgaaaaccacagccactgctgggattcaaatagaaaagttaaagtgatcacatttgcgtttaagaaagaacctgtatttttaaatggctgctgcatataactaatcatccatacactttgtcaggtttcgttttgttttgtttttactgcagtgtcttagccacaggatttagaaggttgaggagcacagcaggggctgagattgtgccaaagacacttcagtttttacctagggtcttccaaaacaaaacctgccagtgtcctgaaaagccttgaattctgactactgagttacctggggcaagtcactgcacctctctgggcctctgttttctgatatattaacataagaaagtgtatttgattgagtaaaatcaatttattgttttgtaacaagcttttttttttttttttttgaaataaggtcttactctgttgcctaggctggagtgcaatggcttgatcttgactcactccagcctgacctcctgggctcaagggatcctctcattgcagtctcctgagtagctaggactacaggcgcatgccaccacgcctggttaattttgcttattttttgtagagatgaggtctatgttgcccagactgtacttgaacccctaggctcaagagatcctcctatctcagcctcccaaagtactgggattacacaggtgtgagccgctatgcccagccagtttttttttttttttaatgaaatagaatacataaaaaagaaaatatcaaagtgcactacacatagtaagggcattattgttttgtgaaactttggtttcaactatatgttttatatatatatttatatatatatatatatacacacacacatattttatatatatacacacacatatattttatatatatatgaaatctgtgtgtgtgtgtgtccacacacgcacacatgcacgtgtgcactgggttgtaacatagactgtatttctagtgccagaaaatagaaatctgaaaactgatggacaaataagcttccttcctattctaagacttgattctccttatgctgctgaccagtaagttgctgaaggctattctattaatagaagggtataggaagtacttaacaattattgtttctgcggcacttcatgtgcacaaaggtgtttgaagctactcctctggatttttacagggcttctctatggaagcattttcacatttttattcctaaatctggtagttctttacagtaatcctgtgatctcaagcccttgctttaagttttgtattgttagtagtgacatctagtggttctgttgcaagtatcttgcattctagaccattggagctgaaagtgattttagtgaccaccaggtctcattttgtaaattattaaaaataaactgaaaactcacatgtattcctacattcaaatcaactcgatataataataaataaaacctatagctgtgtaatgctttcttggattactttgaagcttttcaaatacccagaagtcactgttggttataaccatgaggcagaaatttaacaaagcatgccctgataaattaaaaggaaatcatagttcagtatagctacagcctttggtgcattgttatttacaggtacatgccagaacctcaggctttcgcatggtgcctggtgtttggtagcactcactaaatctttgttgaatgtttgaatatgtgggtgatcacgaagccctggagaagaatcacagaagatgtgggacttgaaggacagagaatttgataagaggctagaaagctaagcttttaagttaggggccatggaaggccaaaaagggaaccatgagtaggacccaacagggcacctttcaaggttttaacagagaaagttgactatgtgtagttgttggaggactcatttggaagtggtaaattggatggattagaaggaagagaaactggatagaggccaagaagctaatgtagtggtgaagtgatgaatttctaagttaggaaggtgacagagtaaagagaaagaaatcagtgtcagagacattttgagaaccagaacttgatgtgaagagaatgagaagacacttgttatgacttggttatggcttacattctatactgggagtccctgtccaggcctggaccgtcttccttggtctctgttctgcaggtatcagggattgaacttgctttcttctttcaagaagtgccacccaccctatcctgtgagcagatttctttctcccgaccagcagcagagtgagatgtagtctcctcgtgctgtccttcagtagcttcaaagaaacagtccccaggccctttcctgcttatccatagggaaatggctaagtaaaatgttgtactatgtagcagttaaggggaatgaattcaatctccatgtatcaaaatgggcacatctcaagaaacattactgagttaaaacagaaaacaaatagtagatgttaactatgagctgtgtttgaaagtgtccccccaaaay

SEQ ID NO: 97182 - DNA, 12933 bp, Homo sapiens
tacaaggccaaaagtttgttgtttgaaaagaccaataaaatcaggccaggtgcggtgactcacgcctgtaatcccagcactttgggaggccaaggcgggcggatcatgaggtcaggagttccagaccagcctggccaacatggtgaaactctgtctctactaaaaatacaaaaaattagctgggcatggtggcatgcacctgtaatcccagctactcaggaggctgaggcaggagaattgcttgaactccagaggcagaggttgcagtgagccaagatcgcaccactgcactccagcctgggtgacagagcaagactccatctaaaaaaaaaaaaaaaaaaagactaataaaatcaattaaacactagcaaaacgtatcttgggaaaaaatgaaaagcatgaattgccaatatcaggaataaacaggcaatattactacagatgctacaaacatttaaaagataatacaaaacaaaagttcacatgtactacacaaattcctaataaaatacaagttatcaaaactgacaaagggagaaatagaagatctaaatggtcctatacctgctcaggaaattaaatcaataatttcaaaccttcccacaaagaaaactctaggcctagatggctttaccaacaaactcttttttgtggatgaatagtattccattgtgtctatatatcacattttctttatccattcatctattgatggacacttaggttgattccatatcttgactattataaatagtgttgcaataaacatggaggtgcaggtaaccctttagtataccgatttcctttcgtttggataaatacctagtggtgggattactgcactgtatggtagttctatttttaattttttgaggaacctccatactgtcttccataatacctttactaatttacactcccaccaacagtacacacatacatttttaaagcataaaacagtgctatatattatcccttggcacatatgtattctgcattttaaaatggctgaaggatgcactgaagtcacaatagcagcagcctctagaggagtaaatgaaaggacagggtttgaggataagaacaaaggagacttcaacttcatttttattgtccagtttcttttattttttttaaaaaaaggcaaacatggtaaaatgttaacatctgttcattttgggtgatggctcatagggtgttagtcatattattctttgtaattttccctttgtttaatttctcaaaatgaaaacaataaagtcaagataatagtatctttcatagtttagtcttaggcttatttattgtttaggtattttatgttcctgtttgtcttaagaaaaaaatgtgtataaatataagtatagatgagatagttaaatttcctttttttgtttgtgttcacaaaacatgcttgttttatttaacattctttggtatcaaaatgtggccttcatacaaacttgtgaggagtaaaccatgagggttcacagttttaccacagtctgtatgttagcaaccatttcctgtgatagacatgctcatgcacctcaagtactagaagtatccatttgtattggagccaaaatatccgcaagcagagaaacaagaagtcaaaaatattttcctctttggtgctaaagatttgctgctgtgtgattgttgagactgaagttctgaaagcaccagtgtttgccggatctgtctccagcttgtctctacaaggtcatttccaaaagactgtcaaaagaatggcatgtcccgccttttccaccaccgacacaccctgcatgaaaaccccaggagcacagaagtcctgcttgggtgaggataagggctctctcaaagtctattatcgaaggaaggcagacagatgggttaaccactccaatggagtctatacttttacagacatatcacatattatgacaattaattattaggctggtggttcagcaacctttcgaagtgatcccaagatgattgctgtgaccatatttgaaaagctaacagataaatgtgggcttaaaacagactatatgttattcagctaggcctcaaccataggcataagtaggagtgaggtgagggcccttgtggacccaccagggtcttccacaagagtagaactcttgccttgttcactcctttcataatcaggcaaaggaaggagttattcaaaaggaggaactgagcatgttcaaccgagaccctttttgctgtccaatttccagccagcctgtcacctggatatatgtaagcactctggtctgctcttggctgtgtgctctaagggagcccactgggtgttcagcaagatcaatggtgaggattaaatctttctaagtcaagggtcagttacaaacaagatctctctgctacagatctgaagctgtattctctccagtcaattttgtcagtaacaaaagcagtattttttgttccatctgtctatcttctacctcttaattggtttcaaacttaagaggtggtagagattagtaattgctccccacaaaagcaaaaaaccaacctgatgatcaattaagatctcaaaaatgataaattaatataatccatgataccagccaaaaatttgtataccaaatttgttcttacccccatagttatcctgtctgaatagttaactgagcactgctcacttttagattccttaagagttgttaaaaaataagtctttgtactctatcatggcatgcatgaactctcatagcttgaaatgactgcatgaaaatgtacattttataatttcttatactatttacataggtataagtatacacagaaagtgtgtttaaatgtttaacagccaaaaacaaaaaccaaaaaaaagtcactctgctgtaacagaacactgttctgcatatggctagctgtacattggcagaacatagcgattttaaggatgaattagtgttgtaatctctttgggatttcctttatatttgcggtggtttatgactgacatttcatgtaactatagctttctgtttggatttaataaaagattcatttctgtggcaagatacacatttgcactccagtgttgaataaaagctactgttctgcaagggtataaaatgctgatttataacaacacgttccaataacagtgatctaattctttcaaactatttcttcccaggtcccaggaacagcatggctccagcaaaggatgactcttctcttccagaatattcagcctttaacacatctgtccatgctgcaattagacatggaaattggaaactcctcacgggctacccaggtagagtccttagcttagcaaacttcccttcccgtggtagacaaagcagggctgtgtcctcagggcagtatctccagtctatctgccctcctgggatttgattcccacggccatttctctggaaagagaggacattatcactcttgttctaaccgtttcccacctcttcctctgtggctcctcctcaaggcccctaagccctaccacttacctcactttgctcagatacctgaaatcttaatttgtctttctaatctttcatgatccctcctgatatatgtcctagaaagacaactatttattcagggttttcttttcccaattctaagactccgcctgttcccaattacacagcttccatcattgtcatggtgcaagtaagctttcccagtggatcatcaaggagaagcttaccgaagtaacaaatgccttttgcaaaacatatctctggggctgctgaatgaggagataggaagaaatggtttaacctactcgtcctaaccaaaaaaaaaaaaaaaaaaaaaaaaagagagagagagagaaagacagagagaattaactgtagcaggggtgaaaggaagaaatgtcactcttatgcttcatggaaaatacggattttaaatatatgtggctatcaagcacagcacatttagctaacaaagagagtctctgagagctacaccctcaaccagtggtatagctggggaaggaggttgctcctctgattatattctctaagagtgatatcttttcaatacttttaaaatatgtgggatgatggttaaggctgtgatgtaattaatcaatgtttacaatgagaacatttttggcgtttgcaatatgacaagtcttttttgactgggattgtcccatgtattgcaagactttagcatcactagctcatgcccactaaatgccaggagcacccctatgccctagtccttgtgacaaggacatacacacatgcacacacgtttctgggtgtccttgcttgtgaagcagtgagacatgtctagttaaagcaccagaagtcaagtctgagaagcatctagagacagcatctagggccgcatctttttatgtttccacacccacaacccagtgcagccttggcctcagactccttccctgaaattagaacctgcctctgtgcttctccctcagtaaactgttttgttttctttgctaggctgtggttactggttccctccaccgtctcaatacaatgtttctgagataccctcatcagacccaccaaccaagaccctctggctctttgatattgatcgggaccctgaagaaagacatgacctgtccagagaatatcctcacatcgtcacaaagctcctgtcccgcctacagttctaccataaacactcagtccccgtgtacttccctgcacaggacccccgctgtgatcccaaggccactggggtgtggggcccttggatgtaggatttcagggaggctagaaaacctttcaattggaagttggacctcaggccttttctcacgactcttgtctcatttgttatcccaacctgggttcacttggcccttctcttgctcttaaaccacaccgaggtgtctaatttcaacccctaatgcatttaagaagctgataaaatctgcaacactcctgctgttggctggagcatgtgtctagaggtgggggtggctgggtttatccccctttcctaagccttgggacagctgggaacttaacttgaaataggaagttctcactgaatcctggaggctggaacagctggctcttttagactcacaagtcagacgttcgattcccctctgccaatagccagttttattggagtgaatcacatttcttacgcaaatgaagggagcagacagtgattaatggttctgttggccaaggcttctccctgtcggtgaaggatcatgttcaggcactccaagtgaaccacccctcttggttcaccccttactcacttatctcatcacagagcataaggcccattttgttgttcaggtcaacagcaaaatgcctgcaccatgactgtggcttttaaaataaagaaatgtgtttttatcgtaatttatttccccccagccattgctcactctgtctagacttcctgccacttccaattcttctgtggcttttcctgcctttccttttgacctcagtagtcctatccctgggaaggccactttgcttctctacctgagcacccctgatttctggaacgctgctgagccctgccttacttttgcccctagggctgaagctagaggcctccccgtaataggcggtggagttgctctgtgaggatgttcatggtagacactaagagggctgggtgggagatgcttggctctgtggcatctgttcagcgaggcttttcctatattgcatggagttagtcattgtgattgtagctttatttcataatatattaagacttgcactgctatttactagcagtgagaagaaacctcaggaaaggatatgaaaaagcaagtggccagtgtctgggatactgggccttggtaaagcagaggagggcacacccacagtcctcttattctctgttttactgcttgttttgaggttctggggtctggcaaagaggatgcagtttgacacctgcagccctttctcaatcccactaatgtcttactaatgtggaacagtccatattagctccagagagtgtcaaacccagagacatgtgtgcaaaaatgatactcttttctgcattagccccaccattktgttcaccaatgcttggaacactgcctgaaggcactcattttttaatttttattttatttttaattttttatatctttatgagacgatctcactctgtcaccaggttggagtacagtggtacaatcacaactcaccgtagcctcaaactcctgggctcaagtgattctcccacctcaggcacccaaatagctggaactacaggcatataccgccacacccagctaattttattttttgaaaagacaaggttccctatgttgcccagctggtcttaaactcctgggctccagcaattatcccagcttgggctccaaaagtgctgggattacaggcatgagtcaccatgcctggcctcattttttaaaacaaatgaataaatggacaaatgagtaaatgagaaagtctcacaccatgaaagatgctagtccaatgagctgaatacagaggtaatataaatgtcttccagctgttgcttttctgttctcaagctgcccctcctggggtaggagcataatctacatcactgggcagtcacaggacactctatagcaaggttgtagcgtcctctccagtggggggagaaaaggaactgtgcctaccaaaggtactctcttgtcagcaatttccatttctatactttatgggacactagaaactaaaagcaacaaataatctgatataagtccttgtatagtcatccttcaattcagtagcaatattttctggtcactactaacctgtattgtattaaaatgagactattggaaggaaatggtgctaaaactaataacatctcttaccaacctttacccaactcctgggttggcaaacagctgaccaaactgccatcacctcccacttggaagtgtatggccgacagcatgaaatagctgagcccagatgttccttctgcatcctccgaatcccagggctgggtgtaggtagccgttggaggccatcgctacagggcacctatctgttatcgctgctgtcctcccaacagctgtctccagttctagttccttggttttcaggcacagtgggggatgttctgcacccagtggacttcaaaagagttttgaagacttaattttttgtaaaacaagtacttgagattttggtttatccataatagaatgtatttcattagattctctgattctatataagaatgtgaaaagattgatatattgttgttagaaataatgttatttctttccaattttttttttttttttttttgagatggagtctcgctctgtcacccaggctggagtgcagtggtgtgatctcggctcactgcagcctctaactcccaggttcaagctattctcctgcctcagcctcccaagtagctggattacaggcatacaccaccacgcctggctatgttttgtatttttcgtagagatagggtttcaccatgttggccaggctggtctcaaactcctgacctcaagtgatccacccacttcagcttcccaaagcactgggattacaggtgtgagccactgtgcccggcaaatttttttacctttacagaaggttttgcttatttaattgtgagctcatttttctttgttacttttgtccccccagatttgggggacaaaataaaattaatcttttaaaatgtgtcagccatatgtatggggcttccatttggggtgaggagaaagttctggaactagatagtggtcatggttatacaacatcataaatgcaattactgccactgaattgtatgttttaaagtggttaaaatgttaagttttatgttttattacaatttttaaatgtgtcaaccaactttatagtacataaattatatctcagtaaagctgttaaataaataaatatagtaaaaattttagaactaaaaaaagtgtcaatcattgccctaagaatataaactataaaataaggtattagagggaggtcaaggaagggtaggagtgaaaacaaagtgacagtaaaagagagtattagctctctattgctgcgtaacaaattaccccaaaacttagcagcttaaaacaataaacattcataacttcacacattctatgagggtaaggacactgggagtggtttagcccagtggttctggctcagggtctctcgtgagattgttgtcaagcaggcctgtggtcatctgaagacttgagtggggctgcaggctccacttttaagctgactcactcacaaggctcttggctggaggcctcagctccttgccatgtgggcatctccacaggctgcttggatgtcctcacacatggcagttaacttcctccagagcaaataaacagggagccacagggcctttcatgacctagtctctagaggtgtacactgtcacttataccatttttctatttgttagaaatgagtcactaaggccagcccatattctaggggaggaaaatcttacttttcaaagggagtgtcagatttgtggacttatttcacaccacatcagaggaaaatggtctcgtttagcctcctggggaatagattgtcaagtccacatgcatttatcaaatgctgctgtttgaaaagagatggtagaaaaagcattcaactttgctatttagcagtagactaaccatgaacaaatcacttcatcctctctgtgcctcggtttttttcctggtaaagtgatgagttgaattagataattgctaaagtctcatatccctagtgtccagaacaatgcctggcacacagatattctataaatgttggttgattggctctcaaatgactgaaatccaatgggaggatgtgaaataatactgtgctaaaaaaaatagcctgagattttctaaactcatttcctaaatctcattttctgaaagtattctaataaaagctgctaatttttttgagtgcttactatatgccaggcattgtactagctgctttaaaaagagtatcttgtttaacataatttttttcttgcctcttttttttttttttttttttgagacaggggtcttgctctatcacccaggctggtctcaaactcctgcactcaagaaatcctcccacctcagcctcccaaagtgctgggattataggtgtgagccaccatacccagcctttaatataatttttaaataactggaagtaatgtttacattcattcaatcttaattgtaaaaggcttacttggttttcatctcttccattttttcaatagccaatctttgttcaagtgtaaaatgatttatgtcaagaaaataaccaaaatgggcttgtaaacataaacatttgtgaataaaacattttaaatgatgcagaggaattcactatttgaagaaacctttttgtaaatctttttgtaaatgcaaatttttgcttttgtatttccaaaatctaaatacattgacttcggtttcctaaattgaggttttgctgcacaggttttcctgaagaaggattcatacccatgtatcaggtgctggggaggaggtatagtgaccagagaaatgatacaaacaaaactaaaggcatggcccctgcacctaagaggcttacaacctaattctatgatataaagttcttttcagcttaagtgtttttaagaaaattggccaggtgcagtggctcacacctgtaatcccaacatttggggagtctgaggcgggaggatcgcttaagccgaggagttcaaaaccagcctgggcaacatagtgaacccccgccatctctacaaaaaaatttaagaattagctgggcatggtggtgcatgcctgtagttccagctacttgggaggctgaggtgggaggattgcctgggaggtcgaggttgcagtgagccatgatcacaccactgcaccgcagcctggataagagtgagaccctgtctcaaaaaaaattaaaataaaatgccagctgtattagtccaggttctctagagggacaagactaataggatagatggatatatgaaagggagtttattaggagaattgagtcacatgatcacaaggtaacgccccacaatagactgtctgcaagctgaggagcaaggaagccagtccgagtcccaaaacctcaaaagtagggaagccaagagcctctggcaaatcaaaggtataggtccaagagtccaaaagctgaagaacttggagtctgatgtttgagggcaggaagcatccagcacgagagaaagatggaggccagaagacacagccagtctagtccttccatgttcctctccctgcttttatcctagctgcactggcagctgattagatggtgcccacccagattgagtgtgggcctgcctctcccagtccactgactcaaatattaacctccttcggcatcaccctcacagacacatgcaggaacaatactttgcatgcttcaatccaatcaagttgatactcaatattaaccatcatactggccgatactaaatatattgaaataattattatcctttgcagtgaccacttaaactttaaatcctattttttgttcaagtagagaatagtcatactgtgtatagactggttcctgctgaaaagccctgaccatccctgctacccaggtggattcagatggtatagaagtaaccaccacgtctcttgtacctttgccctggtgccatgggagccaccgccaggatggcagaagaggagagcggcaactccctgggcctgacatcagggatttgtggccatcaggaagctggagagatgttttcattctcaaactaattcaccaaagtcaccagtcattgactgcacttcagatatttcatttaatcacctttattacttttctgacaatagagataatacatattactattacaatttttaaaaatatagaaaacataacaaaattaaacaatccgtaaaccaccacctggagacagccatcgtgaacctttacacccctgtaacaagacagtaattaagtggccccttcccaggttggttttcaaatcctactgtgccctgctgagccctcttagagattcaagatggtaggtaaatgtcagtcagtcttcaggaaatcttccttttaatctcattaatgaggtccagatgttcccaggatattgactccaaagggccgtggtttcacactcacaccccaccctgtgctcactctcctccacgggcctcaggagggggcctggacaccgaggggccagtgtgtgatcattcaggccagcaaggaagggactctgcctctagtgcagaccagagccttgcagagccagacagaggagataaacacgcacgctcctccttcctcgggaaaacaggtaaacaggatttactgggcttttatttgcattaaatgaatcgaagtttagatttgccctttatgtcaacattttataggtgaaatcattcaagctcatgctgtaacatgcactgggtgaagataaaggcacccaagcccggccagaccccagcagggggtgagggggcatttgatgagtccctgctcccaggatgctcacttgcagcggagcacaaacgtgaggcttggacaggaggagaaggacccaggacaggatgggaaagcagaggggctcaccagtcagaggaatgctgcgtgaagcccagcaaggaaacctacattgtcttaatttttgttttttgttttttgggttttttttgtttgttttgttttgttttgtttttgagacggagtcttgctctgtcgcccaggctggagtgcagtggcgcgatctctgctcactgcaagctccgcctccctggttcacgccattctcctgcctcagcctccggagtagctgggattacaggcacccgccaccacgcccggctaattttttgtatttttagtagagacggggtttcactgtgttagccaggatggtcttgatctcctgacctcgtgagccaccacgcccggcctgttttcgttttttacccacatgagagctgtgaattctttctgtataaagtatttctaaaggcaaaacctttgattagcatgtactctggatctgttagggaagcagccggtttggtttgaaaaggttatttggaccgggcgcggtggctcacaccggtagttccagcactttgggaggacgaggcgggaagatcgtttgtgcccaggagtttgagaccagcctgggcaacatggcgaaaccctatctctacaaaaaatatatgtataaaaattagccgggcgtggtggtgcatgcctgtggtcccagctatttgggagggtgaagtgggaggatcacttgagcctggaaggtcgagactgcagtgaggtgagagtacatcactgcactctgacagcctggatgacagagcaagactccatctcaaaaaaaaataagaaaaaataaaaggttacttgttggggcttcataatagggcatctggttttccttggttcttaggccagagcatgaatgaaagtgtttggctttaactcatacaggtgatggaaatatggggcccccccacatccaggactccaggacaaggataagggttcgtctcagtgggacctgcagttctatcactgaggtccacagatgctcctttcccgcccaaaaaagcagctggaacgccacaggcagccagggccggggggatgccaagcgatctcagaggttctgcagccccccagcagcccctcccagccccacctcagaccgctggggcccatgcaggccttttcgtcagtgggggtcttaccatggtgcctttccttaaattgatattctttacttattctagtactttaaaggaatgcttttttattaccatgataaaagaaatacctctatcattgataatcacaaaaatagacacagtaatatgtattgttcttaaacttgagctaggaactgtttccagcatggaaggaa

SEQ ID NO: 97183 - DNA, 12789 bp, Homo sapiens
agcatatttcttgctggtctttgaagatttttttttgtttttgtttttgttttgttttgttttgagacggagtcttgctctgttgccaggctggagtgcagtggcgcgatctcggctcacaacaacctccgcctcccaggttcaagcaattctcctgcctcagcctcccaagtagctgggactacaggcatgtgccactatgcctagctaatttttttgtatttttagtagagatggggtttcaccatgttggccaggatggtctcgatctcttgacctcgtgatctggccttccaaagtgctgggattacatgcatgagccaccgtgcctggcctgaggttattttaaagtcaggagcccttaccttggaggaaatagcctaggctgctcccggacctcggcacacactttctgccggttcagcaggtacccggtggtcaggacactggtgcccatggtagcaaacagcagagaagcattgcggccagttagcaacttagaaaagatactggccatccttcctcttggatgagtgtctggaaagcaaagaagctggattagatagcttcataggatgaccctgagccacaacataggggtcaatgggcaagagaactgcaggagccatagcctctctttccggtgtctctgtctctctctctctctttctgtgtgtgtgtgtgtgtgtgtgtgtgtgtgtgtgtgtgttttctatttcttgctttgcttttttcttcatattgcttgggaaaatctgggtagttttagacataatgtctaaactttctgaattccatgccttttctctgttaatatgctatgataaaaaataaacagcagcagggatgtcttcttccagctatttgacagaccatatgctctattgaactttgccactgcatcacaactagaccctgaacaggatggatttctggacttctgaaaggtaggagaaatttctgaggaccaccctcccactctactgaagttgggatgccagcattgggaataggggctgagactgggattcccccattgaagtaggacctttgaaagaggctgaagtggcacaaagtcagcagaccccaacttctggctcctgcctgaagcaggtctaaaagctctctgaggaaattatattcagtttaggccctggattcctacagattaagatgaaacaatgaactcccaaagatcaccaaacacacaaggaggtacaatgaatgagagtcaacagaagaaatagcagatgtagactgctaacgactgaagatgctggaactgtcagacaataatataaataagccctatattgaatgtttaaagaactaagtgtggaatcatagttatgagcaagcaacaagagactattaagaatgaccaagttgatttgtaagaaccaaattgaaccactcattatgacacagctgaacatagaataaatgaactggaagatatagcttaagaaattactcagaatgtagcacagagaaatgagaaaatggaaaatagatgtaaattaagagatatgatggatagaatgtcaagctcaaatacacatcaaattgaagtcccagaaagagagaataaacagagaagtcagatttgaagaggaatggctgagacatttttaaaactgataaaagaatccatgattcaagaggtgtaacataatctaagcaaacaaagaaattgacacctagacaaataataaaactgcagaataacagtgacaaagacgtgaagagcagtcagaaagaaaagacagtttacctacaaagaaatgacaaacgagctgattttttgataatgagcccaggtagataatatttttagaagcaataactgtcaccctagaactggggaactagtctaaccattttttcaaaaatgagagtgaaaaacattgataaaaaacagatcaataacaaaggaattactaagctatatgcttcagaaagaaaggaaatgacagcataaggagagagcctgaaatggagaaaacatgtataaatctaaataagtatttatatatttatttgtaatacaagtactgaactaccaacaaacgatgaaaaagaggataaacatgcacagacagaaaccctgttgggtctgctactgcctagagatttagaagggccaattagccccacagtatcacctagcagggagctgtgtaatgtggctctttgagtagagaacaaaagagtacgtagttctcagtactctatttgatctccataatgcccaaataaagagtgtatgggcccgggatggtggctcatgcctgtaatcccagcactgggaggcaaaggtgggcggatcacttgaggccaggagtttgagaccagcctggccaacattgttagctgtcttttagtagagacagcaaaaccctgtctctactaaaattacaaaaaattaattagctgggtgtggtggcatgcacctgtagtgtagtctcagctactcaggaggctaaggcatgagaatcacttaaacccaggaggtggaggttgtagtgagccaagattataccactgcaatccaacctgggtgacagaacaaaactgtctcaaaaaaaaaaaaaaaagagcatggatttccctcatatttggaaggctcccaagactcagctgcaagatgctccaaacttagctgaattgattgcttcaaagaacttgctgatgtgtaaggctgtagctgaaaacctgggccatccagtgaagaataaacatcaactcctaatagaaccgtcatttcgaagtctctactaaacctgaatgtcccaactaaaagcatcaaagaccttgaaaacatttgagaatgtttatgtgtgcaagtaacaaatcaagcctcttctgagtaggggttacaggatataggttacaggatagcccaggaaatcagattattagttcttcttccgtgctaatatctgcaaacaattctttcaattctaaagccagtaagttactaagagcagacaagatataaattggtcatttcttgaagttgtcctggggacttgtaaagaccaacattcattctcatcatggaaacttctttgctcccctgctagatttcaggtcatcatgtcagtatccctccaagaatagataacggctcttcagtgagctgcaccagtgcttcctggtccttgcttgcagcaggcaacgctagcatacatcctttgggccatcttatttgccatcacaccctcaaacccactttctaactagagagaggcaatgctgtcactctagaggtttactgtagaactcactaaagtgaaagaagctttgcccagattctttccaggcagtatgggcctaaacataagccagacatggtcttcctaagctaacaggaagtatgttcctttctgggattgaccagggatgacccaaatgtcttggtccctatttttcattccttaaattgcctatgcactgatatgtgcccaagtcagtgtctgagatgataaatcttaggaagcagagccaagaggaaggggagtgaatggtctccatgtatagtcctgtgaccactggaggtcttcctccctgtaagggtgatgtgtgagtgggtatctggctcagaatattaatgtttgaagtgtcatatccatattttagttcctggaaggaactaatttaattaatttataattattattttattccaagttccaatactgcccttgtgtctgagcaacaaaggatgactcatgcagataatcctggggaagctttgattgtggctagcaaagcaatcttggaactgaaattcctcagtatccttgctttgattccttgaagagaattgacacagactccaggttttggtgaagcaaagaattcctgcttccttgactctgtttttgtctcgccagaacacaaagaggcattgaatttcactattaaggccttaattagtaaccttgtttgtgaaattgaaacaaaggtctcactgaacaggctggtgctctggcaatggctgttccatgctctccaaagacccagaatcaaggcttgcaatgaaatcacttttcctcatgactaaactaaatctctcttgcatgttaaaagttagtctttaaaacgctgcgcagtcagaacattgctttgtcttacacatttccctgttacctggcaggccccaaatgttacataagcattctctgcagctgtaacccctactcagaagaggcttgatttgttatttgcacacatgataacatgtggcataagtaaagctgggaagatgtttgtttgtaaggggtaatctgtgtctatcaaagcagatagtattggttttgcctagtttccaaacatggttttataagtcagtatatcttgtgaaaccattaggacaaaagtttggaacaaaaagaaatctcaggctcattgcaaagcttttttaacgttttcagttccctccatgttctgagcattatcataacgtactgaactgttctgttcagagaccactagggagaggagatgaggaaccagagcagccaggatgtttctccctgggataaaatctcaagcattcagacaccctcactgtgggctccacttctgtagctagaggggactggaaacagcaggagcatctcacagcttgtaggaagcacacatctttttcccaaatgtttctttttgcagttggtccttgctggctgatccagcttccccgtcagcatatggtgagcagttcggtgagaggaccacacttccaatactggcaggtacgggtccacaaggacccttcttccagggaaccctggctgctagatatcacagggctgagggaagctggcttctcaacttcgctgctgcccgtgtttcttcccaccatcccctccactctaattggccctgttttccagcctcacatctgccactgtgcccgttctcacagggatcccagaaagtcttacagcccgggattggcttctagccccagcaggaagcatggaattcatccattaaggaactctttactgagtgcctactgttaggcactgtgctaggcaataatgatatgaaagtgagcaaaagaaacagttctctcctgtgggggcttctaattcatttgtggcagacagtcaagaaacaagaaaacaaaatcatcgtaggtggggatgagtgcaaagaagggaataagcaggatattattcagagaaaatgtaagtgatgtctacttttaaataggctaggcaggggcagagagtagaacagcaaagccttaaagctggacagatctggacttgtcccaggacagaaaggaggtcagtggagctgaagcacagggagcaaatcacagtggacttcggaaaggatggacgggcagggtgtaggggagccaggtgtgcaggccccgagaccaccctaaggagtctggattttatcctagtgcagaggaaatttacagatgtgcttgcaagcaggagacgtgctgagctcattttatgagttacaggggtagctctggctgccagtggagaatggtttagagggacatgtgcagaatgcaagcagagagagcagtcagaggccctagacattgtccaggtgagagataaggtgctgagacccaggtgagtcagcgaggatgagagagaatgtatttgcagtctattctggggcagtgctgacaggtcgtgctaatggtttggaaatgaaagataagggaaaaccagggatgcctgagatttctggtctacagttgggcgggtggtgaggccgttaggtgttggggcccactggtgggggagcagtttgagagcagagtgttgctggcagatgtggatgatctgtgtggtggccccgggcccctcgcaccacagctgctgggactcttcacagctctggccctgctgtgccctctgcctgatcacctgctgccccgtctcagctttcccatcccgctggctcctgggactctttcaaaggcttcataagacctatagtgaaggcctggccatcaggccccatttctgcccagcacagagactgctatgacccagtgatgacattgtgccctaagaacttccccacattctcttcaactcacagacgacctcagatgtagctgctctctcaggccttcaatgtacgtctccacccaaatgagtaatatttgcattacaaggaggaaaggagrgagggaaccatcgggtacctgctgtaccaggcacattatatgctattgtccctgttttccagatgaagccagatactcctctatgaagttaaatgactggttcagtgttaacactgctagtgagcgacagagatggaatttgaacgcacacctgtctgactccacctcgtgttccttccacatggccagcaagctctgctgtcccacctcgcacttctgggaggtggctactccctctttccacccccttttctggatcttgacaagggattctaccctgccccagctgtcaaagcctgcagcagctgccaaaaaacctcaacacaggcatactttggacctacatcatgtgttgatgtcacagatgctgtaccaggcatttgactccttgatctaaagccaggattcctagccaacatggcgaaaccctgtctctactraaaataacaaaaattagctgggcatggtgataggcacctgtaatcccagctacttgggaggctgaggcaggagaattacttgaacccaggaagcgaaggctgcagtgagcagagattgtgcctctgcactacagcctgggctatggagtaagactctgtctcaaaaaaaaaaaaaaaaaaaaaatagtgagggggatgcatgcccacacaaaggaatcctgatagaggaacaatggcttggtccgtttcccctcctgtgtagcactgtgataaaggaaagcctttcaggtatgtgcctcgatggagccagtgggtggaagaggaagggcaatgagaggtttgaggacaagctgctgataccctcatgtgtcatcacagtggtgccctttgggagcctgctttggtatactcgtccactcagggaagaggaagtctcttatccacagttttgtcttcaaaattgaaatttctttgggcagagcctaaaagagagttgcctcatttcgtgtaactgtagcatatgtagtgtagaggctccaatgtgtttttgaggcaatctgagagctctttctggaaatccctggcagatgacatctgcgtctgattttactttgtcttacaaccaggctaagacctccagcatcatcagactgtcgaactgctcaggtcaaggcagacaggtagaaaggcccacatagatagtggttactcatcccaagaacacagaggcccacaccaggaaggggcaggtgatgttaatgatgaggcaggcaattatatcttgcgatttctatgagccatgatgcattacagtaaggaactttacctcacttggcttgtgacttctgttagtgaaaagtggcctgctggcctatgctgtggaggacttgcagaaaacttcccagtcaccggcagacggttgacatctcccctggttcctccccaacccgtttagtgtgaaacgggacaaagggaaacatttcctttgatctatttttggggaaagaggcaaatgtcaactaaataagatcatattagggactgggcatggtggcttatgcctgtaatcccagcactttgggaggccaaggtgggcggatcacctgaggtcaggagttagagaccagcctagccaacatggcgaaaccctgtctctactaaaaatacaaaaaatattagccaggtgtggtagcacgcgcctgtaatcccagccactcgggaggctgaggcacgagaatcacttgaacccaggaggcggaggttgcagtgaggcgagatcacaccactgcactccagcagcctgggtgatagagacttgactcaaaaaaaaaaaaatcctattaggaatttcatgaaagctcacacagttcttgcacacatcattcaaggcctgttatgggggcccagaacatcaggacacagtagctagcctcacattcagctccattgcactagagctttgcatgatctcaatttgaaaaacacacatgtatatcctacatttgtatctctattctaatattatatactgtatatgactttttaaaatattggtttgctgtttctattttgtgctaatgcaacaaatctaatttgttttagaaacagttattactgtttcttgcttcttatcaccccctaccgtttggactctgttgtccatctttctctgcctaattggaccacagcctggtgcctcaatccccacaaaatctgttcccttctagctcaagatgactgcattctctctcagttcgcagtgtactcatgggctgctcattcatctgcccttgtgctctgtgcctttttggcatctgcgggtaaactcagtgccacatatctctattctgttcactcctaatgtttgtattgtcttcccaagggacctctcttatggccctgctgggctcctccccttacccacatgtgccaagcatagaaatcaaggcaacattctcagtccctttaagggaagttccaggtacctagctagtcctacagccagcaattagggaagttaacgaataacctgctaaacaagaagataataatttaaaagccactcaagtaagtcagagtcacaaaatgtttgattccctgtagaaactaaagatagcatcttgacctattcccttgcattgcttttcagaaaacaattcccacaccagatggaaaatgctgaccactgtcatagaactcagacagactgaaaccaaaaaatagatatggaagttccagaaattccctagctcttaactcattttggataccccctcactcctgctttaaaaacccttgcttataagccagcagggagctcaggtgttaagtgctaggtacccattcttcttgcttggcacccagcaataaacgcctttttctcactacaaatctcagcgtcaatgtttggcttttttggcatgctgggcaaccagaaccaaccccatctttgtgtgcctgcatccaattctgatgagcctatgtatgtcaggttggtcaaggccctttgtgctgaacaccaaatcaacctaattaaggttgatgacaagaaactaggggaatgagtaggcgacctctgtaaaattgacagagaggggaaaccctgtaaagtggttggttgcagttgtgtagtagttaaggactatggcaaggagtctcagcccaaggatgtcatcaaagagtacttcaaatgcaagaaatgaacaaatctttgtctcacaaaaaaaaagcccacaaacttttgaatgaaatctacttatatgatgtgacacacatttctttcagacatggattttgaaatcctatcaataaaagccaccaagtgagacactcagttctggttttgagcatgtacctgctccgtttcctggtatctgcaaattagggtggcccagtgcaggctcctgaccgtttgaccatgacaggctgtctgaaccctgggagctcatcgtgcccatcgtcagagatgtccgtatgtgacacagcagagactaccccacagataacagacgaaagccagcagagtacaaggcctaaatgtgcatgtccttctgtttccttttttttttttttaggggttctgactgagcaggcagattggaaaggaagaatcagatgaggagcaagtgctaggtgttggggaaacaatttaaatttcctcccaccccagaaattcctctccataaaatataggaaaaagaaaatattttattattgaataaacattaaactagtgatgcacatctttagcattctgctaaggagattgcaaagacagacatcccacccttttatgtgggcaagcaaataggacccattcattacatacatgttctcgaactaaagtaagaggacttgacagcaccatttgtcaagcataattcatcctaaattcacctggtgaccatttgtgttcgctaattgcctttatcaaaaggaaaaataaaactcaagtttctaggacagcaggtagttttacaacttggagccaggtgcttaaatgaaactactacccactgccctcccactgacagtgggaggtagggagctatcttccttgatgtctgtattttcaaagagatggtttccaggcccttgcaggaaaagagtcctaggttgtaaaatcgactggagccttacttagcttttaaaaagatttatatacatttcaaaggggcagcaaaatataagttttctaaaggaaatgctctaagaaaaaggaggaagctcttcccctttttgcatgggcttgtggggtaacttacattctggaattcacgaggagcaggaattggtttcctccctccacgtgctggaaggcacagtgtaagaagcttggcaaggctccagtcgggtggacaatcactgggaattccacgcatcaaagggacaagggacaatcactgggtccatcctttacttcagagggacaagacccaatgaatgtagaactgggccacagtttgtcttggttcttaagcacgctggcccacacatgataggttatcattaaatgtctgatgagtaagtgaatgaatgtcaggaacctgagaggctttagaggtcatttacctcagctgaaattcaggcatccctttccctcagccctccttaaataccagcagtcctggggatcccaccacttgccacagcaacccattttactgttggataactgtaattattataacatttttaatatctgaataaggagagaaaacaaaattcgagtgctttcaagggcagggtacttttttcaaaacaatcccaagaagtaggtatcccatgtcacagaggagggaactcaaaaacagagacattaactaacagcccaaggtcacacagctaaagggaaatcatatgtatcgagtgtctgttctgcaccaggcactcatttaaataaagatcctttcactcacaatagtttaccatacaaatattacagcatgtctagatggggtcttaaccataccaaagtactgtattgcatgcctccatctgccctgggactaggaccaggtcacacactgcaaaggatttgagtggaaacgatgaatagacccctgcacacccatgtgcatcaatggaggactgtggatgccgtgtgcccccattcctctgggccattgtcattaaccctttgtctcccaaggaatggagctgccagagagttccagctgcctcagatcctccctggtctctcaggtatgctgagtgttttcccttaagcagggtttccataggctgatgccgaggggaggctaagtatggggccaaaatgcccacagcacacaggtgtcactccaggcagcactgaggggaagcagaaccaggggatggctcttggggccttccttcgcaggaacaccactcactacaggcttccaggcggtcagcgggtcatgtgagtcaagggcaagtgggtgaatgacactgatatgtttcaggtagggagaagccatggtgggcagcattggagggaggggaaagagggggtgaggagggggtagagatatgtatttgtctacttattcatctgatgactatttacctactatgtggcagcttttccagagtccttagtctgaggaaaaaaacgctgtgtgctcgtgttattcccattttacaagtgagcagatgcagggagagaaaggcaaaataactcacccaggaccacatggtttgtgagtggcagcgctgggattctggccagcagtcatagtccacactcttaaccacggccctctgctgggcaactagaaattgtgtgtgatttgtgctctacttggggagccagagcctgttggggggtcctgggagggcatggttggctatgggacagaccattcaacgatgttgtttgaggagccttgtcaggtcttaagcataccaaagtactgtattgcatgcctccacctgccctgggactaggacaggtcacaccctgcaaaggattcgagtggaaacgatgaatagacccctgcacacccatgtgcatcagtggaggactgtggatgccacgtgcccccactcctccctccccaaagctgctttccaggcatcttccaggtggggaaatggccattcccctcagcccagagcagacttagcctgcccttgaatgctgccaaaaaaaagaaagggctaaatgtgtcccctgttctattcctagtccagattcctaagatgaggacacagcatcctgggccactgtcactaatacaaatttgcctctggagggactctacggaagataattcccctgaaatttggagagttgaattaagctaggactgattctggctggaatttgtggtggctacgtaccctagagggcctcaaggaaacccacggttcaagacagccctgacagattctggagtctagaacagaaatggatttgaacatgggcaaggccaaccacccagttcacggcctgtgtacagcaaagattacgttacagcctgagagctaagcctggaagctctttcatccatccgtttgtccatctatccatccatctgctcatccatccctccatctgctcaacaaacgttagagaatcaatccttgtgtcagatactggggctgccctcaaggagcttttatagagttcagggtacagccaggtgggggagacagatcactataaaaacctaccactataatcca

SEQ ID NO: 97184 - DNA, 12384 bp, Homo sapiens
aatgtacctttccttctgaggctaccatgttcagctgagggaggatgggaaggtggagaggatcctgggggctgagaccttttcctggctctgggtctccttatctttgctctctgcgaggtcataagccatgttcatagtgagcagaaggggattcttcttcaagccatggacccaagagcggacagcccaaggggatcttcacccctcccaacttctgggagagccgctggaacagagcgagccaaacattcacacagccatgtccagatgccctgtcctgggtccttaatgcatctccgagtccactgtatccattcgtcccttgggctcagtcacgtgcacttgggcttcctcaacagacaatagactgctggggtgggagggtgaggaggagacctggagcctccctgtgggcccgaggtccctttagccgataatagggagggattcctaaggggggtacaggatgtagcgcccagataagacttctgcggaacaataggaggaactgaagaagggagacccaccctcactgcaccccaccccccgggctttggggtcgtggactgggggaccagaggatcatggggaggggtgccgaagattcttgtgaatgggggtgggggatcatggcaaacagcaggattctggagttagaacctttatatttctttaggaaccatagggacacatgagcggggtggctgacccctttgaacttagtttgaccacatatgtgcttttgaatgcctactttgtgaacagcatttgttttttgtttgtttgttttttgttctttttgagatggagtcttgctctgtcgcccaggcttgaatgcagtggctccatctcggcttactgcaacctccacctcctgggttcaagcgattatcctgcttcagcctcctgagtagctggaattacaggcacctgccaccataaccagctaatttttgtatattttagtaaagacagggtttcaccatgttggtcaggctggtctcaaactcctgacctcaggtgatccacctgcctcggcctcaaagtgctgggattacaggcgtaagccatttcacctggcctgtgaaaagcatttgaatgtgataaatggtgcttcagtttttttggttcctaagaaaaaaatatcctgtgggttcagtatttcccctgaggccctgaactaggcccagccactcctcacagaggtgtgggtgctggttctgtcattatccctctccaatacatgtggctgcattccatgtcagtaggacatgaaactgctttttggaaccagctgtgccccatgaagatgtgggtctgggtgaggttcaggatgggcgctgaacttttttgctctggctgggagaatgtagtggctcagggaaggaccagtgacccaagaggaaccagcctctctctccgcccaaggtgccgatggggaaaggaaccgggagttaagtgaaaagtctaaggaagggtaaatagcgggtgttgagtgtcggggtgcgcttgcctttcggattctctctctctaatatctacacatttccacagccaccccagagccagcgatcagatccggccaaggatgtctgcagaaacgcctaacatagagactctccctctccaagccgcggctctcgccagacccgagaaggtcctcaagcgagggtgacctcagggccggattggaccctgcttcgtgggaggcgggactcagggcttagcgggcggaggagtatttaagaccgggcggagttggaggtggccaagggcagaatgagcgggattcagggcaccaggacctacccaggcgcgggggacacctctgaccttaagtaccccttggcgaccaggctcagggaagctctcaccgaggctcggttccatcagctcttcaggggcgaagagcaggaaccggagctacctgaagagcgcggctttccccggctcttcgggctgtggaggctgcgggctcgcgcttgttccgggacaggggcgtggcgcctgctgctggctcggctgcccgcgctgcactggctgccccattaccgctggcgggcctggctgctcggagatgcggtggccggagtgaccgtgggcatcgtgcacgtgccccagggtgagaggccctaacagcagcctgtcgggagcacaagctctagagggcttccgggaggaggcttagggagctgggaatccgggagcagatggtgggttcctaccgtcgagggtgggagagagggatctgaggccaagtttgaggtaaggactgtggagctccatcagatccccatccccacctcccctcatctgcgcaatcctgcgagaagccttagacaggttctggctcagagaaccggagagaggcacaacgcctggcccccaggacttggccacagcgtccctgaccttgtctgctccatgacctctcactgaggcccattaacccctcagttccctgatgaggcttgatttagcatccttgatgtcagctcctaagagtctgggaagtgcatttaagtcctggaggttggacaaggccccctccccacagcacacctttccatccacttctatcccaggcatggcttttgctctcctggcctccgtgcccccggtgtttggactctacacttctttcttccccgtcctcatctacagcttgctaggtactgggagacacctgtccacaggtgagtgaccagggacttccaatgactcttcttccctatgggatgaaaatggacaggggctgttatttcccttcttcctaatttccctcttcacctctcctaccttcacctccctccttgcccaaccctgccaggaaactgacctaggcaatgcttgctagagtgggtgcaaagaggtgggagtttacctgaacttttttcccctatgaaatttggttaaaatgaacatctcagggacttggaaggggaagaataggtgcatggtcccccaaaggggcacgcagtaggcagagaatctgcaggagggagcagtttttgccggctagcgcagctcttcgcgccccacagtcttgacggggcagcagccttcttggagagccgagtctggcagcaggatctcggacccaaggcatggaccctgagctgctgccctgcccagggctgcacagctggtgatgtctgcatttgtcccccggcggcaggaactttcgccatactcagcctcatgacaggctcggccgtcgagcggctggtgccggaacccctcgtggggaatctgagcggaatcgagaaggagcagctggacgctcaacgggttggggtagccgcggccgtggccttcgggagcggggcgttgatggtgagggaggacccggggaggaacccggggggatccctgctgaggggccagggaaattgggccggggaagagggagggaccagctttcggcttgggttcgggagggcggaggtgcgcggggttggtttgctcctcctctagatggtgacagcgcgtcttctcccccacagctggggatgttcgtgctgcagctcggcgtcttgtccacctttttgtccgagcctgtggtcaaggcgctgaccagcggggccgcgctgcacgtgctcttgtcccagctgccgagcctcttggggttgtccctcccgcgccagatcggctgcttctctctcttcaaggtgggggtggaagaagaaaggagaaggggcttctagaggtcccgtgaatagggaaactcgaaaagggaggaaggacggagggtggaggggtagtatgtgacaagggagcaggaaaggaggttggagccacgtggctgaacgagggcgctgaggaggtgtaagccctggtggcactgggtagagagggcctcgctctgggggtcccgcgccggggcgcatgagccctggcacggggccctctgctcatcgcccctgccctcagacgctggcctccttgctgactgcgctgcctcggagcagtccggccgaactgaccatctccgcgctcagcctggcgctgctcgtgccggtcaaggaattgaacgtgagattccgagaccggctacccacgccgatcccgggggaagtcgtcttggtgaggatggccgtgcgcgccggccccctgcccgcgcagaccctgcggtcctgtgggaactggccgctgccgccccctggtggagtgcagagaggccacggaacagagggccggctcacactttccttggcctcctgcagaaggacgctttgaccttccacagcccccctcgacactgtcccacgtctctcacggagcaccccctagacctcttggagtttcctctgccatcctacagcgctcccttgaggtcttgctggtcacagcaccttctctgacatctgtcctcaccagggtccttccctgtaattcacagtgcatctccctctccaccctccaccgacatttctctctctccccaactaaataaacgttccgcgtctccacagatgccagtatatcactagatatcgtccagcttccctctttggaaggctcagtggcatctcttcatatccaccatccttcacagaagcgtcctcttacttccacggctccaggctctgtggcctcaggcatatgtcatccctctttcccagctctacactacaaatcagttgtcaggccctcatcccaaacacatccccgctcccccaggtgctgggctcctgcagccagctaggcctgcattatggtcctctctcatggtcagccccttctagcttctgccagggaccccatctcttcccatgccttcattttgctctctttttcaggtgcttctggcctccgtgctctgcttcacctcttctgtggacacaagataccaagtccagatagtggggctgttgcctggagggtaagagaatgaaaagatgccagctttctcttctcccacctctcccacccaacactccctcttatctccaccccccattttctctgccttccttatctcactgaagcacctaacccctcctcaccatggatccctccctctccagatttccccaacccctcctccccaacctggctgagctgcccaggattctggctgactcgctgcccattgcactggttagttttgcggtgtctgcctccctggcctccatccatgcagacaagtatagctacactattgactccaaccaggtgggactctgactgtggaccccaaccctctcatttgacttcccaccatgcctttgtctctcccacttcatctcactgtatccctccaggagttcctggcacatggtgcctccaacctcatctcctccctcttctcttgctttcccaactcggctacgctggccaccaccaatctactggtggatgctggtgggaaaacacaggtaagagggcatccttggatgaggagaaaggatgggccatccaggcaaggtggcggtggtggagaaacaggtggaagatggctagaatcccaggtggcacctatatagagaagactggggatctgtgagaaagggtgactgaggggatggaattatagataggagagatggaagataacaatgttccagtaagacctttgtaggctctaagcgctgaaaaagtttatggtgccccaggtgtggttcaaaataaaaacacaaaactataaaataaacttaagagataaaattcttatttttttcacacaatgacattgtcttttaaaaggaatatcacatatcaaagtctccccctaatatttttggtttcccttactttgctggtgccctaaacacatataccctgcttatagggtaacccaacagtggcttttaaggtggaggtgggctacaaaactggggaacttgaacaatggacatctacaaggagactggtgaataatgggcatttaattaattggggggagcgggagggttagatgtgaatggcagaatattaagaagggggttgtgtggaaggagatttgggagaagggagacttccgaggaagattaggcagagtgggcaggaagaccagctctcatgtgggggtgggaggctctcttccttttttgctcctgttcctccttttctctagctggcaggcctcttctcctgcacagtggtcctgtcggtgctgctgtggctggggcccttcttttactatctgcccaaggtaakgagcagaggaggcatgagcatggctgggaggggtagctgtattccaggacatcgaggtagtcagcccacctcctctgcctcaaggctgtcctggcttgcatcaacatctccagcatgcgccaggtgttctgccagatgcaggaacttccacaactatggcacatcagccgagtggactttgtgagaaatgccattacccccagattgccccctctcatcttgttagcatccccagcctctgccctgaaccaaacctaattgtcctggtcttaagttctgcaacccacccactcccccagcaaacataactcctagtatgctttactcacaggcaagggaaaggatggggtttgaacccctttggcctgaatatttgtaacttcccaactggtgcgggtcattacatttggtgtgtgtcccattgaatcaaccctgttgtttccttctgtcatgctttccacttcttcctggatcatctctccccatcacttgccttggtagtcactgccctggatctctttacccagcagtgatggcctggcttttcttttgggcaatccacccctatccctatcctgcaggctgtgtggatggtcacctgggtggcagtagtgaccctgagtgtggatttgggcctggctgtgggtgtggtcttctccatgatgactgtggtctgccgcacccggaggtgggcatagagatgagtggagttgaggtcggggcaggggaagagaatgaggtgcttggggtgactctccagccaggccaggctaagctggaaatctggccccaccttcttccctagggtgtagtgcctggcacttggacaggctgaggggacagagctctacagaccactcagaggaagccccagggtgggtgggctgcagccaaagaaggaagggaagattagccccagacatttctctgatcctttgacctcttagctcctccaggtcccggggctctgcatcctgagctatccaacaccactgtactttgggacccgtgggcagtttcgctgcaacctggagtggcacctggggctcggagaaggagaaaaggtgaaggagcttggtttaggagggatgtggatcctcagggagtgggaggcaggtgggtgttctgagggggatccttgtgctcaaggggtgcatgttcatgctgtgtttcgggagtggtgactgcccttctttacttataggagacttcaaagccagatggcccaatggttgcaggtgagatggggtgacaagaaggaagatttgggcatgttgcatggtgacacctgggtactcctgtcttctcccattctagttgctgagcctgtcagggtggtggtcctagacttcagtggtgtcacctttgcagatgctgctggggccagagaagtggtgcaggtgagggagagggtaggttgaggagaaaccccttagcatctcactcataccctctgatctgggacttaacccctttgccccatccctgcagctggccagccgatgtcgagatgctaggatccgcctcctcctggctcagtgtaatggtgagatgtgtggagaagagcggggcccagtgcctgggcaatgactggacacctgcggtagggaaaaggacccggtgtggacttagggtctcagagtctgacaccctccccacatagccttggtgcaggggacactgacccgggtaggactcctggacagggtgactccagatcagctgtttgtgagtgtgcaggatgcagctgcttatgccctggggagcctggtaaggggcagtagcaccaggagcgggagccaggaggcactgggctgcggcaagtgaggcaggggtaagtggctggagacccagggagaggggtttgggaaagggtctgaggaagatcaagaagaaaagggtggggacggaatgaatagtagattgaagaccaaatcagggagcccgggctgagctatgggtgaggaactgaagaactcagatccctaagtaggtggggtacccctgagaggactgccacatttcattaaggaagaggggtgcctaatctattcctgacatgtctcctctcttctccaggagctcactgacccaaagatttgcaccgtgtgggtctgacctcatcatgtggagtgcagagggccctgatgacatgtgtgtgatgaggaccatgacccttgaacccccttacctaacgtaactaataaaatgaagctgagagctttggaatccatgaagtgagtctaggtgtttgcacagggactctggtgccccttcttttgtgcccacagcattgcagagacacaactaagaatggctttcaccaaccaccagccctcaccccagccccagagccacaagttctctctgtgggggtggggctggagcaggtacacagagtactggatctgaagatgcagatgaggggcacagtcttgggattatgtgttggggaacttccccaccccctcggtcccaagatgagaggacagtgtttccaccttaggttcttagagtccctctgggctctttggcacttggaaagtgatccccccatttcctgccccatgagaatgggcagggggaggacttggcactggctgtgggagaggttatggctccaccaggcctctgggcactggaaaaaggaggggtgtcaccaggacaacccctactgggcatcaggttctgaaaaggaagagtgaggaactagaggctcagggacagccagtagagtgctcacagggtggtggggtttgttggaaattcctggcagggacaaggaggcaggcccagcctgacagtcagaaatccccagcgggccatcactgggaggtcatgcactgcagccggtgtttgaagaagagcagccggtgtttggccatctggctctcgtccagtgatcctgggtaacggtaccgggcgtaagtctctgctccggcatcccttgatgtccaaggcagcttcagtttggatgcatgatccaccacgacgtcggagcaggagccaacccgaagggaaccaagcccatccaagaagaattctgggggtggaggggagtacacagtgagggatcctgagggtgcagaaggccgactggtaagggagaactctcaaatttagggtgtggaaagtgtgtgtgcaaaggcttgtttctaaggaccctgagcatgtaaatcaactccctgggtctcagtcttactcttgtgtaaatggagtcaatatacttgtgctttgaaaatcgaaaaacctacccctactcccagaggttaaataaacgccagatgggttgcaccgactgtggtctgaactaggggaagccctgggagtagagcaggggtggcgggaacagtgatggggaagcttatgggggcccagcggctgtgctgggaatggagattcaacatggcacatgtatacacatgtaacaaacctgcacgttgtgcacatgtaccctagaacttaaagtataacaaaaaatatatatatttataaaaaaaaaaaaagagtatgcggggctgggagagggtgggagctgtctctcgcccaggtgcaggtcttggtaaatcactgcagaactgttctggggttcccgctggcggctgggcgcgggtgcagcctaggaggagaggcgcgtgaccgtgcgccagctccccgtggggctcctgccagggtcgaccgggagggggtgccactcacccagatgagccacgcggctgaggcgggggtcgaaaccgacctcgcgcaccttgtcagtccgcgccaggaagaagttaaccacgccgtcggtgaccacgcagcctgggaagccgacgagctcgtggtggaagccgcgcctttgccggaggcagttcccgaggcctggggcgccgggctccacgctcagcagctgccgataagtggtggcaaagccggagatctcgcgcaccgcgccccccacctgcagggagagggaggttgcctccaggcgggcctgggataggggacccgaaggggtcaaggtctgcgctccggtgccttcgggggtacccctgccccatcctcttccgcttcacccctgcaggacccagacagttcccaggccccacttcgtggttctctctttgtcctagggctggccgttcctggccgcagcgcccccgctgtggccttagcctgttcaaggcccttctccacccccacatcctgcagcccctgccctaccaggtccagcggcgtccgctccagcacgtccacaagcctctccagccgcgtccgcgccgtgaagacgaagtcgtcgtccacccacagcacgtacttggtggttacttgagacacggccaggttccggcctgcgaaccagccctggcagaaaggtgtgtgtggttggggaggctgcagaaataggacatggccctctgccacctttctttctctcccccgacccttctcagcttgtattcttctccagacttttgagtgctttcgaaaggccaggagctaggtaaaagaaatgcagatccccacagaggttccaagtcagtggtcttagaatgcgtttaatttccgtgtgcatttatttattcattcatcagctattttattgaatgccattaggcactaagcaccattctaagaattcagagagaatttcctgctcccacgaagcttacattccaggaatcctcatgcttaacaggcaccccatgattctgaggcaggtggtcctcgaatcactaccctggaggctgcagattgagggcacaccccctgcgggagtcctctggcctgccgttcagcctgctagctgcacaccttgccgaagggcatgagatagtgttccacgtaggggccactaacgcgctctggcttgtcgctgtcgtcagcgatgaccacggtaaccgttgggtagaagcggcggatactggtgatgagagcccgtagccgatcataacggaggaaggtcttggtggcaatcgtgactagagcgctgatgttgtactgggctgagattgggggcacagggttgggtgcagacaaggagggttgggagaggggaacaggtagatatcccctcccaggactgccctctcccaacttgctccccaccaaggctggttctaatatgtccctgcccctaccagcctcacctccctggggtagagacccaggtgggtacagccgagggttgggcgggtgtcttatgcggatagtgaaagcagcctcatgtccctcggtggagaaccggactgggaagaaaggacatggcatttgaccctgaagggtgggataacattctgttttcagccaatcaatatttaagtgcctactctgtgtcccacctttctaggccttggtggacaagaacagaaggttcttacctttatggaacttacattctaatgggtaggagaaaaaacaacaaagaaaattttaagtaaaagctaatctttattgagcacttactatgtgccagacccgttaaaaaattaccttaaatatatgcactcattttatccccatgatagccctattaagtagattcctacaacagaaaaaaaagctgagacacagaaaagtaacttgccacatttacacaactattaagcaacaaaactgatagcaacctagtcagtctggtgccaggctaagtaaattaaaaaattcagatactggtaagtattgagtggaaaataagacaaacaagtaatgtgatagtgaagaggaggcatttgaactgagatctaaatgacaagaagaagccagtctgcaaaaatctggggaagagcattccaggctgagaaaatagaaagtgcaaaggccctaaggtggaagcaaacttagtgcaacaaaccagctttggggagaagcaaagagggcttttaggcctcttttgctggaagagaaatgggatctcaggaaagtaaagacctttgccctctagtaaggggtgggttgggaatatagtcttctaactccttagacaagtctcttcctggggccccccacagttggcctaaaggggagacacacccaaggctcgggtttccctctggcctgctccagccccagatgaacaaaggccccctttctccctctggccctgctggtccagttgaagcacccattgtgtggctggacagctctggccatagcccagatgcctcccatgccctctgccatttgcccactccagcctttctggttcttctctgtttgcccagcctgcccgtctctcca

SEQ ID NO: 97185 - DNA, 14220 bp, Homo sapiens
cctctgttcccacagaacctctggagtactacacttcccagatgcccctcccagccacatacctttggcgccacccctgcctggggtcttggaatctgaagggctccgcccccaggtgagaatgttcccctctgagtctccagtgagaatgtctccatccggaaggaacacaaagcaagggataaacttgggtttcttgtatttctagtgggaggggagagcagacagtagaggtcaaagggaagggcaaagattaaaagtcgcagggcaggccaggtgcagtggctcatgcctgtaatcccagcactttgggaggccaaggcgggcgggtcacctgaggccaggagtttgtgaccagcctggccaatatggtgaaatcccgcactgcactccagcctgggtgatagagcaaggcactgtctcaaaaacaaaaaaaacaaaaaaaaaacgggcatgatggccaacatgatgaaaccgtatctctattaaaaatacaaaaatcagccggcgcgcatctgtaatcccagctactccgggaggctgaggcaggagaattgctcgaacccaggaggcagacgttgcagtgagccgagatcttgccattgcactctggcctgggtgacaagagcaagactccgtctcaaaagaaaaaaaaaaaaaggtcacaggggcaggtgggggttagggaacctcagggtccatagtactcagcccagtgcttcctcttccactctgccctccccatcaccttccacttatccatgcctcaccccaaagacaccctgtttccgggtaagggtcccattcccaggaacccctactccaccactccaattccagaagtggacgtgagatttcccactggtgacgatgcagctgctgtcacgagggttgaagccaacggccaggactgagtcatttgtactctgaagggaagacactagattcagccaccccaagccctgggtaccttcattctacttgactctcctcaatttgcatcatgacagctggctggcagaggtccagaaaccccaggacaacccttctttcaaaaccctggtcccctaagagcactatttcctgtcaatcataattaatcaccctaatacctaacacattatgcctcatgaggtcagaacccatgtcacaaatgaagaaactaagggtcagagaagctaggagatttgccccatgtgacccagccaaaaaggaaggaaatgtatgggtgagtctggagctccctgcactccaccactcccacccccaacctcagagcccctccaagccacatggactcctcaccttgatctcagccagcttcattccccggctgcagtcccacaccgacagcatgtgctcattggaatcatccaccacacaaagaaaggcaccctgatcctgaagaagggtgacacataggaggtgcagagtgaaccctggaggtccaggggttcatggtcattaggttaagaggtaccatcacagatggagagggcagaaaaagttgacacacatggccctttctcaagagaaccagctgggtggggttcaggaaggccagaacttccaaggcttcctggtgacatgcaagagtggggttcctaggcaagaatgggggtctagaggcttcagggccagctcaccgcagctgaaaaggccagggccccaacaccccgctcgaaggcccccagtccaatctcctgcagtttcaacagcgtctctgagtcccagatgtgaaccacaggctgcaggggctggtggaggaagagtcacaagtgtgaagcaaaattggagtgcaattccagcatgtctgcctgctccctgactttggccttacctttccatccttatccactccagctgtctgtcccgaggctacccgaacaccatcagggtgaacagcaaggctaaggcagggggaagacactctagggaaagggtctctcaagaccatccaagacaccttctccaagcttgcagagcagcaaggcaactcttttctcctgcttctccatccccccagaccctcttcctgccaagcccaccagccccggactcctcaccatcgaacgcagtctgtgtgcccccggtaatgtctctggccgccacctccaggaccccctgggcctcctccaggccggtacagcaccaccacacaggcgataaagtagaccacctccccagagcgcaacacaaacagattagagcgggagtcacgacccctgtacccataactggggtggagatcacggtcaaggaaagggttagatcaagggcaggaggaggaagaggggagaaagacagagcttctggctggcagggcctagagcagaatgatggtaggagaggatctagaaggctccttgtccccacagacccaggaggaaactgtaaaggtaagaggggtcccaaggtgagaaaggtggttctcatgggactggaaggggcaggatacacccagtcaaggctgagggtctctggcggtgggccactcggcagctcctcaaggctgcggatgccagacgggatgtacatggtaatggggcgccctcgaaggaacatcttcactgagatgccttctacagagaaaaggggtggtgtcaactacccccttccaggaaagacagagcagaaccctacccaccacacctacccaaaatagctcctggggctacagcccaaatcctaaccctgccatccaagttttcctctctgtccctctttacatacccaaattgtaattgctcctccgagatccagggcccccagggctggagagggggtcttttcccccacggctgttgggaagagagaaagcacagggattggggtcaggtcccaagacctaagcggggaggggcaggacacaagaaaagaggtcactgcagaaaccacagtcacttctgcaagcctgtagtttgcttcgtgagtatcagggccctagtagatggagacttctagttccatttaagagataagaagattgaggctgaaggggctgagcgcacagcacaaggccacaaagcttggaagaggcagtgcagggtgccagagccctttctctcctccagaccaccaggcctcagtctcgctctgtcgcccaggctggagtgcagtggtgcgacctcagctcactgcaacctccgcctcctgggttcaagcaattctcctgccttagcctccccagtagctgggattacacgtgcgcgccactaggccccgctattgaccttttcatttccccatccgtaaaatgggaccaaagggagtcgagaatgtacaccagctccgcctctcagggatccgggaggcaagcaagaaagtccacatctctccagagattcctgtcgttagataacagtaaagtgatactgtctcttcagagaataaagcacaggccaaggacagggctagaatgaacatccgggtgtcctggggcccgtacatactctgaggcaactacatccggccactaggatgtcctcttgccctctagaagtaagtattaatagattggtacttggtagatccagcggaaagagggctgaagctctagggacagccgtccatgaaagccatggaagcttctagaaaagcctcttgggatcgcagaaggtgtgctgtgatgtagtggaaagggtaggggaactggagtcaggaagagttaggttcaaatcctgactctagctgtgtgaccccaggcaaatgacttaccctctctgagcctgcttcctcacctgtgcaatgagcagcatgagaccacctaacccccaaggatgttgtggggactgactgagatggaggaggtcgagggtttagcacagtgcccggtacacagcaggcgccccagaagtgtttgtttctttattcctgttgggcaatcaggtccccccaccccaaccagggatgtgaggtgagggatatggaaagtcgagagcctgcgcctggggcggggtgggttgaggggaagcctcacccacctctctgtgctcccggaccgcactaacaggttggcggaggagattgccttcctggagagcttctgccgaggccgctctgagggggatgaggaggaggaagaatttcttcgcggcctggtgggggcatagtgaaggtcattccctccaactgtactctgcaatcctaccacccctcccagcttccgccacagggccacaggacacctacgtgtcagcacgctgtgggggctgcaagggcctgaggatccccggggggccaggggagccagcaccactgctgctgctgccccctccttcagattgggtcccgctaggctcttcgctggccccctgaggggctgggggtccattgctcaggccagggggtccaggggatgacttgagctccacctctgtctccgtctgggtgcctcggctcaccaaggaaggggtgcacgtgggtggcagtcctgggggggctgcaagactgctggagagatgttgaattaacctgaagccccagaggccccaaggaggaggaaaaatggggtgtgatgacatgcatacctgtcccccggaggagctggtgtgccagagccctgcagggaggaagggggcacctgcagccgcagcaggcgaagggcttctgccagggctgcctttaccagttccatctcctgctcctgcacccgaagccgctggctcagagactggagggcctcccgagcagggccgtcacctgggaaaagggcaagaggtactcagaatgtacccatcacctgaagaaagcgtagaggggattctgtctccccacaactttacatgtgtccggtaggactgcccctttcaggcagccccaggcttgaatgctcgtccagaggggaggagacggtggtaaaggatcaagggcctccttctggcagggcaggcgagaaacctggcaaagctcccttcctgctgccgtctcagcctccgcaaagactgggagtaccatggagtaccgggggggaaatatggagtactgccgaggaacgtgggagccacagagagaggcgccgcactggtgagggcagggaccgcagccctccccacgcgcccccagcaagctcaggtctccagcgaaagctgagtaactgagccgggggaacaccaggagagagaacggggtgcgggaatggagtcatactgaggacccagagtacaagaaaagagatccagagtgacaggagagagtgtgagtggtgagcagagtcacagtgaaggtctcagggggcagtggggatcagaaggaaaaagacctgaaataccacgagaagaggcccggagtaacgcagggggcagggaaacatcgaggggcccggagttacgtggggcgtagaatgacgctggggaagcccgaagtgacagcaagacccaagcaactagggagggcgaccggaggaactgtggaggatgctcggagcccctggggcggaggagcacgcggggacgcctccagacagccgtccagctctggcataacccgacgagccgggcgctccgggaaggggcacgccgcccgccccgccccgtactcaccgggccccgcggccccgtccatccggcccccgggttgctccgagcggcggcggcggaggaggcgtctaagccgcgggggccacggccggggagaggggaaggggaagcaccccggggcgcgcgcgaagggcgccgtaccaccaccccgagggggcgctgtcgggcgcggggaaggggcctggagggggcgctgtgggcccggggccgcagtgtccagacccccccgggccctcggactctcccggggccgctctcggctcccgggggtggggtggcagggccgtccggtgccacagcgccgcagcacaaacaggcgccggacgcggagccgccaggaagcgcgggagggggggcgggcccgagggggggccgggccgcttggtaacccctccctgtccgggcctcgccgctcagtacgggggcgggctagccggctgaccccctggcctactcccggcctccggctccaggcccttcccggatccccgcccccggattcccaggggacggggaagggagcgcccgccccgatatctccgccccccagcccctaacccctcagggttgagcggaccaaccccaccacttccgcgaggggcaggggcggggtcacaaaacgggccctcggcctaggggcggagtttctcgtaaggggcaaggccaaggcatcttgtattggggctgacaggggggcgggttattagggctgaggatgggaggatgctcagggtattggggtcagggtggcattagcccagctcaagccgggccgggctgactcagcatcctgccccagccagcttccatccctgacacctctgcaytcccttgggcagagatgggagatggcgccggtgttgcccctggtgctgcccctgcagccccgcatccgcctggcacaagggctctggctcctctcctggctgctggcgctggctggtggcgtcatcctcctctgtagtgggcacctcctggtccagctaaggcaccttggcaccttcctggctccctcctgtcagttcmctgtcctgccccaggctgccctggcagcgggcgcggtggctctggrcacaggactagtgggtgtaggagccagccgggcaagtctgaatgcagctctataccctccctggcgaggggtcctgggcccgctgctggtggctggcayggctggtgggggggrgctcctggtcgtcgscctcgggctagccctggctttgcctgggagtctggatgaggcgctggaggagggcctggtgactgccttggctcactacaaggacacagaggtgcctgggcactgtcaggccaaaaggctggtggatgagctgcaactgaggtaccactgctgcgggcgccacgggtacaaggattggtttggggtccagtgggtcagcagccgttacctggatcccggtgaccgggatgtggctgagtgagtgatttgcgtctcccttcctcctcctcctcctccctggacaggctccctcctgctgccttgaatccccacctcgctcagaggggcaataagtagaacatagtggctgagagactggttacagctctgccatttattagctgtgaaacccagggcatgttaccaaaccaccctgggcccattccttcacctgtaaaatggaaataatagtacttatctgatagagttgttgtgaagatgtgaattatgcttggctggcacatagtacagcagtcagtaaatgttttactattctttttcccttctgaacacctgtgcccttcagtccctcccccaggcctctatctccagacatcctaacccctctgtccctccctttgcagccggatccagagcaatgtagaaggcctatacctgactgatggggtccctttctcctgttgcaacccccactcaccccgsccttgcctgcaaaaccgtctttcagactcctacgcccaccccctgttcgatccccracaacccaaccaaaacctctgggcccaagggtrccatgaggtgctgctggagcacttgcaggacttggcaggcacactgggtagcatgctggctgtcaccttcctactgcaggtgagtcagcaaagcatctgacacctcctcccacccgggactcctccctgcctccaaccctgggcctcttggaaccgctgactctccctgactctttccccttgcttcccccacaggctctggtgctccttggcctgcggtacctgcaaacagcactggaggggcttggaggggtcattgatgcgggaggagagacccagggctatctctttcccagtgggctgaaagatatgctgaaaacagcatggctacagggaggggttgcctgcaggccagcacctgaggaggccccaccaggagaagcacctcccaaggaggatctatctgaggcctagaggcctggagcttggggtgaggaagagggagggatggacaagtctgaaaacctcacaactccttaccaaggctccaggttggggggatcgtaggattagaggggctaaggatagtcagcgagctggactggggtaagaaagaaaaccagatgtcctagggcctagcccttgtagtcagaaccaccagggaacagcaaagaacagagtgatgggaaagtgacatgagaaggcctggaggctgattctgatatagactcaataaagtttttggatggaagcaattgctttttcttgtcaaggggatgggggcctgggagaactgatttctgtctgatggagcagctaggactccaaagtttggaccctggctcgacctgtgcagcaacaggagcccacatctgtaaggatcagaaagcaagaacccaatgtaagaagcaaaggaaaacaagaggcccctccaggttgagattctttattctggaggtaggaagggggtcagcatgctcaggtgggaagggtccagcccagctcctccagccccccagtgcatgcccagccccaataagttacccagttactcagctgccctccctcctgggtccatctgtccttctgttccaccctagacagggccaacctgactcaacacaagggctgcttgtccccagcctgtgggcagtgccacacggcaggctaggggaggggtgaagcagcaggaccatgccctgggcctggaggggcagaggggccacttctggctccaagggtcaggacttggaaaaccacatcctgggcaggcctggggcccagtcccacaaggtctgtgcctgaaaagaggtggtagttggggtggggccgccatcacacctcaattgctgggtctgagccccggccctgccgctgcagctgctcctcctgcttcatcttgggcttctctgtccgagtatgccacaccagtacctgtgccaggagggatgcagtgagagccaggcccagctgcagccaggcctctgggtccccgagcctggaatggattctctaaccctatcgacatatacagtataggcttcaaagtgtaaagggcagggtggaggaagacttagtgcctctaaaaccgggccttggccgggcgcgtggctcacgcctgtaaccccagcactttgggaggccgaggaaggcggatcacgaggtcaggagattgagaccatcctggctaacaccgtgaaaccccgtcactactaaaaacacaaaaaaattagccgggcgtggtagcgggtgcctgtagtcccagctacttgggaggctgaggcaggagaatggtgtgaacccgggaggcggagcttgcgctaagccaagattgcgctactgcactccagcctgggtgacacagcgagactctgtctgaaaaaaaaaaaaaaacaacaaacagggccttattccttcatcctctctgtgccacatgggttcccagaactcggggcagagtggcaggagaccactttcccccgctagttcccagcttccccttcagtagagtcagcaaggctgatcagagatctggagagtccctcctggttaaaccacccattcccagggtctcactgtacctcccccatcacctgtccatccaagagccaggtttctatgcccatctccattcccttacccgagtgcagttggcagcccgtggctccaggtccttgggatccacaaggtggctcagaagactgctctccaggtggccccggggagcggtggaatcaaattgggcattgggcttatctaacagcaagggcagggccacggcaaatccagccatatccacagggaagggcctgctgggctcccatgctgtgtggaagcccactacccggccgtcctgtacctgagggccctcgaatcgcaggccgcccaccagccccacaggccacactgagacaccacgggtccagcgcatctaacggaggtcgggagagaagaaacagaggggtggtccggggaagggagcagcagaaagagccacctggctcactctgccccactgcttccagcccctcacccagcagccaacggcaacactgctaaccaaggtaacgaatgaagctggccgcacctggtctcttgcccatccccatcctggtgctcacctcctcaaacagctcccggctgtaggtgttgtcatcgtcagcaaagtagacgactccttgggtccctggtggtggtgggtccttctccccacccacagcaccccctctgccccggagccagtccagggccttgttccgctgctcgacaccacggggatgaacccagccaggctcgccctcccgaagccgctgggctttgggcgtgaggaccaccaggtgtgtgaagaggaggccagaggcagccagcagccctgagaccagcggggtgggaccctcagcatcctccaccagcagccaatgcagccggggcaccaggctcagtgtctgggacagtcgtaccagctctgccttctgtaccagcctgcaggggagagatgcagcacaaggaaaaggggcaggcaccatttgcctgctccagccagggcagacagcttctcctgggccactgcctgcgtctcctgtggcccttcccaaccaatgcctaaactccctctttcttgcctgtcaacttcatgctaacactcacctgccctgttcttctggtccatgtccatcacccacctcaactccagagctcaggctgtgggagactataaattaagggcacagggccgggcatggtggctcacacctataataacactttgggaggctgaggcaggtgaattacctgaggtctggagttccagaccagcctggccaatatggtgaaaccccatctctactaaaaaaatacaaaaatttgctgggtgtagtggcacatgcctgtaatctcagctacttgggaggctgaggcaggagaatcgcttgaacctggaaggaggaggttggagtgagctgagatcgcaccatttcactccagcctcagtgataacagcaaaactccatctcaaaaaaaaaaaaaaaaggccgggcatgttggctcacgcctataatcccagcactttaggaggccgaggtgggcggatcacctgaggttaggagttcgagaccagcctgcccaacatggcgaagccccgtctctattaaaaatacaaaaaattacccaggcatggtggcagtcacctgtaatcctagctactcgggaggctgaggcagaagaatcgcttgaacccgggaggcgaaggttgcagtgagccgagattgtgccactgcactccagcctgagcgacaagagcgaaactctgtctcaaaaaaaaaaaaaaaaaaaaaaaaaaacaaattaagggcacaggctttgggatcaggtagatctgggtttgaaatccagttttgtaacttattatgtgagacaatttgggaaaatggctcaatctccctaagcctcagtttcctcaactgtaaaatgggaataacagtactttataacaatgttgttttaaagattaaataagagctggggatggtggctcacacctgtaatcccagcactttgggaagctgaggcaggtggatcatgaggtcaggagatcgagaccatcctggctaacacggtgaaaccccatctctactaaaaatataaaaaattagctgggtgtggtggcgggcacctgtagtcccagctacttgggaggctgaggcaggagaatggcgtgaacccgggaggcagagcttgcagtgagccaagatcacgccattgcacccagcctagatgacagagcgagactccatctcaaaaaaaaaaaaaatacaaaagtaaaatacaaaaaattactggccaggcatggtggctcacacctgtaatcccagcactttgagaggccgaagcaggtggaacacgaagtcaggagttccagaccagcctggccaacatggtgaaaccccatctctactaaagatacaaaaaattagccgggtgtggtggcgcatgcttgtaaccccagctactcggggggctgaggcaggagaattgcttcaatccgggaggtggaggttgcagtgagccgagatcgtgccattgcactccagcctgggcgacagagtgagactccatctcgggaaaaaaaaaaaaaaaattagcctggtgtggtggtgcacgcctgtaatcccagctactcgggaggctgaggcaggagaatcgcttgaacccgggaggtggaggttgcagtgagccaagatcacaccactgcactccagcctgggcaacagagcaagactccatctcggtgttgcggggaggcggggggaagaaaaaaaaaaaaggaacaaaccaggaatgtggaacgtggggcttggcctcttctgtacttctttatccttcagatctacctgcctgtcccagggctggttgtgtgtgcatgtcgcaggtggggtctagagcttcctatgcgtgaatgggacagccatctgattcccagaagatgtattaacacccttatggctacagatccaaaaccacattccccaattggttttattagtaaaaccaattacatttgatttaaaacaaaagcaaatgtaaatcactaaatacagtgcctgctagagagtaaacacactgtaagtaacagctggtataactatttctggaccctagtatgactatcaggccaagcactttcaacttttttttttttgaaatgggctctctctgtcgcccaggctgcatgatctccactcactgcaacctccgccgcccaggatcaagcaatcttcccacctcagcctccagagtagctgagattacaggcatgcaccatcacgcctagctaactttttttttttttttttttttttttttttttcagagacaagagtttcaccatgttgtccaggctggtctcaaactcctgagctcaggcgatccgccagcctcgggctcccaaagtgctgggattacaggcgtgagccactgcgcccagacaagccctttcaactttaatcagggggttttaactttcttgccaaacggtccctaaggagagagagttaattcactgccaagctcaaaatttctttgaaatgttattgttctatcttataatttggtagaaattttgtattttccttctagaaaaagaactattttttttcttttttcttttgttttgttttgtttttgagatggagtttcactcttgttgcccaggctggagtgcaatagcgcactctcagctcactgcaacctccgcctctcaggttcaagggattctcctgcctcagcctccccagtagctgggattataggcatgcgccaccacgcctggctaattttgtatttttagtagagacggggttttgccatgttggccaggctggtctcgaactcctgacctcaggtgatccacccgcctcggcctcccaaagtgctgggattacaggcgtgagccaccacacccagcctgaaaaagaactattttcccacaaatatttgagtataaatgtggttcatttatcctgtctttggcatgctctagtttgaggaacaactcctagcccagtgcctccccaaactcctcatcatcaactccaacttcttggacaacgcagacctcttgagtgcaccagagcccatacctggcataggtgggggtaacaacatagatagtaggcagggcctcgggttcagggggctgggcaggggcagggggtggccgtcggagttccgcttgcagctgggaaatcctcagatccttctgccgtagctgctcggctgctgcccgcaggggaggaaggcagtcacatggctggcctggtcccaggaagcattaatggggaaagaaggtggggacagagaaccgcagaatgttcagcatcccaaagggccgtaatcgtctcattaattcctaaccaatgcaggtatcaccttatgacttccctagtagccttttctatacctctcgtgtgggaaactcactgcctcaagcagcagaccctctccaactttaataaattccattgttacaattttatgttggatattgagctgattccatcttttctacctgctggtcctaattttgccttctgggcttctaacaagctcatgtccttaaacaggacagtcttttcagagtccaaggtgccaactaaccattacactatggaaccccttttggacagtctttcaaatacctgaggataacgcagtggcactgtccctaaatctttgcataaggggcagggttcga

SEQ ID NO: 97186 - DNA, 28051 bp, Homo sapiens
aagcatccatttaaagtgctaacctagatctcactttcctttcagtccatcccttcagagatggagtttgatcctaactccaacccaccatgttacaagacaatggatgaggtgagtggacagaaagaagtcagggagacaaggagagaatcagccatcctgagggagaatattggcctggggatggctgagtacagatggtccccgaattaccatggcttgattcatgattttatgactttacgatggtgtgaaagtgatgtgcattcaatatgcccccgggcttacagtgaagtgattgtgatgtaacttctcataaactgaggagcatctgtacactgttccctcctctcctcaggatattgtgattcagcaggacgatgagatccgcttaaagattgtggggacccgtgtggacaagaatgacattgtgagtcttttccccacctctctacctataccaggttgagctgagaactgtcgatttcttttttcttttttttttttttttgagacggagtcttgctctgtcacccaggctggagtgcagtggcgcgatctcggctcactgcaagctctgcctcccgggttcatgccattctcctgcctcagcctcccgagtagctgggactacaggcgcccgccaccacacctggctaattttttatatttttagtacagacagggtttcaccatgttagccaggatggtctcgatctcctgacctaatgatccacccgactcggcctcccaaagtgctgggattacaggtgtgagccaccgcgcctggccgagagctgtcgatttcttaccacccacagtttcagggggttctgtgctcttctgccaggaagaagggatggatgggcagaaggcctggggctgcagggtggaggttggttctgtgctcatcttggcttcactttctttttaccatctttcttgcagtttgctattggctccctgatggacgattacttgggtgagtgcctgatcataggtgctggggttattgcctggagaagggatgtgtgggggtggggagtaatataggattcaatgcccaaatcagagagacagaagaaactttcatgctgtctgcttgaaagatccaggacatttgccttgggatgaggagtacatggttgtggctaccctaaattccggttctaactgatatgctttttctggtttcgcagggcttgtaagctgagcctggtggcctcctacccttggtcctactctaggaagtgtgattgtcacacttatcatgttgtccagaggtccagtctggctgctgttgtggaggcaaggaaggcaactcatcccagaaggcatctggtgcttcttgtagcttaactactgcctcctcatttttcagtatgtgttctaagtataaaaagtccttggttctcatggaagtgttatcttctttttttttttttagcaggaacaataactctttaaagaggctgtggagttggctgcttactagcccctctttttcttagactgatgcctctactagcctcagccacccaggggaactgactaacccatttgtccaggtttaaaggtgacctcactgaagtcaaggctctgatgttgggtctttggcttccagcaaatgataccatcattagtggcattctgggtcctgatctagttccagagtgtttgctcttctcctgcccttaaaagtaaccaagagcatagctgggaaagaagggagaggagacagcagacagggagagatgaataagaggctagtaatgacacagactgtaggatctcaacacagcctttcctaagttgggtatataaacaatagtatatcactatactaaactgaactgaagatgtaaaagggctcacaatctagttagggtgacaaaaaatgtatgaaatgcctacaggattaaagaaacatgccaattttccctggcactatacctctgcaatactattttgtctaccttggaatgccctttcccagcttgtccatttcctatctactaatctatgaaatctcatttcaattattattattattttttctttaactttctttgacttccctgggaaacagagctctgtggcagaaaacaagaaagcatggtatttggattgatacagagctggtttaagtcttagctggactcaagaggataagagatgaggcaggtaaattgcttgaacccgggagggggaggttgcagtgagctgagatccctccactgcactccagcttgggcttcagagtgagactccatctcaaaaaaaaaaaaaaagaaaagaaaagagtcttagctggatgaccttctgtttcctcattataaaatgggcagaaaaccctctttggaggctgctgtatcagacatcatatgttcaagtggctggcatagagcctggtccatgatgggcactcaacttttaattatcataattattatataatgcatcccaaagccagtgcagtggtgtgtatctgtagtctcaggtacttaggaggctgaggtgggaggatcactggagtcctggagttcttcctaagttctcaaataggggaataacaccaagcctgaaaggaagaaattgatggacagagaagcagctcatggatcctgagcatgtgggtgctggtgaggatgtagggtgtggcatcgaaaaggctggcactaattaaaaaaaaaaaggaaaaaaaaaaagcctggcactctagtggggaagggaacaagtggggatgccctggagatggtttccagaactcttctgagcttttttttttttttttttttgagacagagtctcactctgtcgcccaggctggagtgcaatggtacgatcttggctcaccgaaacctccgcctcctgggttcaagggattctcctgcctcagcctcccaagtagctgggattacaggcatgtgccaccacgcccaactaattttgtatttttagtagagacaaggtatctccatgttgatcaggctggtctcaaactcctgacctcaggtgatctgcccgcctcggcctcccaaagtgctgggattacaggcatgagccgccgcgccccgcctcttctgagcttttaaggttggtactaagggattctgaaagttacagcctcctaaagcggtcacaggctaatagagtaccatgtgcttggcaacatgctaaatcctttacacacttttctgaatcttcacaacagttccatggagtagatttcgttatcccgctttatagttgatgagacaggtcagacaggtgaactaatatgcctaaggtcacacagctggtgagctgtgattttttaaaaacagtctgggcttgttgtggtggctcatgcctgtaatcccagcactttgagaggccgaggtgcgcggatcacttgaggtcaggagtttgagaacagcctagccaacatggcaaaacccagtctctactaaaaatacgacaattagccaggtatggtggtgcgtgcctgtaatcccagctactcaggaggctgaggcacaagaatcgcttgaaccggggaggtggaggttgcagtaagctgagattgctccactgcattctagccttagcaacagagcaaggactctgtctcaaaaaaaaaaaaaaaaaaaaattggccgggcatggtggctcatgcctgtaatcccagcacttcgggaagctgaggcgggcggatcacaaggtcaggagttgaagaccagcctggccaacatggcgaaaccccatctttactaaaaatacaaaacttacagcacttagccaggcatggtgtcggacacctgtaatcccagctcctccagaggctaaggcaggagaatcacttgaaactgggagggcagaggttgcagtgagctatcacgccactgcactccaacctgggcgacagagcgagactcagtttcaaaaaataaataaaaataaaaataaatgaataaaaacagtctgactttgaccaggcacagtggctcatgcctgtaatcccagcactttgggaggcagaggcgggtggatcacaaggtcaggagttggagaccagcctagccaacatggtgaaaaccctgtctctactaaaaacacaaaaattagctggtggtagtggcaagtgcctgtaatcccagctacttgggaggttgaggcaggagaatcatttgaacctgggaggtggaggttgtagtgagccaagattgcgccactgcactccagcctgggcaacagggtgttactccgtctcaaaaaaaggaaaaaagaaaaaaagtctgacaccaaagccatcatagttcttgccaggcattgggtgtgtggagcgagccacctttctcccatctgtggccatggaggtctcactactgccttccctggttcctgcctccactcagattgggagcaaatgagctccagacaggttggatacaggttcactacatctaataggtcccgggcagtcccggtctccctcccatcttctagtgtctccaaggttgctgatggctgtccagaacagtaaacctaagcaaggaggtcagccagctgcccaggtctggctaagctgacttcaggctcagtcagaccttagaggagagcgccctctctctttcccttaacgcacaggtgggcagacacttgaaaccacttctaatatggttctgaatatgagtggaagagactcagcagggtcacattctccttaggtggggttgccatggcaaccacagtcgcatccatctggctttgccagctcgggtcccaggggattttcttttccagcggcagcagcatctaaccctgagagggggaaagagaaaaaatgtgtacattcatgctcccttgcagaatgttcccacagttcactcagtgcaaactaccccatcttgggtgaacttaaaggaattcactgtatgccttgtgacatgtgagggaaagaaagtttctctcttttttttttgagacggagattcactcttgttggccaggttggagtgcagtggcgcgatctcggctcaccacaacctccgcctcccgggttcaagcaattctcctgcctcagcctcccgagtagctgcgattacaggcatgtgccaacacacccggctaattttgtatttttagttgagatggatttttctccatgttgatcaggctggtcttgaactcccgaccccaggtgatcccccgcctcggcctctcaaaatgttgggattacaggcgtgagccaccgcgcccggccgggaaagaagtttaacctccaactctgccagggactctcacagacattaatttacaacaaccctgtgaagtgcgcattattactccatattaggtaatttgcccaaaggcagtgtcagaattttaacccaggtcggtctgattccaaataccatcctttactcactaagcccactgcttatcaattaagaactgcccaagtagctgctattgcagtgggagttggagaaagagagctgtcagtgtgcgtgtccaacggtcatgcaaggcgaggtaggccagggcttgtatttggttcacaggcgtggggagaatgcgaagtaggtgcagaaagagcagaaccctggagtccggagcttgcacgggatgttcggccgggtcagaagtcccttctgcctgccgagaacacctaccgagagccccatctatcccttcaggaaggggaagtggcatgtgatgttggggaggtaggccgggcaggaaaactaagccagacaccaaaatctaaagctttgctgcagtcgcgaaaatgcgggtgctcagaaactcgcgagcaaacaagacaaagaaaatcaagacgctgtctttgagactgtttatttcctcgttactattgtggtggtaaaaaaaataaaatatgcttattaaacgtgtgttaaaacaatacacacctactcgcaaacgtagcaagagaggttgctttaagaagcgggaatcttcagcgtcacgtgaccgccggtctctacagtctgttcacactggccaatcaagagccaggaagcctcctggagggccggaaactttccaaggcgcccgccgactggctgtattggggagggcggggccggggccccgggagagggaatgagtgtgagctcgtgagtgggcgccgccgccaccrcccccgccgccgtcgtctcggtagcagccttcgccacgccggggtcttcaggtgagcaggccttgctctggtccaaggactccccattcccgacgccgactgcttactcaccagtcttggagcccgcaccgcgagggcccgcccccttggctgaccacgtgacccaagttcagtgacccctgacctcctccccccgcgcaccccctccccgatctgggctgggctaggccgggtgggaggatgcgcgttgccgaggcccggcccgcggaggtcagttcccacgcctcstctccagcgtgactagtggctgaggatgcggaggagaggaggctgaggagcgggagactttggtcacagtctagatttcgtgtacggtcatataatagggaaactccctccgtgcctttcgcgctggtggactaaatgctcccattttacagatagggaaactgcagcttcacaacgatctattggcgggtctagggtcaccaaggggtgggtctccaatccatgtctttggggtgggatccaggccttgttccccatacagctggcggctcctgaatgcggtatagagtaaagattaggagcaaggggttgagtccttgctccccctccctacttactcagtgcttacttcatgatcttggagaagtcatggaacatttagcctctgaggtttgatttccttgcctgtgaaatagacgaaatacataataatatcttattattgagaatatagtgaagtaatccatataaagcacttagctgtgtctcaggcatagtacagtgctattcgtggccgggcgcggtggctcacgcctgtaatcctagcactttgggaggccraggcacctggattgcctgagctcaggagttcgaggccagcctgggcaacacggtgaaacctcgtctctactaaaaatacaaaaaattagctgggcatggcggcgtatgcctgtagtcctagctactcgggaggctgaggcaggagaattgcttgaaccagggaggcagaggttgtagtgagccgagatcacgccactgtactccagcctgggtgacagagcgagactgtgtctccaaaaaaaaaaaaaaagctcgtcgggccaggtgcggtggctctcacgcctgtaatttcagcactttggaggccgaggtgggcggatcacctgaggtcaggagttccagaccagcttggctaccatggcgaaactccatccctactaaaaatacaaaaattagccaggtgtggcggcacaggcctgtaatcccagctactcgggaagcggaggttttagtgagccgagatcaagccactgcactccagcctgggtgacagagtgagacatcagacatcatctccaaaaaaaaaaaaaaagaatagttcttctttctttcttttagaagatcttttttttttgtttgtttttgttttttgttttgtgttttttttgagactgagtttagctctgtcatccaggctggagtgcagtggtgcaatctcggctcactgcagcctctgcctcctgggttcaagtgattctcctgcctcagcctcctgggtaattttttgtatttttagtagagacagggtttcaccgtgttagccaggatggtcttcatctcctgacctcgtgatccaccagcttcggcctcccaaagtgctgggattacaggcgtgagccaccatgcctggcctataattacaaatttttttttttttgagatggagtcttgctctgtcgcccaggctggagtgcagtggtgcgatcttggctcactacaacctccacctcccgggttcaagcaattctcctgcctcagcctccggagtagctgggactacaggcgcggaccaccatgcctagctaatttttgtatttttagtagagacgaggtttcaccatattgtccaggctggtctagaactcctgaccttgtgatccacccgccttggcttcccaaagtgctgggattacagatgagccactgcgcccggcctacaattttttttttttttttgagacggagttttccccttgttacccagaatggagtgcactggtgcgatcttgactcactgcaacctctgtctcacgggttcaagcgattctcctgcctcagccttgcgagtagctgggattacaggcatgtgccaccacacctggctaattttgtatttgtagtagagatgggggtttttctatgttggtcaggctggtcttgaactcctgacctcaggtgattcgcccgccttggcctccgaaagtgctgggattagaggcgtgagccactgggtccagctacaaattcttacractggtttggaggcagaatgcaaggacattggaggatctaggaagacatccctgagcaagtgacatttgaastgaaatctgaaggagtgagtagcagttcactagacaaagggattgggggtggaggacagggaggagagagttccaagtggaggaagcagtgttcaaaggtcctaaaataggtgtatttgaggaactgaaaggaggacacaggtgggaatacagaacacaagaaagtaggagataagaggtaagaggtattgcagaagtaggcagtacatgcagagcctccagagccattgttcagatttgttctttatttctttttttttttgagacggagtcttgctctgttgcccaggctggagtgcagtggcgtgatctcggctcactgcaatctccgcctcctgggttcacgccattctcctgcctcagcctcccgagtagctgggactacaggcgcccgccaccaagcccagctaattttttgtatttttagtagagatggggtttcaccgtgttaaccaggatggtctggatctcctgaccttgtgatccgcctgcctcggcctcccaaagtgctgggattacaggcgtgagccaccgcgcccggcccaaatttgttctttatttcaaagacaatggggagccattgggaggagtgctgcacagaagccacatagctgtccattggatgtagggacctggacgtcactggtgacccattgatcccctgccagaggagtagtgggggcartgcctgggtgggtcatcctggatctgggccttcctgtctgaggtgtggatgcatcactttggcgcacgggagcctaccttctggtgctgtgcgttgttggagtgagtcatcagctgctgtttttgtcggtttcttattgtgctataccctgtgaacaaaacaggttccagcatttaggcactgcagccaaactggggaagaccaaacacataggcagaaagcccagctactatccagcctggccaacatggcgaaatcttgtttctactaaaaatacaaaaattagctgggcgtggtggcaygtgcctgtaatcccagctacttgggaggctgaggcaggagagttgggggcaacaagaacaaaactccgtctcaaaaaaaaaaaaaaaaaaaattagccagccgggcgtggtggcaggtgcctgtaatcccagctactcaggaggctgaggcagataattacttgaacccgggaggcggaggttgcagtgagctgagatcgcgctgctacactccagcctggcgccagagcgagactctgtctcaaaaaaaaaaaaaaaaaagaaaagactgggtaatgtataaaggaaagaggtttaactgactcaatgctggggaggcctcaggaaacttacagtcatggtggaagaggaagcaaacatgtctttcttcatgtggctgcagctaggagaagtgccgagcaaaagggggaaaagctctttataaaaccattagatcttttgagaactcactatcaggagaacagcatgggggaaaatgtccccttgattcagttatctccacctggtcccgctcttgacacgtggggattattaaaattcaaggtgagatttgtgcggggacacagccaaatcatatcagtcatctcattttcacagcaaccctgtgagctagagagggcaggaattattgtgcctgttttacagtttaggacacaagggctcagactgatgaaggccttggccaaattcacatagaaggtgacagggcaggaatgggacctagttctgtgaaccccaacactttggactttgtctagcttcaccgttcttgacccactggccagtctgtttccttctctgagcctcactttcctcatctgggtactcagagctccttgtttagaaactccagagcacgagcagcaaggctggtgtggagggtgttggrtcacactcctgggctctccgggaggctgggcagcttttccagtcttcattctccactcccagctccactggggccatgtcagagcgagaagagcggcggtttgtggagatccctcgggagtctgtccggctcatggcggagagcacgggcctggagctgagcgatgaggtggcggcgctgctcgcagaggacgtgtgctatcgtctgagagaggccacgcaggtacactcccctcaccccctgatacctccaactttccttgtttctgcctttttactaacctccaccctcgctgatttattcaagtgtacactgggtgcctgctccatacaacagagacagtccatgcctttacagaactctacttgtagctgtctgggcttccagcagacaaagcgcttgccaggcatcttcccatgtgctcctcacaacagccctgttgggcaggcagagcgggtagatactcacattctgcatgtgagaaactgaggtgttgacagaagatgtgacacccggggggtgtttttgtacaggagcagagacggaatctaggcttctgatccctaagcgtggtctcctgtttgccttctctccagtctggcccacttcatttggggtttcccatgccccctgcttcacatcctttgactctggcttttgttccctccctcccagaatagctctcagttcatgaagcacaccaaacgccggaagctgacggttgaggacttcaacagggccctcagatggagcagcgtggaggtgagtggggtgcaggcyacagagggctcaggtggcatgaggccacttccatgtccagttcagggctggcgatgtggtgagacattaagaccaaacgctgccgggcatggtggctcatgcctgtaatcccagcactttgggaggccgaggtgggcggatcacttgaggccaggacttcaagaccagcctggccaacatggcgaaaccccttctttactaaaaatacagaaattagctgggcctggtggtacatgtctgtaatcccatctagtcaggaaactgaggcatgagaatcgcttgaacctagcaggcagaggttgtggtgagctgagattgcactccagcctgggcaacagagcaagaccctgtctcmaaaaaaraaaaaaaaaaaaaaaaggccgggcacaggagcttacacctaaaatcccagcactttgggaggtggaggccggcggatcacgaagtcaggagtttgagaccaacctgcccaacatggtgaaacctcgtttctactaaaaatacaaaaattagctggccgtggcggtgggcgcctgtaaccccagttactcaggatgctgaggcaggagaatcgcgtgaacctgggaggcagaggttgcagtgagctgagattgtgccactgtactccagcctgggtgacagagcaggactccatgtcaaaaaaaaaaacaaccaaaaaaacacaaaaattagctgggtgtggtggtgggcacctgtaatcccaactacctgggaggctgaggcaggagaatcgcttgaaactggaaggcgtaggttgcagtgagccgagatcacgccactgcattccagcctgggcgaaagagcaaaactctgtctcaaaacaaaaaaaagaaaaaaagactaaacgcacacataagggaagcaagaccctgatagcaacagcagaccaggtgctaggcccagcccacctgggctatgtgttcagaaaagagggagaggaggccactggaggcccagaggttagagaaagctttttggaggaggtgggactggagctggcccttaaagggtggtgaagaacttgagcttggcttaaactaggccaagaggaaaagaaggcattcaggctaagggaggagcctgagcaacagtgtgggtgttagggcctcatggtgtggtttttctggagcggtgagttgagagaggaaggctatgtttagaagacattagtgagttttcaaagttgagtgagtgtgaataaggaggaccagtgcttggtgtggggctcaggacccttccagttatgggaggagcgaccatgttctttcccttgacccagggagccccggatgctccaggcaagtccccagtggtggctctgagtcccaggcttccaccacttttcttgggacttctggacttccytcaaacgtgggctctctgctctggtcagtggagcctcatcctggatcctgacgcctgctccctccctggattcaggctgctctccaattccctttttcctcaggctgtgtgtggttacggatcacaggaggcactgcccatgcgccccgccagggagggtgaactctactttcctgaggatcgagaggtgaacctggtggagctggccctggctaccaacatccccaaaggctgtgctgagacagctgtcagaggtggctgccggggtcctgcatgggttggggatgggagttgggccgtgaagagaagtggtgatgggctggctggtggaagaggcagaacttggaggggtaggcggtactctaaggggcaaaacgccaggctgacacatctctctgcactgcttctagttcatgtctcctacctggatggcaaagggaacctggcacctcaaggatcgggtaaggggtgatgtaggaaacaggctctttggatgaattttctcccttaggttctgagggtggtgcctatgtgcccccgagtctgcgtctaacatgtgtttacccatgcctgccttgtgccatggtctgagtgggcgctgggctctgcatggagggctcagagttggagatgggggcccagacctgtaactagtcataatgcagcatgttggatgctaagacagaagtctgggcagcatgctggggcggtgtttcacccccagggtatgctgagcagagcttcacagagcctgaagctctcaggagtccgtctggcagagggtgggtggaagacaggacagagcacagaggtgtgcagagcctagatggtcagggctgagcaggctctaagagcagtctcttgccctggttgtcctgtcagaaaggcttcttgtggatgtgtgtggggatggtggttgagggggaggaggctggagaggccaggagagggccagctctccacctgtccctgcttcctgcctgtcctctggcagtgcccagtgctgtgtcttcactgacagatgaccttctcaagtactatcaccaggtgactcgtgctgtgctaggggatgatccgcaactgatgaaggtgagcgagtgggcccaagttggggcacaaagttgaaattgtaaattctagacctgttttttttttttttttttgagacagagtttcgctcttgttgcccaggctggagtgcaatggcatgatctcagctcaccgcaccctctgcctcccaggttcaagtgattctcctgcctcagcctcctgaatagctgggattacaggcgtgtgccagcatgcccggctaattttgttttgttttgttttgtttttgaaacggagtcttgcattgtcacccaggctggagtgcagtggcgcgatctcggctcactgcaagctccgtctcctgggttcatgccattctcctgccttagcctcccgagtagctgggactacaggtgcccgccaacatacccggctaattttttgtattttttagtagagacggggtttcaccgtgttagccaggatggtcttgatctcctgaccttgtgatccacctgcctcagcctcctaaagtgctgggattacaagtgtgagccaccgtgcccagccttatatttttaatagagacgggggtttcagcatgttggtcagactggtctcgaactcccgacctcaggtgatccacccgccttggcctcccaaagtgttgggatgacaggtgtgagccactgtgcccggcctaattctatgaacatttaaatttttatttattattttaattaaaaaaacattttttttaagatggggtcttgctctgtcacctaggccggagtgcagtggtgtgatgttggctcactgcagcctctacctcttgggttcaagcaattctcccacctcagcttcccaagtagctgggattacaggggcataccaccatgcctggctaatttttgcatttttagtagagatgaggtttcaccgtgttggccaggctggtctcaaactcctgacctcaggtgatccacccgcctctgcctcccaaagtggtgggattacaggcgtgagcctatatatatatatatatatatatattttttttttttttttttttagagacagggtctcactgtattgcccaggctggtgaaactcctgccctcaagcaatccttccttggcctcccagcactttgggaggcagaggtgggcggatcacttgaagtcaggagttcgagaccagactgtccaacatggtgaaaccccatcttcactaaaaatacaaaattaactggctgttgtggtgggtgcctgtaatcccagctactcgggaggctgaggcaggagaattgcttgaacccaggaggcagaggttgctgtgagtcaagatcacaccactcaggtggatcacctgaggtcaggagttcaagaccagcctggctaacatggtgaaaccccgtctctactaaaaatacaaaaattagtcacgtgtggtggtggacgcctgtaatcccagctactcaggaggctgacgcaggagaatcgcttgaacctgggaggcagaggttgctgtgagctgagattgtgccattgcactccagcctgggcaacaagaacaaaacttcatctcaaaaaaaaagatcacgctgctgcactccagcctggctgatagaacgaaactccgtctcaaagaaaaacgaaaaagtaatactagtacatgtttactgtagaagtacatataatataaaaacatagaaaaagaaagtggctgggtgcggtggttcacgcctgtaatcccagcagtttgggaggccgaggtgggtggatcatgtgaggccgggagttcgagaccagcctggccaacatggtgatttcccgttggatatctactaaaaataccagaaaattagccgggcttggtggcatgcgtctgtaatcctagctacttgcgaggctgatgcaggagaatcgcttgaacccaagaggcagaggttgcaatgagccgagatcgcgccaccgcactccagcctgggcaatagagtgagactccatctcaaaaaaaaaaaaaaaagggccgggcacggtggctaacgcctgtaatctcagcactttgggaggccgaggcgggtggattgcttgaggccgggagttcgagactagcctggtcaacatggcaaaaccctgtctctactaaaaatacaaaaattagctgggcgtggtggtgggcgcctgtaatcccagctacttgggaggctgaggcagaagaattgcttgaacccaggaggcagaggttgcagtgagctgagattgagccactgcactccagcctgggcgacagggcgagactccatctcaaagaaaaaaaaaaaagaaaaagaaactgaaaagtctattcctccacctacttttttttctctgtatcaactatgattactctcataaaaacctaagtggtattatattaagcatctggttttatagattgcctttctcagttaaaaatgttggatggccgggcgcggtggctcacgcctgtaatcccagcactttgggaggctgaggtgggcagatcacgaggtcaggagatcgcgaccatcctggctaacacggtgaaaccccgtctctactaaaaaatagaaaaaattagccgggtgtggtggcaggcgcctgtagtcccagctactcgggaggctgaggcaggagaatggtgtaaaacctgggaggtggagcttgcagtgagccaagatcgtgccactgggcgacagagcgagactcggtctcaaaaaaaaaaaaaaaaawgttggacattcaggttgtattcagggccatatgcaggtatatgtgaatgagtttctgtaggttacatttatagaaatagaattgctagatcaaagaatatgaacattaaaattgtaaaacatgaataaggtgatacactgtcttccaraagaataccgcattcatgttttacaattttctggtggatccaatgcagtctgggcccttccttttaggttgcactccaggacttgcagacgaactccaagattggggcactcctgccttactttgtttatgtggtcagtggggtaagtgaccaggctgggacagggagaatgttttataaggaagagatgacccagcaggtgtagggctcatggcaagtgctgtcagaatggtgggctcctgcctgtcccctcatgtccctgtaagctaccctcttctcccaacaggtgaaatctgtaagccatgacctggagcaactgcaccggctgctgcaggtggcacggagcctatttcgtaatccgcacctgtgcttggggccctatgtccgctgtctggtgggcagtgtcctctactgtgtcctggagccactggctgcctccatcaaccccctgaatgaccactggactctgcgggatggggctgccctcctgctcagccacatcttctggtagccactgggcctaaacctgcgggtgggattgctgcagagccaagtgggttggggtaaggaaatggggcgaagcctctggctttgagagtctatgagaagatggggaaccttttccctaggagcgtcctagctggtgtgctgtgacacactgggattctgaaaatggattacaaatacgccaaggtattggttcttcagccctcaggtcctaggccagtcacccctggcagccttcttcacttaaccccagcactcccgagtgtgctgtacagatgctattctctttgtgttgtcttgtgccctgttgggtggcaccatgcctcattcccctccctaactgaatggtgctcccacaggactcatggggaccttgtaagtggcctctatcagcatatcctgctatccctgcagaagatcctggcagatcctgtgcggccgctctgctgccactatggagccgtggtggggctgcatgctcttggctggaaggtgagcaccctggcctttctcacacagccgtaagaactcccatttgtgttagaaaaatagtacttgtgcatcgttatctccaaaatagtgtgtgcctgccactgccatgtattgagttctggccttaggccaggctcagtgatacttgactttctgaatgtaaatgtcttatcctttcgaaagtcctatatggcagatactgatgtccccacattttataaattcctgcccgttctatattatcacattaagaaataccttcaattcctgttgtattgagcattttacacatgaatagatactgaattttgtcatacctttttagcatctgtagaaattatcaaatgattatacgctttaaaaattaggtgttggcgccgggcgcagtggctcacgcctgtaatcccagcactttgggaggctgaggtgggcggatcacaaggtcaggagatcgaaaccatcctggctaacacggtgaaaccccatctctactaaaaatacaaacaattagcctggtgtggtggcgggcgcctgtagtcccagctactcgggaggctgaggcaggagaatggcgtgaacccgggaggcggagcttgcagtgagccgagattgcgccactacactgcagcctgggcgacagagcgagactctgtctcaaaaaaaaaaaaaagttaggtgttgccactgtgataatattaagagggaggatcttttttttttttttttgagacggagttttgctcttgtcgcccaggctagagtacagtggcatgatctcagctcactgcaacctctccctcttggatttaagcaattcttccacctcaccctcccgagtagctgggattacaggcacgtgccaccatgcccacctaacttgtatttttagtagagaggcagtttcatcatgttagccaggctggtctcaaactcctagcctcaagtggtctgcctgcctcggcttcccatagtgctgggattataggcatgagccaccacgcccagccgattatgtggtttaatatgacaagttctattctgttgatatgctaggtgtattaatggattcttcttctgaaccacttttgtatacctggaataagttctatttgttgcttttgagatttttgtttttttgagatggaatcttgccaagatggcgccactacactccagcccgggcgacagtgtgagactctgtcgcccgggctggagtgcagtggcgtgatctcggctcactgcaacctccacctcccgggttcaagtgattctcctgcctcagcctcctgagtagctgggacttacaggcacgcaccaccagggccagttaatttttgtatttttagtagagacggggtttcacaatgttggccaggatggtctcaatctctggacctcgtgttccgcccgcctcggcttcccaaagtgctgggattacaggcgtgagccaccggtgcctggccatatatatatattcttaattttttttttttttttgagacggagtctcgctctgacacccaggctggagtccagtggcgccatcttggctaactgcaacctccgcctcccgggttcacgccattctcctgcctcagcctcccgagagtagctgggactacaggcgcccgccaccatgcccggctaattttttgtatttttagtagagacagcgtttcaccgtgttagccaggatggtctcgatctcctggcctcatgatccgcccgccttggcctcccaaagtgttgggattacaggtgtgagccaccgtgcctggcctatattcttaattttatcatcaatttatattggatttttatcagatggtttttctgcatcttttgaaatgatccgaaggcttttcagcttttgttttccaatgttattacagatttcctgatagtaaacaatctttatagttccatgatacactaaactatgtcatgggatagtcgtaaagaaaaaacccaaagcttttattggactgtaatgcattttaatttacttgtgggtctgctaaattttaaaagggtttatattcaggagtgaaattaaacatgtttcctctcatgtactgtccttgtctggttttagaatcagggttatactggccttacagaatgatgtggggagtatttcttttttatatttacyttaataagatttagatcatctttttcttttctttttttatttaatagagatgaggtcttcctacattgcccaggctggtctcaaactccttggtttaagtgatcctttggccttcccaaagtgctgggattacaagcgtgaggcactgcacctcgcctatctttttcttgagtgtctgtagacttttgtaaattctggcatggtattttctttcctttttttttttttcgagacagagtctcacactgtcacccaggctggagtgcaatggcgcgacctcggctcactgcaacctctgcctcctgggttcaagcgattctcctgcttcagcctcccgagtagctgggattacaggcgctcaccaccatacctggctaattttttgtatttttagtagagacggggtttcactrtgctggccagggctcgtctcgaactcctgacctcctgatccgcctgccttggcctcccaaagtgctgggattacaggcgtgagccacagcgcccggctggtattttccttataggcccagctggtattttccttatagttaattcttttttttttttttgagacggagtctcactttgcttcccagggtggagtgcggtggtgtgatctcggctcactgcaacctctgccccccgagttcaagtgattctcctgcctcagcctcccaagtagttgagattacaggcaactgctactgcgcccagctaatttttgtatttttagtagagatggggtttcaccatcttggccaagctggtcttgaactcctgacctcaggtgatccactggcctcggcctcccaaagtgctgggattacaggcgtgagccacagcgcctgtccaatcacaggattttaaattgtataatcagagtccaagtctctggttggttgtttttatgcagattgtttgaactgagtctcagtttacatctaagtgaagccagtacttgcctgattgtatagggtagcagtatgcaaactaaattttggagttgtcagtaatragcattatttagcacacagggcagtgatattgggtatattttttattgtctccctttgtaccttatctttattcccaatgcctagcttaggtatacagtaggttccaaataaatatatggttgaatatgccaatcagggaatttaggaggattgagccctgtctaggatcagagataaaggtaggtctttcatgggaaagggtccttgagagggaataagtatcaaagacatgctaactgtattccttctcttccttccaggcagtagaacgagtcctgtacccacacctgtccacctactggacaaacttgcaggctgtgctggatgattattcagtatctaatgcccaggtcaaagcasatggacacaaagtctatggagccattctggtgagtaccgtccccttccagcctcccttccctgcatgagcttagcagccaagcaggcttactttggaatatttgatgggcccaggttcctcgaattttttgcctatcttagtccttggctcttacaggtggcggtagagcgactgctgaagatgaaggcccaggcagcagagcccaacaggggtggcccaggtggcagggggtgccggcgcctggacgacctgccatgggacagccttctctttcaagagtcgtcctccgggggcggtgcagaacccagctttgggtccggcctcccgctgccgccagggggcgcggggccggaggacccttctctttcggtgaccctggccgacatctaccgggagctctacgccttcttcggtgacagcttggccacacgctttggcaccggccagcctgcacccacggctccgcggccgcccggggacaagaaggagccggcggcagccccggactcggtgcggaagatgccgcagctgacggcaagcgccatagtcagcccgcacggcgacgagagcccccggggcagcggcggaggcggccccgcgtcggcctctgggcccgccgcctctgagagcaggcccttgccgcgcgtgcatcgggcgcgcggggcaccccggcagcagggccccgggaccggcacccgcgacgttttccagaagagccgtttcgccccgcgcggcgccccgcactttcgtttcatcatagccgggcggcaggctgggaggcgctgccgcgggcgccttttccagactgccttccccgcgccgtacgggcctagcccggcctcgcgctacgtgcagaaactgcccatgatcggccgtaccagccgccccgcccgccggtgggcgctctcggactactcgctgtacttgccgctctgagtcagtggccccttcgttccttgtaaataaatcccgcccccggaartgacgtctccaccttcgtgggtcgcgccggataaggtgggctttgggcggggtgctgctgcagcggcgcttcctggtggtcagggcgccatggcgctgtcctggctgcagcgcgtcgagcttgcgctctttgctgccgccttcctgtgcggggccgtggcggccgcggcgatgactcggacccaggtgcggctgcggggcggggtcaggtaggcgggggagctggccggtctggacatggcgaggccactttcgctttccgaccgggcttgctgctgctcggagccggtggacctggtgaggcacggctggcgccggcctgtacctgaaatgcagcgaggctaatcgcgctttgtggctcctcctggccaggtcatacttcgaagttgtcccctcgccaaagggacgggtcagtagcgtcttaaagcactaggtggagtcgggtttcgtggctcctgctgcacagccttactgtggttccgaaacagaagtcagtgcagaacctgcgtccatccgttaaatcagaagccatttgtgctgagctttgtcgagaaataaagcatagtgtagtggagatgatcaagctgccacatgattgtagcacagtgtgttaaatgacaaaatgagagatggagaaaacgctgacgtaaaggtagaagccaataatttacatcgtttaccccagccaggtaatctggttaataaacatgggttcatttaatgcctataaagtaggcactagtgtgcctattttacaccatgagaaaacctcagagatccgccgggcgcggtgactcacgcctgtaatcccagcactttgggaggctgaggcaggcggatcacttgaggtcaggagttcgagaccagcctggccaacatggcaaaactctgtctctactaaaaatacaaaaattagccgggtgtggtggctcatgcctgtaatcccagctacttcggaggctgaggcaggagaatcgcttgaacctgggaggcggaggttgcagtgagtcgagatcgtgccattgcactccagcctgggtgacgagcgaatctccatcgcaaaaacaaaaacaaaaacactggccgggcctggtggctcacgcctgtaatcccagcactttgggaggccgtggcaggcggatcacgaggtcaggagatcaagaccatcctggccaacacggtgaaaccctgtctctactaaaaatacaaacaattagccaggcatggtggcgggtgcctgtagtcccagctactcaggaggctgaggcaggagaatggcatgaacccagaaggcagagcgtgcagtgagccgagatggcgccactgcactccagcaaaaaaaaaaaaaaaaagcacctcacagatagttatttgttgaaggatatacaaggcctgggtttactctaaggtttctgcacagagaccataacttgtgaggcttctctgaagctcattgcattctatattcattgcctattttctgatccttctggccactgccggtgtgattccccagcaggccctctccatcaatatccctgtcccagaaataggaattgacggtgcacaaataacttcctggaatgcaggaccattcctaagttatcactaacaccctaccaagagactgtatctagagacattaacctgaaatctaggactcagcagcttctctccacagggctccttcagtggtagatgtcccctgtatggtgtggccaccctgaatggctcctccctggccttatcccgtccctcagcaccatccctgtgctactttgtagctggggcctctggcctcttggccctctactgcctcctgcttttgctcttctggatctacagcagctgcatcgaggactcccacaggtgactgcctaaccctgagggccaggggctgaggtaggatgagcctcacctccaccacaaggcttgttctctccctttcagaggtgctatagggctgcgcattgcactggccatctcagctatagccgtcttcctggtcttggtgtctgcctgtatccttcgatttggcaccaggtctctctgcaactccatcatctccttgaacactacaattaggtaatgggagagggagggaagcctggctggggctgactaccttccctctgcagcggggtcctataatttccttttatccccatcagttgctctcaactcacagggcactgggcacaggtgtgcctcggatataaactatcacgctttctcacaactgtctctttgacctcacagctgttctgaagcccagaaaattccatggacaccccctggaactgctctgcagttttactccaacctacacaatgctgaagtgagacccaaggataggaggaaaaactgacataaatatctgtagctgtgtgggtgctcaccagtgtattgtgagcttggcctaccagtgagaggagctgaaggggttgtcagcttaaaattcagcagttcagagtggtgtgtgggtgggaaggactggatttgaaatggtcccactcctgacgatcctgtccctgtctcctacagacctcttcttgggtgaatttggtattgtggtgtgtggtcttggtgctccaggtcgtgcagtggaagtctgaagccaccccataccggcctctggagaggggtgaccctgagtggagctctgagacagatgctctcgttgggtcacgcctttcccattcctgaagaataagcggagtgcttcctgcagccgaagactccatgcccaagtgcctgtaatcccccccctcaaggccctgtttatgttgggagtcttagttttcctttcgttggggggtgggggggaaacataatgacaggcccccctccacctcttcctgcagctgtttttgtaccaaaatattatattactgtcttcatcttagtagtgagtttttgatgttaaagtacaactagataggaggaaggagtgaaggctaagcagacatggactgaaacttagaggtactgttaggcagctgccctagggatgactgctcctttatttgttgttaatgaatcttgacctccttgtgtgaccctggttgttactccattctaagattggcgtttttttttgtttttttttttgtaaatagagacaaggtctcgctatgttgcccagcctgggctcgagcagtgctcctgcctcaccctcccaaagtgctgggattacaacaggtgtgaaccaacacacctggctccccaaggttcagtttttatcctcctcttggagaggtgagtgacttgaggtcatttcttcacaagctccggtaggcacccacagtattgtcaaagagttttgtgttagggaagtgtccagttttgtccaagaggaaatagaagcgtcggcctttgactttcagaggtagcatggcagggacttcaccccggtgggccatgcaagatacctgcttcaaaggaactgtgaaatgggcccccaagccaaagggggcatgagtggtgagggtcacctgctgccctccagctcgaagcaccactgagcgcacagaccggagagagaagagaagaccagcaccgagtacgagggctcctgcaggcagggcagagattggggtgaggggttttcactgggcatctaagtaccgacctttccagtgccctctgaataagaaatttgtgggatgaaagtagtatttactgagcgcttttttttttgagactgagtctcactctgccggccaggctggagtgcagtactgagctcctgttatacccagtaatcttgttattcctcccaacaaccttaatagatgtccgtttccattttaatgggaagatggagagctttaaggaccttgctcaaggtcgcagagtgaagggcagccctcagcctaggctatgacagggcacggcgctcggagacatcactgtttcccaatttttttttttgagaggggagtctcgctcggtcgcttaggctggagtgcagtggcgtcatctcggctcactgcaacctccgcctcccaggttcaattgattctcctgcctcagcctcccgagtagctgggactacaggcgcttgctaccacgcccagctaattttttgtatttttagtagacacagggtttgacggtgttagccaggatggtctggatgtcctgacctagtgatccgcccgcctccggcctcccagcatttgagccgccgcgcccggccagtgtttcacatttctgtggggtaaagcccgcccgccactctcggatagggagtccctgactctccctgcctgtatagggaaggtcgtgtcccgccaccccacgttgtcacagtgggaagccagcccacgtcttaccgatggcgccgcagccgacggccagaccgtagcgccagagcgcggagcgcaggtcgaaggggccacgatttgggacctccgcatccagaggctgcaccggaaccgggggccgggacacggctgccacagccatggaagcccagaagacgccctggcccgcgcagaacagcccgaggatggtgaagaagcggccccgatcatgctcaaagagcagcacatcccgttgcagcgtcgtgccttgcaggggccggcaggtgagcaggggccgcagcacggctagcagccccgtgggccatcgcctccaaggcgccgccatggccagccgacttccggggtggggcttcctgccgcagagccgccttccgccctccctgggcgcccccgctagagggcccgcccccctcgctcagggctgggaggagacaaccaatccagcacgcagaacacgaaatacaacatcactctttatattaaaaagtgcagaacacgaaatacaacatcactctttatattaaaaagtaaggaggtcctggggttaagtacacaaagcacctaagtccttcgggtagtttagtgtcagttctacaaagtaagctttggcttcctggcaccagtgaggctcaatcttctgaagtcttccagaaggcaggcgaggagagggatcaggcagccctccctccctcggtcacagtcacggggcggcctcgggccagacaggaggagatgacagacgacaaccagacggtaatatccaaggactatttacaggggggactgcttctgaggcatgactacgatcacttcatgaatgccacttctgggatctcgcccttggcctggagaaaaatgaaggtcagtagaggtaggcctaccctcgccactcagcaaccccactcagctaacctgacctcctggaggcccagagatcctagtctttttgccactgtatttccagaccttaccttgagatgagtgaaggcctgggcagatctggtgtagtcccagttgttgtcctgaaggcacctggagtggaagaacaggcagctctgtaagaactctgactcgtaaatgccagctgaaagtccactccataaaagcacccaagtttgccaacaaatatgtacattcttatacatccttgcactatttatacaaatgagacattagtaaaagtccagatgttctaccaatggcttctcaaagataaggaatattaaatagctgtcaagaagctcaagatagtttttacagtggtagggaaagatgttcatggtgtaagtaaagaaactaagttgcagaacagtatatgaaaaggaacttccattttacctttaaagttttttatgttaatttatacacaggcaaattttttatagactatcaggtttgtgtttttctgtttgctttttttttttttttgagaccgagtcttgctctgtcaccaggctggagtgcagtggcgtgatctcggctcactgcaacctccgccttccaggttcaagcaattctcctgcctcagcctcccgagtagttgggactacaggcgtggaacgccaagccccgctaatttttgtatttttagtagagacgagatttcaccatgttgtccaggatggtcttgatctcttgacctcgtgatctggccgcctcagcctcccaaagtgc
